United States Patent Application Publication US 2024/0374759 A1 - sequence listing, part 3

SEQ ID NO: 1770 - protein, 2218 aa, synthetic construct
  source 1..2218: note = Description of Artificial Sequence: Synthetic polypeptide
MPAAKRVKLDGGDKKYSIGLDIGTNSVGWAVITDEYKVPSKKFKVLGNTDRHSIKKNLIGALLFDSGETAEATRLKRTARRRYTRRKNRICYLQEIFSNEMAKVDDSFFHRLEESFLVEEDKKHERHPIFGNIVDEVAYHEKYPTIYHLRKKLVDSTDKADLRLIYLALAHMIKFRGHFLIEGDLNPDNSDVDKLFIQLVQTYNQLFEENPINASGVDAKAILSARLSKSRRLENLIAQLPGEKKNGLFGNLIALSLGLTPNFKSNFDLAEDAKLQLSKDTYDDDLDNLLAQIGDQYADLFLAAKNLSDAILLSDILRVNTEITKAPLSASMIKRYDEHHQDLTLLKALVRQQLPEKYKEIFFDQSKNGYAGYIDGGASQEEFYKFIKPILEKMDGTEELLVKLNREDLLRKQRTFDNGSIPHQIHLGELHAILRRQEDFYPFLKDNREKIEKILTFRIPYYVGPLARGNSRFAWMTRKSEETITPWNFEEVVDKGASAQSFIERMTNFDKNLPNEKVLPKHSLLYEYFTVYNELTKVKYVTEGMRKPAFLSGEQKKAIVDLLFKTNRKVTVKQLKEDYFKKIECFDSVEISGVEDRFNASLGTYHDLLKIIKDKDFLDNEENEDILEDIVLTLTLFEDREMIEERLKTYAHLFDDKVMKQLKRRRYTGWGRLSRKLINGIRDKQSGKTILDFLKSDGFANRNFMQLIHDDSLTFKEDIQKAQVSGQGDSLHEHIANLAGSPAIKKGILQTVKVVDELVKVMGRHKPENIVIEMARENQTTQKGQKNSRERMKRIEEGIKELGSQILKEHPVENTQLQNEKLYLYYLQNGRDMYVDQELDINRLSDYDVDHIVPQSFLKDDSIDNKVLTRSDKARGKSDNVPSEEVVKKMKNYWRQLLNAKLITQRKFDNLTKAERGGLSELDKAGFIKRQLVETRQITKHVAQILDSRMNTKYDENDKLIREVKVITLKSKLVSDFRKDFQFYKVREINNYHHAHDAYLNAVVGTALIKKYPKLESEFVYGDYKVYDVRKMIAKSEQEIGKATAKYFFYSNIMNFFKTEITLANGEIRKRPLIETNGETGEIVWDKGRDFATVRKVLSMPQVNIVKKTEVQTGGFSKESILPKRNSDKLIARKKDWDPKKYGGFDSPTVAYSVLVVAKVEKGKSKKLKSVKELLGITIMERSSFEKNPIDFLEAKGYKEVKKDLIIKLPKYSLFELENGRKRMLASAGELQKGNELALPSKYVNFLYLASHYEKLKGSPEDNEQKQLFVEQHKHYLDEIIEQISEFSKRVILADANLDKVLSAYNKHRDKPIREQAENIIHLFTLTNLGAPAAFKYFDTTIDRKRYTSTKEVLDATLIHQSITGLYETRIDLSQLGGDGGEAAAKGGGPAPGGTLGDQGSRGSDPLPEPRVTLTVEGIPTEFLVNTGAEHSVLTKPMGKMGSKRTVVAGATGSKVYPWTTKRLLKIGQKQVTHSFLVIPECPAPLLGRDLLTKLKAQIQFSTEGPQVTWEDRPAMCLVLNLEEEYRLHEKPVPPSIDPSWLQLFPMVWAEKAGMGLANQVPPVVVELKSDASPVAVRQYPMSKEAREGIRPHIQRFLDLGILVPCQSPWNTPLLPVKKPGTNDYRPVQDLREVNKRVQDIHPTVPNPYNLLSSLPPSHTWYSVLDLKDAFFCLKLHPNSQPLFAFEWRDPEKGNTGQLTWTRLPQGFKNSPTLFNEALHRDLASFRALNPQVVMLQYVDDLLVAAPTYRDCKEGTRRLLQELSKLGYRVSAKKAQLCREEVTYLGYLLKGGKRWLTPARKATVMKIPTPTTPRQVREFLGKAGFCRLFIPGFASLAAPLYPLTRPKVPFTWTEAHQEAFGRIKEALLSAPALALPDLTKPFALYVDEKEGVARGVLTQTLGPWRRPVAYLSKKLDPVASGWPTCLKAIAAVALLLKDADKLTLGQNVLVIAPHNLESIVRQPPDRWMTNARMTHYQSLLLNERVSFAPPAILNPATLLPVESDDTPIHICSEILAEETGTRPDLRDQPLPGVPAWYTDGSSFIMDGRRQAGAAIVDNKRTVWASNLPEGTSAQKAELIALTQALRLAEGKSINIYTDSRYAFATAHVHGAIYKQRGWLTSAGKDIKNKEEILALLEAIHLPKRVAIIHCPGHQRGTDPVATGNRKADEAAKQAAQSTRILTETTKNAGKRTADGSEFEKRTADGSEFESPKKKAKVE

SEQ ID NO: 1771 - protein, 2218 aa, synthetic construct
  source 1..2218: note = Description of Artificial Sequence: Synthetic polypeptide
MPAAKRVKLDGGDKKYSIGLDIGTNSVGWAVITDEYKVPSKKFKVLGNTDRHSIKKNLIGALLFDSGETAEATRLKRTARRRYTRRKNRICYLQEIFSNEMAKVDDSFFHRLEESFLVEEDKKHERHPIFGNIVDEVAYHEKYPTIYHLRKKLVDSTDKADLRLIYLALAHMIKFRGHFLIEGDLNPDNSDVDKLFIQLVQTYNQLFEENPINASGVDAKAILSARLSKSRRLENLIAQLPGEKKNGLFGNLIALSLGLTPNFKSNFDLAEDAKLQLSKDTYDDDLDNLLAQIGDQYADLFLAAKNLSDAILLSDILRVNTEITKAPLSASMIKRYDEHHQDLTLLKALVRQQLPEKYKEIFFDQSKNGYAGYIDGGASQEEFYKFIKPILEKMDGTEELLVKLNREDLLRKQRTFDNGSIPHQIHLGELHAILRRQEDFYPFLKDNREKIEKILTFRIPYYVGPLARGNSRFAWMTRKSEETITPWNFEEVVDKGASAQSFIERMTNFDKNLPNEKVLPKHSLLYEYFTVYNELTKVKYVTEGMRKPAFLSGEQKKAIVDLLFKTNRKVTVKQLKEDYFKKIECFDSVEISGVEDRFNASLGTYHDLLKIIKDKDFLDNEENEDILEDIVLTLTLFEDREMIEERLKTYAHLFDDKVMKQLKRRRYTGWGRLSRKLINGIRDKQSGKTILDFLKSDGFANRNFMQLIHDDSLTFKEDIQKAQVSGQGDSLHEHIANLAGSPAIKKGILQTVKVVDELVKVMGRHKPENIVIEMARENQTTQKGQKNSRERMKRIEEGIKELGSQILKEHPVENTQLQNEKLYLYYLQNGRDMYVDQELDINRLSDYDVDHIVPQSFLKDDSIDNKVLTRSDKARGKSDNVPSEEVVKKMKNYWRQLLNAKLITQRKFDNLTKAERGGLSELDKAGFIKRQLVETRQITKHVAQILDSRMNTKYDENDKLIREVKVITLKSKLVSDFRKDFQFYKVREINNYHHAHDAYLNAVVGTALIKKYPKLESEFVYGDYKVYDVRKMIAKSEQEIGKATAKYFFYSNIMNFFKTEITLANGEIRKRPLIETNGETGEIVWDKGRDFATVRKVLSMPQVNIVKKTEVQTGGFSKESILPKRNSDKLIARKKDWDPKKYGGFDSPTVAYSVLVVAKVEKGKSKKLKSVKELLGITIMERSSFEKNPIDFLEAKGYKEVKKDLIIKLPKYSLFELENGRKRMLASAGELQKGNELALPSKYVNFLYLASHYEKLKGSPEDNEQKQLFVEQHKHYLDEIIEQISEFSKRVILADANLDKVLSAYNKHRDKPIREQAENIIHLFTLTNLGAPAAFKYFDTTIDRKRYTSTKEVLDATLIHQSITGLYETRIDLSQLGGDGGGGGEAAAKGGSGGTLGDQGSRGSDPLPEPRVTLTVEGIPTEFLVNTGAEHSVLTKPMGKMGSKRTVVAGATGSKVYPWTTKRLLKIGQKQVTHSFLVIPECPAPLLGRDLLTKLKAQIQFSTEGPQVTWEDRPAMCLVLNLEEEYRLHEKPVPPSIDPSWLQLFPMVWAEKAGMGLANQVPPVVVELKSDASPVAVRQYPMSKEAREGIRPHIQRFLDLGILVPCQSPWNTPLLPVKKPGTNDYRPVQDLREVNKRVQDIHPTVPNPYNLLSSLPPSHTWYSVLDLKDAFFCLKLHPNSQPLFAFEWRDPEKGNTGQLTWTRLPQGFKNSPTLFNEALHRDLASFRALNPQVVMLQYVDDLLVAAPTYRDCKEGTRRLLQELSKLGYRVSAKKAQLCREEVTYLGYLLKGGKRWLTPARKATVMKIPTPTTPRQVREFLGKAGFCRLFIPGFASLAAPLYPLTRPKVPFTWTEAHQEAFGRIKEALLSAPALALPDLTKPFALYVDEKEGVARGVLTQTLGPWRRPVAYLSKKLDPVASGWPTCLKAIAAVALLLKDADKLTLGQNVLVIAPHNLESIVRQPPDRWMTNARMTHYQSLLLNERVSFAPPAILNPATLLPVESDDTPIHICSEILAEETGTRPDLRDQPLPGVPAWYTDGSSFIMDGRRQAGAAIVDNKRTVWASNLPEGTSAQKAELIALTQALRLAEGKSINIYTDSRYAFATAHVHGAIYKQRGWLTSAGKDIKNKEEILALLEAIHLPKRVAIIHCPGHQRGTDPVATGNRKADEAAKQAAQSTRILTETTKNAGKRTADGSEFEKRTADGSEFESPKKKAKVE

SEQ ID NO: 1772 - protein, 2213 aa, synthetic construct
  source 1..2213: note = Description of Artificial Sequence: Synthetic polypeptide
MPAAKRVKLDGGDKKYSIGLDIGTNSVGWAVITDEYKVPSKKFKVLGNTDRHSIKKNLIGALLFDSGETAEATRLKRTARRRYTRRKNRICYLQEIFSNEMAKVDDSFFHRLEESFLVEEDKKHERHPIFGNIVDEVAYHEKYPTIYHLRKKLVDSTDKADLRLIYLALAHMIKFRGHFLIEGDLNPDNSDVDKLFIQLVQTYNQLFEENPINASGVDAKAILSARLSKSRRLENLIAQLPGEKKNGLFGNLIALSLGLTPNFKSNFDLAEDAKLQLSKDTYDDDLDNLLAQIGDQYADLFLAAKNLSDAILLSDILRVNTEITKAPLSASMIKRYDEHHQDLTLLKALVRQQLPEKYKEIFFDQSKNGYAGYIDGGASQEEFYKFIKPILEKMDGTEELLVKLNREDLLRKQRTFDNGSIPHQIHLGELHAILRRQEDFYPFLKDNREKIEKILTFRIPYYVGPLARGNSRFAWMTRKSEETITPWNFEEVVDKGASAQSFIERMTNFDKNLPNEKVLPKHSLLYEYFTVYNELTKVKYVTEGMRKPAFLSGEQKKAIVDLLFKTNRKVTVKQLKEDYFKKIECFDSVEISGVEDRFNASLGTYHDLLKIIKDKDFLDNEENEDILEDIVLTLTLFEDREMIEERLKTYAHLFDDKVMKQLKRRRYTGWGRLSRKLINGIRDKQSGKTILDFLKSDGFANRNFMQLIHDDSLTFKEDIQKAQVSGQGDSLHEHIANLAGSPAIKKGILQTVKVVDELVKVMGRHKPENIVIEMARENQTTQKGQKNSRERMKRIEEGIKELGSQILKEHPVENTQLQNEKLYLYYLQNGRDMYVDQELDINRLSDYDVDHIVPQSFLKDDSIDNKVLTRSDKARGKSDNVPSEEVVKKMKNYWRQLLNAKLITQRKFDNLTKAERGGLSELDKAGFIKRQLVETRQITKHVAQILDSRMNTKYDENDKLIREVKVITLKSKLVSDFRKDFQFYKVREINNYHHAHDAYLNAVVGTALIKKYPKLESEFVYGDYKVYDVRKMIAKSEQEIGKATAKYFFYSNIMNFFKTEITLANGEIRKRPLIETNGETGEIVWDKGRDFATVRKVLSMPQVNIVKKTEVQTGGFSKESILPKRNSDKLIARKKDWDPKKYGGFDSPTVAYSVLVVAKVEKGKSKKLKSVKELLGITIMERSSFEKNPIDFLEAKGYKEVKKDLIIKLPKYSLFELENGRKRMLASAGELQKGNELALPSKYVNFLYLASHYEKLKGSPEDNEQKQLFVEQHKHYLDEIIEQISEFSKRVILADANLDKVLSAYNKHRDKPIREQAENIIHLFTLTNLGAPAAFKYFDTTIDRKRYTSTKEVLDATLIHQSITGLYETRIDLSQLGGDGGGGGGSSGGTLGDQGSRGSDPLPEPRVTLTVEGIPTEFLVNTGAEHSVLTKPMGKMGSKRTVVAGATGSKVYPWTTKRLLKIGQKQVTHSFLVIPECPAPLLGRDLLTKLKAQIQFSTEGPQVTWEDRPAMCLVLNLEEEYRLHEKPVPPSIDPSWLQLFPMVWAEKAGMGLANQVPPVVVELKSDASPVAVRQYPMSKEAREGIRPHIQRFLDLGILVPCQSPWNTPLLPVKKPGTNDYRPVQDLREVNKRVQDIHPTVPNPYNLLSSLPPSHTWYSVLDLKDAFFCLKLHPNSQPLFAFEWRDPEKGNTGQLTWTRLPQGFKNSPTLFNEALHRDLASFRALNPQVVMLQYVDDLLVAAPTYRDCKEGTRRLLQELSKLGYRVSAKKAQLCREEVTYLGYLLKGGKRWLTPARKATVMKIPTPTTPRQVREFLGKAGFCRLFIPGFASLAAPLYPLTRPKVPFTWTEAHQEAFGRIKEALLSAPALALPDLTKPFALYVDEKEGVARGVLTQTLGPWRRPVAYLSKKLDPVASGWPTCLKAIAAVALLLKDADKLTLGQNVLVIAPHNLESIVRQPPDRWMTNARMTHYQSLLLNERVSFAPPAILNPATLLPVESDDTPIHICSEILAEETGTRPDLRDQPLPGVPAWYTDGSSFIMDGRRQAGAAIVDNKRTVWASNLPEGTSAQKAELIALTQALRLAEGKSINIYTDSRYAFATAHVHGAIYKQRGWLTSAGKDIKNKEEILALLEAIHLPKRVAIIHCPGHQRGTDPVATGNRKADEAAKQAAQSTRILTETTKNAGKRTADGSEFEKRTADGSEFESPKKKAKVE

SEQ ID NO: 1773 - protein, 2217 aa, synthetic construct
  source 1..2217: note = Description of Artificial Sequence: Synthetic polypeptide
MPAAKRVKLDGGDKKYSIGLDIGTNSVGWAVITDEYKVPSKKFKVLGNTDRHSIKKNLIGALLFDSGETAEATRLKRTARRRYTRRKNRICYLQEIFSNEMAKVDDSFFHRLEESFLVEEDKKHERHPIFGNIVDEVAYHEKYPTIYHLRKKLVDSTDKADLRLIYLALAHMIKFRGHFLIEGDLNPDNSDVDKLFIQLVQTYNQLFEENPINASGVDAKAILSARLSKSRRLENLIAQLPGEKKNGLFGNLIALSLGLTPNFKSNFDLAEDAKLQLSKDTYDDDLDNLLAQIGDQYADLFLAAKNLSDAILLSDILRVNTEITKAPLSASMIKRYDEHHQDLTLLKALVRQQLPEKYKEIFFDQSKNGYAGYIDGGASQEEFYKFIKPILEKMDGTEELLVKLNREDLLRKQRTFDNGSIPHQIHLGELHAILRRQEDFYPFLKDNREKIEKILTFRIPYYVGPLARGNSRFAWMTRKSEETITPWNFEEVVDKGASAQSFIERMTNFDKNLPNEKVLPKHSLLYEYFTVYNELTKVKYVTEGMRKPAFLSGEQKKAIVDLLFKTNRKVTVKQLKEDYFKKIECFDSVEISGVEDRFNASLGTYHDLLKIIKDKDFLDNEENEDILEDIVLTLTLFEDREMIEERLKTYAHLFDDKVMKQLKRRRYTGWGRLSRKLINGIRDKQSGKTILDFLKSDGFANRNFMQLIHDDSLTFKEDIQKAQVSGQGDSLHEHIANLAGSPAIKKGILQTVKVVDELVKVMGRHKPENIVIEMARENQTTQKGQKNSRERMKRIEEGIKELGSQILKEHPVENTQLQNEKLYLYYLQNGRDMYVDQELDINRLSDYDVDHIVPQSFLKDDSIDNKVLTRSDKARGKSDNVPSEEVVKKMKNYWRQLLNAKLITQRKFDNLTKAERGGLSELDKAGFIKRQLVETRQITKHVAQILDSRMNTKYDENDKLIREVKVITLKSKLVSDFRKDFQFYKVREINNYHHAHDAYLNAVVGTALIKKYPKLESEFVYGDYKVYDVRKMIAKSEQEIGKATAKYFFYSNIMNFFKTEITLANGEIRKRPLIETNGETGEIVWDKGRDFATVRKVLSMPQVNIVKKTEVQTGGFSKESILPKRNSDKLIARKKDWDPKKYGGFDSPTVAYSVLVVAKVEKGKSKKLKSVKELLGITIMERSSFEKNPIDFLEAKGYKEVKKDLIIKLPKYSLFELENGRKRMLASAGELQKGNELALPSKYVNFLYLASHYEKLKGSPEDNEQKQLFVEQHKHYLDEIIEQISEFSKRVILADANLDKVLSAYNKHRDKPIREQAENIIHLFTLTNLGAPAAFKYFDTTIDRKRYTSTKEVLDATLIHQSITGLYETRIDLSQLGGDGGEAAAKEAAAKGGTLGDQGSRGSDPLPEPRVTLTVEGIPTEFLVNTGAEHSVLTKPMGKMGSKRTVVAGATGSKVYPWTTKRLLKIGQKQVTHSFLVIPECPAPLLGRDLLTKLKAQIQFSTEGPQVTWEDRPAMCLVLNLEEEYRLHEKPVPPSIDPSWLQLFPMVWAEKAGMGLANQVPPVVVELKSDASPVAVRQYPMSKEAREGIRPHIQRFLDLGILVPCQSPWNTPLLPVKKPGTNDYRPVQDLREVNKRVQDIHPTVPNPYNLLSSLPPSHTWYSVLDLKDAFFCLKLHPNSQPLFAFEWRDPEKGNTGQLTWTRLPQGFKNSPTLFNEALHRDLASFRALNPQVVMLQYVDDLLVAAPTYRDCKEGTRRLLQELSKLGYRVSAKKAQLCREEVTYLGYLLKGGKRWLTPARKATVMKIPTPTTPRQVREFLGKAGFCRLFIPGFASLAAPLYPLTRPKVPFTWTEAHQEAFGRIKEALLSAPALALPDLTKPFALYVDEKEGVARGVLTQTLGPWRRPVAYLSKKLDPVASGWPTCLKAIAAVALLLKDADKLTLGQNVLVIAPHNLESIVRQPPDRWMTNARMTHYQSLLLNERVSFAPPAILNPATLLPVESDDTPIHICSEILAEETGTRPDLRDQPLPGVPAWYTDGSSFIMDGRRQAGAAIVDNKRTVWASNLPEGTSAQKAELIALTQALRLAEGKSINIYTDSRYAFATAHVHGAIYKQRGWLTSAGKDIKNKEEILALLEAIHLPKRVAIIHCPGHQRGTDPVATGNRKADEAAKQAAQSTRILTETTKNAGKRTADGSEFEKRTADGSEFESPKKKAKVE

SEQ ID NO: 1774 - protein, 2216 aa, synthetic construct
  source 1..2216: note = Description of Artificial Sequence: Synthetic polypeptide
MPAAKRVKLDGGDKKYSIGLDIGTNSVGWAVITDEYKVPSKKFKVLGNTDRHSIKKNLIGALLFDSGETAEATRLKRTARRRYTRRKNRICYLQEIFSNEMAKVDDSFFHRLEESFLVEEDKKHERHPIFGNIVDEVAYHEKYPTIYHLRKKLVDSTDKADLRLIYLALAHMIKFRGHFLIEGDLNPDNSDVDKLFIQLVQTYNQLFEENPINASGVDAKAILSARLSKSRRLENLIAQLPGEKKNGLFGNLIALSLGLTPNFKSNFDLAEDAKLQLSKDTYDDDLDNLLAQIGDQYADLFLAAKNLSDAILLSDILRVNTEITKAPLSASMIKRYDEHHQDLTLLKALVRQQLPEKYKEIFFDQSKNGYAGYIDGGASQEEFYKFIKPILEKMDGTEELLVKLNREDLLRKQRTFDNGSIPHQIHLGELHAILRRQEDFYPFLKDNREKIEKILTFRIPYYVGPLARGNSRFAWMTRKSEETITPWNFEEVVDKGASAQSFIERMTNFDKNLPNEKVLPKHSLLYEYFTVYNELTKVKYVTEGMRKPAFLSGEQKKAIVDLLFKTNRKVTVKQLKEDYFKKIECFDSVEISGVEDRFNASLGTYHDLLKIIKDKDFLDNEENEDILEDIVLTLTLFEDREMIEERLKTYAHLFDDKVMKQLKRRRYTGWGRLSRKLINGIRDKQSGKTILDFLKSDGFANRNFMQLIHDDSLTFKEDIQKAQVSGQGDSLHEHIANLAGSPAIKKGILQTVKVVDELVKVMGRHKPENIVIEMARENQTTQKGQKNSRERMKRIEEGIKELGSQILKEHPVENTQLQNEKLYLYYLQNGRDMYVDQELDINRLSDYDVDHIVPQSFLKDDSIDNKVLTRSDKARGKSDNVPSEEVVKKMKNYWRQLLNAKLITQRKFDNLTKAERGGLSELDKAGFIKRQLVETRQITKHVAQILDSRMNTKYDENDKLIREVKVITLKSKLVSDFRKDFQFYKVREINNYHHAHDAYLNAVVGTALIKKYPKLESEFVYGDYKVYDVRKMIAKSEQEIGKATAKYFFYSNIMNFFKTEITLANGEIRKRPLIETNGETGEIVWDKGRDFATVRKVLSMPQVNIVKKTEVQTGGFSKESILPKRNSDKLIARKKDWDPKKYGGFDSPTVAYSVLVVAKVEKGKSKKLKSVKELLGITIMERSSFEKNPIDFLEAKGYKEVKKDLIIKLPKYSLFELENGRKRMLASAGELQKGNELALPSKYVNFLYLASHYEKLKGSPEDNEQKQLFVEQHKHYLDEIIEQISEFSKRVILADANLDKVLSAYNKHRDKPIREQAENIIHLFTLTNLGAPAAFKYFDTTIDRKRYTSTKEVLDATLIHQSITGLYETRIDLSQLGGDGGPAPGGGGSSGGTLGDQGSRGSDPLPEPRVTLTVEGIPTEFLVNTGAEHSVLTKPMGKMGSKRTVVAGATGSKVYPWTTKRLLKIGQKQVTHSFLVIPECPAPLLGRDLLTKLKAQIQFSTEGPQVTWEDRPAMCLVLNLEEEYRLHEKPVPPSIDPSWLQLFPMVWAEKAGMGLANQVPPVVVELKSDASPVAVRQYPMSKEAREGIRPHIQRFLDLGILVPCQSPWNTPLLPVKKPGTNDYRPVQDLREVNKRVQDIHPTVPNPYNLLSSLPPSHTWYSVLDLKDAFFCLKLHPNSQPLFAFEWRDPEKGNTGQLTWTRLPQGFKNSPTLFNEALHRDLASFRALNPQVVMLQYVDDLLVAAPTYRDCKEGTRRLLQELSKLGYRVSAKKAQLCREEVTYLGYLLKGGKRWLTPARKATVMKIPTPTTPRQVREFLGKAGFCRLFIPGFASLAAPLYPLTRPKVPFTWTEAHQEAFGRIKEALLSAPALALPDLTKPFALYVDEKEGVARGVLTQTLGPWRRPVAYLSKKLDPVASGWPTCLKAIAAVALLLKDADKLTLGQNVLVIAPHNLESIVRQPPDRWMTNARMTHYQSLLLNERVSFAPPAILNPATLLPVESDDTPIHICSEILAEETGTRPDLRDQPLPGVPAWYTDGSSFIMDGRRQAGAAIVDNKRTVWASNLPEGTSAQKAELIALTQALRLAEGKSINIYTDSRYAFATAHVHGAIYKQRGWLTSAGKDIKNKEEILALLEAIHLPKRVAIIHCPGHQRGTDPVATGNRKADEAAKQAAQSTRILTETTKNAGKRTADGSEFEKRTADGSEFESPKKKAKVE

SEQ ID NO: 1775 - protein, 2216 aa, synthetic construct
  source 1..2216: note = Description of Artificial Sequence: Synthetic polypeptide
MPAAKRVKLDGGDKKYSIGLDIGTNSVGWAVITDEYKVPSKKFKVLGNTDRHSIKKNLIGALLFDSGETAEATRLKRTARRRYTRRKNRICYLQEIFSNEMAKVDDSFFHRLEESFLVEEDKKHERHPIFGNIVDEVAYHEKYPTIYHLRKKLVDSTDKADLRLIYLALAHMIKFRGHFLIEGDLNPDNSDVDKLFIQLVQTYNQLFEENPINASGVDAKAILSARLSKSRRLENLIAQLPGEKKNGLFGNLIALSLGLTPNFKSNFDLAEDAKLQLSKDTYDDDLDNLLAQIGDQYADLFLAAKNLSDAILLSDILRVNTEITKAPLSASMIKRYDEHHQDLTLLKALVRQQLPEKYKEIFFDQSKNGYAGYIDGGASQEEFYKFIKPILEKMDGTEELLVKLNREDLLRKQRTFDNGSIPHQIHLGELHAILRRQEDFYPFLKDNREKIEKILTFRIPYYVGPLARGNSRFAWMTRKSEETITPWNFEEVVDKGASAQSFIERMTNFDKNLPNEKVLPKHSLLYEYFTVYNELTKVKYVTEGMRKPAFLSGEQKKAIVDLLFKTNRKVTVKQLKEDYFKKIECFDSVEISGVEDRFNASLGTYHDLLKIIKDKDFLDNEENEDILEDIVLTLTLFEDREMIEERLKTYAHLFDDKVMKQLKRRRYTGWGRLSRKLINGIRDKQSGKTILDFLKSDGFANRNFMQLIHDDSLTFKEDIQKAQVSGQGDSLHEHIANLAGSPAIKKGILQTVKVVDELVKVMGRHKPENIVIEMARENQTTQKGQKNSRERMKRIEEGIKELGSQILKEHPVENTQLQNEKLYLYYLQNGRDMYVDQELDINRLSDYDVDHIVPQSFLKDDSIDNKVLTRSDKARGKSDNVPSEEVVKKMKNYWRQLLNAKLITQRKFDNLTKAERGGLSELDKAGFIKRQLVETRQITKHVAQILDSRMNTKYDENDKLIREVKVITLKSKLVSDFRKDFQFYKVREINNYHHAHDAYLNAVVGTALIKKYPKLESEFVYGDYKVYDVRKMIAKSEQEIGKATAKYFFYSNIMNFFKTEITLANGEIRKRPLIETNGETGEIVWDKGRDFATVRKVLSMPQVNIVKKTEVQTGGFSKESILPKRNSDKLIARKKDWDPKKYGGFDSPTVAYSVLVVAKVEKGKSKKLKSVKELLGITIMERSSFEKNPIDFLEAKGYKEVKKDLIIKLPKYSLFELENGRKRMLASAGELQKGNELALPSKYVNFLYLASHYEKLKGSPEDNEQKQLFVEQHKHYLDEIIEQISEFSKRVILADANLDKVLSAYNKHRDKPIREQAENIIHLFTLTNLGAPAAFKYFDTTIDRKRYTSTKEVLDATLIHQSITGLYETRIDLSQLGGDGGGGGGGSGSSGGTLGDQGSRGSDPLPEPRVTLTVEGIPTEFLVNTGAEHSVLTKPMGKMGSKRTVVAGATGSKVYPWTTKRLLKIGQKQVTHSFLVIPECPAPLLGRDLLTKLKAQIQFSTEGPQVTWEDRPAMCLVLNLEEEYRLHEKPVPPSIDPSWLQLFPMVWAEKAGMGLANQVPPVVVELKSDASPVAVRQYPMSKEAREGIRPHIQRFLDLGILVPCQSPWNTPLLPVKKPGTNDYRPVQDLREVNKRVQDIHPTVPNPYNLLSSLPPSHTWYSVLDLKDAFFCLKLHPNSQPLFAFEWRDPEKGNTGQLTWTRLPQGFKNSPTLFNEALHRDLASFRALNPQVVMLQYVDDLLVAAPTYRDCKEGTRRLLQELSKLGYRVSAKKAQLCREEVTYLGYLLKGGKRWLTPARKATVMKIPTPTTPRQVREFLGKAGFCRLFIPGFASLAAPLYPLTRPKVPFTWTEAHQEAFGRIKEALLSAPALALPDLTKPFALYVDEKEGVARGVLTQTLGPWRRPVAYLSKKLDPVASGWPTCLKAIAAVALLLKDADKLTLGQNVLVIAPHNLESIVRQPPDRWMTNARMTHYQSLLLNERVSFAPPAILNPATLLPVESDDTPIHICSEILAEETGTRPDLRDQPLPGVPAWYTDGSSFIMDGRRQAGAAIVDNKRTVWASNLPEGTSAQKAELIALTQALRLAEGKSINIYTDSRYAFATAHVHGAIYKQRGWLTSAGKDIKNKEEILALLEAIHLPKRVAIIHCPGHQRGTDPVATGNRKADEAAKQAAQSTRILTETTKNAGKRTADGSEFEKRTADGSEFESPKKKAKVE

SEQ ID NO: 1776 - protein, 2210 aa, synthetic construct
  source 1..2210: note = Description of Artificial Sequence: Synthetic polypeptide
MPAAKRVKLDGGDKKYSIGLDIGTNSVGWAVITDEYKVPSKKFKVLGNTDRHSIKKNLIGALLFDSGETAEATRLKRTARRRYTRRKNRICYLQEIFSNEMAKVDDSFFHRLEESFLVEEDKKHERHPIFGNIVDEVAYHEKYPTIYHLRKKLVDSTDKADLRLIYLALAHMIKFRGHFLIEGDLNPDNSDVDKLFIQLVQTYNQLFEENPINASGVDAKAILSARLSKSRRLENLIAQLPGEKKNGLFGNLIALSLGLTPNFKSNFDLAEDAKLQLSKDTYDDDLDNLLAQIGDQYADLFLAAKNLSDAILLSDILRVNTEITKAPLSASMIKRYDEHHQDLTLLKALVRQQLPEKYKEIFFDQSKNGYAGYIDGGASQEEFYKFIKPILEKMDGTEELLVKLNREDLLRKQRTFDNGSIPHQIHLGELHAILRRQEDFYPFLKDNREKIEKILTFRIPYYVGPLARGNSRFAWMTRKSEETITPWNFEEVVDKGASAQSFIERMTNFDKNLPNEKVLPKHSLLYEYFTVYNELTKVKYVTEGMRKPAFLSGEQKKAIVDLLFKTNRKVTVKQLKEDYFKKIECFDSVEISGVEDRFNASLGTYHDLLKIIKDKDFLDNEENEDILEDIVLTLTLFEDREMIEERLKTYAHLFDDKVMKQLKRRRYTGWGRLSRKLINGIRDKQSGKTILDFLKSDGFANRNFMQLIHDDSLTFKEDIQKAQVSGQGDSLHEHIANLAGSPAIKKGILQTVKVVDELVKVMGRHKPENIVIEMARENQTTQKGQKNSRERMKRIEEGIKELGSQILKEHPVENTQLQNEKLYLYYLQNGRDMYVDQELDINRLSDYDVDHIVPQSFLKDDSIDNKVLTRSDKARGKSDNVPSEEVVKKMKNYWRQLLNAKLITQRKFDNLTKAERGGLSELDKAGFIKRQLVETRQITKHVAQILDSRMNTKYDENDKLIREVKVITLKSKLVSDFRKDFQFYKVREINNYHHAHDAYLNAVVGTALIKKYPKLESEFVYGDYKVYDVRKMIAKSEQEIGKATAKYFFYSNIMNFFKTEITLANGEIRKRPLIETNGETGEIVWDKGRDFATVRKVLSMPQVNIVKKTEVQTGGFSKESILPKRNSDKLIARKKDWDPKKYGGFDSPTVAYSVLVVAKVEKGKSKKLKSVKELLGITIMERSSFEKNPIDFLEAKGYKEVKKDLIIKLPKYSLFELENGRKRMLASAGELQKGNELALPSKYVNFLYLASHYEKLKGSPEDNEQKQLFVEQHKHYLDEIIEQISEFSKRVILADANLDKVLSAYNKHRDKPIREQAENIIHLFTLTNLGAPAAFKYFDTTIDRKRYTSTKEVLDATLIHQSITGLYETRIDLSQLGGDGGGSSGGTLGDQGSRGSDPLPEPRVTLTVEGIPTEFLVNTGAEHSVLTKPMGKMGSKRTVVAGATGSKVYPWTTKRLLKIGQKQVTHSFLVIPECPAPLLGRDLLTKLKAQIQFSTEGPQVTWEDRPAMCLVLNLEEEYRLHEKPVPPSIDPSWLQLFPMVWAEKAGMGLANQVPPVVVELKSDASPVAVRQYPMSKEAREGIRPHIQRFLDLGILVPCQSPWNTPLLPVKKPGTNDYRPVQDLREVNKRVQDIHPTVPNPYNLLSSLPPSHTWYSVLDLKDAFFCLKLHPNSQPLFAFEWRDPEKGNTGQLTWTRLPQGFKNSPTLFNEALHRDLASFRALNPQVVMLQYVDDLLVAAPTYRDCKEGTRRLLQELSKLGYRVSAKKAQLCREEVTYLGYLLKGGKRWLTPARKATVMKIPTPTTPRQVREFLGKAGFCRLFIPGFASLAAPLYPLTRPKVPFTWTEAHQEAFGRIKEALLSAPALALPDLTKPFALYVDEKEGVARGVLTQTLGPWRRPVAYLSKKLDPVASGWPTCLKAIAAVALLLKDADKLTLGQNVLVIAPHNLESIVRQPPDRWMTNARMTHYQSLLLNERVSFAPPAILNPATLLPVESDDTPIHICSEILAEETGTRPDLRDQPLPGVPAWYTDGSSFIMDGRRQAGAAIVDNKRTVWASNLPEGTSAQKAELIALTQALRLAEGKSINIYTDSRYAFATAHVHGAIYKQRGWLTSAGKDIKNKEEILALLEAIHLPKRVAIIHCPGHQRGTDPVATGNRKADEAAKQAAQSTRILTETTKNAGKRTADGSEFEKRTADGSEFESPKKKAKVE

SEQ ID NO: 1777 - protein, 2222 aa, synthetic construct
  source 1..2222: note = Description of Artificial Sequence: Synthetic polypeptide
MPAAKRVKLDGGDKKYSIGLDIGTNSVGWAVITDEYKVPSKKFKVLGNTDRHSIKKNLIGALLFDSGETAEATRLKRTARRRYTRRKNRICYLQEIFSNEMAKVDDSFFHRLEESFLVEEDKKHERHPIFGNIVDEVAYHEKYPTIYHLRKKLVDSTDKADLRLIYLALAHMIKFRGHFLIEGDLNPDNSDVDKLFIQLVQTYNQLFEENPINASGVDAKAILSARLSKSRRLENLIAQLPGEKKNGLFGNLIALSLGLTPNFKSNFDLAEDAKLQLSKDTYDDDLDNLLAQIGDQYADLFLAAKNLSDAILLSDILRVNTEITKAPLSASMIKRYDEHHQDLTLLKALVRQQLPEKYKEIFFDQSKNGYAGYIDGGASQEEFYKFIKPILEKMDGTEELLVKLNREDLLRKQRTFDNGSIPHQIHLGELHAILRRQEDFYPFLKDNREKIEKILTFRIPYYVGPLARGNSRFAWMTRKSEETITPWNFEEVVDKGASAQSFIERMTNFDKNLPNEKVLPKHSLLYEYFTVYNELTKVKYVTEGMRKPAFLSGEQKKAIVDLLFKTNRKVTVKQLKEDYFKKIECFDSVEISGVEDRFNASLGTYHDLLKIIKDKDFLDNEENEDILEDIVLTLTLFEDREMIEERLKTYAHLFDDKVMKQLKRRRYTGWGRLSRKLINGIRDKQSGKTILDFLKSDGFANRNFMQLIHDDSLTFKEDIQKAQVSGQGDSLHEHIANLAGSPAIKKGILQTVKVVDELVKVMGRHKPENIVIEMARENQTTQKGQKNSRERMKRIEEGIKELGSQILKEHPVENTQLQNEKLYLYYLQNGRDMYVDQELDINRLSDYDVDHIVPQSFLKDDSIDNKVLTRSDKARGKSDNVPSEEVVKKMKNYWRQLLNAKLITQRKFDNLTKAERGGLSELDKAGFIKRQLVETRQITKHVAQILDSRMNTKYDENDKLIREVKVITLKSKLVSDFRKDFQFYKVREINNYHHAHDAYLNAVVGTALIKKYPKLESEFVYGDYKVYDVRKMIAKSEQEIGKATAKYFFYSNIMNFFKTEITLANGEIRKRPLIETNGETGEIVWDKGRDFATVRKVLSMPQVNIVKKTEVQTGGFSKESILPKRNSDKLIARKKDWDPKKYGGFDSPTVAYSVLVVAKVEKGKSKKLKSVKELLGITIMERSSFEKNPIDFLEAKGYKEVKKDLIIKLPKYSLFELENGRKRMLASAGELQKGNELALPSKYVNFLYLASHYEKLKGSPEDNEQKQLFVEQHKHYLDEIIEQISEFSKRVILADANLDKVLSAYNKHRDKPIREQAENIIHLFTLTNLGAPAAFKYFDTTIDRKRYTSTKEVLDATLIHQSITGLYETRIDLSQLGGDGGGGGGSEAAAKGGGGSGGTLGDQGSRGSDPLPEPRVTLTVEGIPTEFLVNTGAEHSVLTKPMGKMGSKRTVVAGATGSKVYPWTTKRLLKIGQKQVTHSFLVIPECPAPLLGRDLLTKLKAQIQFSTEGPQVTWEDRPAMCLVLNLEEEYRLHEKPVPPSIDPSWLQLFPMVWAEKAGMGLANQVPPVVVELKSDASPVAVRQYPMSKEAREGIRPHIQRFLDLGILVPCQSPWNTPLLPVKKPGTNDYRPVQDLREVNKRVQDIHPTVPNPYNLLSSLPPSHTWYSVLDLKDAFFCLKLHPNSQPLFAFEWRDPEKGNTGQLTWTRLPQGFKNSPTLFNEALHRDLASFRALNPQVVMLQYVDDLLVAAPTYRDCKEGTRRLLQELSKLGYRVSAKKAQLCREEVTYLGYLLKGGKRWLTPARKATVMKIPTPTTPRQVREFLGKAGFCRLFIPGFASLAAPLYPLTRPKVPFTWTEAHQEAFGRIKEALLSAPALALPDLTKPFALYVDEKEGVARGVLTQTLGPWRRPVAYLSKKLDPVASGWPTCLKAIAAVALLLKDADKLTLGQNVLVIAPHNLESIVRQPPDRWMTNARMTHYQSLLLNERVSFAPPAILNPATLLPVESDDTPIHICSEILAEETGTRPDLRDQPLPGVPAWYTDGSSFIMDGRRQAGAAIVDNKRTVWASNLPEGTSAQKAELIALTQALRLAEGKSINIYTDSRYAFATAHVHGAIYKQRGWLTSAGKDIKNKEEILALLEAIHLPKRVAIIHCPGHQRGTDPVATGNRKADEAAKQAAQSTRILTETTKNAGKRTADGSEFEKRTADGSEFESPKKKAKVE

SEQ ID NO: 1778 - protein, 2237 aa, synthetic construct
  source 1..2237: note = Description of Artificial Sequence: Synthetic polypeptide
MPAAKRVKLDGGDKKYSIGLDIGTNSVGWAVITDEYKVPSKKFKVLGNTDRHSIKKNLIGALLFDSGETAEATRLKRTARRRYTRRKNRICYLQEIFSNEMAKVDDSFFHRLEESFLVEEDKKHERHPIFGNIVDEVAYHEKYPTIYHLRKKLVDSTDKADLRLIYLALAHMIKFRGHFLIEGDLNPDNSDVDKLFIQLVQTYNQLFEENPINASGVDAKAILSARLSKSRRLENLIAQLPGEKKNGLFGNLIALSLGLTPNFKSNFDLAEDAKLQLSKDTYDDDLDNLLAQIGDQYADLFLAAKNLSDAILLSDILRVNTEITKAPLSASMIKRYDEHHQDLTLLKALVRQQLPEKYKEIFFDQSKNGYAGYIDGGASQEEFYKFIKPILEKMDGTEELLVKLNREDLLRKQRTFDNGSIPHQIHLGELHAILRRQEDFYPFLKDNREKIEKILTFRIPYYVGPLARGNSRFAWMTRKSEETITPWNFEEVVDKGASAQSFIERMTNFDKNLPNEKVLPKHSLLYEYFTVYNELTKVKYVTEGMRKPAFLSGEQKKAIVDLLFKTNRKVTVKQLKEDYFKKIECFDSVEISGVEDRFNASLGTYHDLLKIIKDKDFLDNEENEDILEDIVLTLTLFEDREMIEERLKTYAHLFDDKVMKQLKRRRYTGWGRLSRKLINGIRDKQSGKTILDFLKSDGFANRNFMQLIHDDSLTFKEDIQKAQVSGQGDSLHEHIANLAGSPAIKKGILQTVKVVDELVKVMGRHKPENIVIEMARENQTTQKGQKNSRERMKRIEEGIKELGSQILKEHPVENTQLQNEKLYLYYLQNGRDMYVDQELDINRLSDYDVDHIVPQSFLKDDSIDNKVLTRSDKARGKSDNVPSEEVVKKMKNYWRQLLNAKLITQRKFDNLTKAERGGLSELDKAGFIKRQLVETRQITKHVAQILDSRMNTKYDENDKLIREVKVITLKSKLVSDFRKDFQFYKVREINNYHHAHDAYLNAVVGTALIKKYPKLESEFVYGDYKVYDVRKMIAKSEQEIGKATAKYFFYSNIMNFFKTEITLANGEIRKRPLIETNGETGEIVWDKGRDFATVRKVLSMPQVNIVKKTEVQTGGFSKESILPKRNSDKLIARKKDWDPKKYGGFDSPTVAYSVLVVAKVEKGKSKKLKSVKELLGITIMERSSFEKNPIDFLEAKGYKEVKKDLIIKLPKYSLFELENGRKRMLASAGELQKGNELALPSKYVNFLYLASHYEKLKGSPEDNEQKQLFVEQHKHYLDEIIEQISEFSKRVILADANLDKVLSAYNKHRDKPIREQAENIIHLFTLTNLGAPAAFKYFDTTIDRKRYTSTKEVLDATLIHQSITGLYETRIDLSQLGGDGGEAAAKEAAAKEAAAKEAAAKEAAAKEAAAKGGTLGDQGSRGSDPLPEPRVTLTVEGIPTEFLVNTGAEHSVLTKPMGKMGSKRTVVAGATGSKVYPWTTKRLLKIGQKQVTHSFLVIPECPAPLLGRDLLTKLKAQIQFSTEGPQVTWEDRPAMCLVLNLEEEYRLHEKPVPPSIDPSWLQLFPMVWAEKAGMGLANQVPPVVVELKSDASPVAVRQYPMSKEAREGIRPHIQRFLDLGILVPCQSPWNTPLLPVKKPGTNDYRPVQDLREVNKRVQDIHPTVPNPYNLLSSLPPSHTWYSVLDLKDAFFCLKLHPNSQPLFAFEWRDPEKGNTGQLTWTRLPQGFKNSPTLFNEALHRDLASFRALNPQVVMLQYVDDLLVAAPTYRDCKEGTRRLLQELSKLGYRVSAKKAQLCREEVTYLGYLLKGGKRWLTPARKATVMKIPTPTTPRQVREFLGKAGFCRLFIPGFASLAAPLYPLTRPKVPFTWTEAHQEAFGRIKEALLSAPALALPDLTKPFALYVDEKEGVARGVLTQTLGPWRRPVAYLSKKLDPVASGWPTCLKAIAAVALLLKDADKLTLGQNVLVIAPHNLESIVRQPPDRWMTNARMTHYQSLLLNERVSFAPPAILNPATLLPVESDDTPIHICSEILAEETGTRPDLRDQPLPGVPAWYTDGSSFIMDGRRQAGAAIVDNKRTVWASNLPEGTSAQKAELIALTQALRLAEGKSINIYTDSRYAFATAHVHGAIYKQRGWLTSAGKDIKNKEEILALLEAIHLPKRVAIIHCPGHQRGTDPVATGNRKADEAAKQAAQSTRILTETTKNAGKRTADGSEFEKRTADGSEFESPKKKAKVE

SEQ ID NO: 1779 - protein, 2216 aa, synthetic construct
  source 1..2216: note = Description of Artificial Sequence: Synthetic polypeptide
MPAAKRVKLDGGDKKYSIGLDIGTNSVGWAVITDEYKVPSKKFKVLGNTDRHSIKKNLIGALLFDSGETAEATRLKRTARRRYTRRKNRICYLQEIFSNEMAKVDDSFFHRLEESFLVEEDKKHERHPIFGNIVDEVAYHEKYPTIYHLRKKLVDSTDKADLRLIYLALAHMIKFRGHFLIEGDLNPDNSDVDKLFIQLVQTYNQLFEENPINASGVDAKAILSARLSKSRRLENLIAQLPGEKKNGLFGNLIALSLGLTPNFKSNFDLAEDAKLQLSKDTYDDDLDNLLAQIGDQYADLFLAAKNLSDAILLSDILRVNTEITKAPLSASMIKRYDEHHQDLTLLKALVRQQLPEKYKEIFFDQSKNGYAGYIDGGASQEEFYKFIKPILEKMDGTEELLVKLNREDLLRKQRTFDNGSIPHQIHLGELHAILRRQEDFYPFLKDNREKIEKILTFRIPYYVGPLARGNSRFAWMTRKSEETITPWNFEEVVDKGASAQSFIERMTNFDKNLPNEKVLPKHSLLYEYFTVYNELTKVKYVTEGMRKPAFLSGEQKKAIVDLLFKTNRKVTVKQLKEDYFKKIECFDSVEISGVEDRFNASLGTYHDLLKIIKDKDFLDNEENEDILEDIVLTLTLFEDREMIEERLKTYAHLFDDKVMKQLKRRRYTGWGRLSRKLINGIRDKQSGKTILDFLKSDGFANRNFMQLIHDDSLTFKEDIQKAQVSGQGDSLHEHIANLAGSPAIKKGILQTVKVVDELVKVMGRHKPENIVIEMARENQTTQKGQKNSRERMKRIEEGIKELGSQILKEHPVENTQLQNEKLYLYYLQNGRDMYVDQELDINRLSDYDVDHIVPQSFLKDDSIDNKVLTRSDKARGKSDNVPSEEVVKKMKNYWRQLLNAKLITQRKFDNLTKAERGGLSELDKAGFIKRQLVETRQITKHVAQILDSRMNTKYDENDKLIREVKVITLKSKLVSDFRKDFQFYKVREINNYHHAHDAYLNAVVGTALIKKYPKLESEFVYGDYKVYDVRKMIAKSEQEIGKATAKYFFYSNIMNFFKTEITLANGEIRKRPLIETNGETGEIVWDKGRDFATVRKVLSMPQVNIVKKTEVQTGGFSKESILPKRNSDKLIARKKDWDPKKYGGFDSPTVAYSVLVVAKVEKGKSKKLKSVKELLGITIMERSSFEKNPIDFLEAKGYKEVKKDLIIKLPKYSLFELENGRKRMLASAGELQKGNELALPSKYVNFLYLASHYEKLKGSPEDNEQKQLFVEQHKHYLDEIIEQISEFSKRVILADANLDKVLSAYNKHRDKPIREQAENIIHLFTLTNLGAPAAFKYFDTTIDRKRYTSTKEVLDATLIHQSITGLYETRIDLSQLGGDGGGGSPAPGGGGGTLGDQGSRGSDPLPEPRVTLTVEGIPTEFLVNTGAEHSVLTKPMGKMGSKRTVVAGATGSKVYPWTTKRLLKIGQKQVTHSFLVIPECPAPLLGRDLLTKLKAQIQFSTEGPQVTWEDRPAMCLVLNLEEEYRLHEKPVPPSIDPSWLQLFPMVWAEKAGMGLANQVPPVVVELKSDASPVAVRQYPMSKEAREGIRPHIQRFLDLGILVPCQSPWNTPLLPVKKPGTNDYRPVQDLREVNKRVQDIHPTVPNPYNLLSSLPPSHTWYSVLDLKDAFFCLKLHPNSQPLFAFEWRDPEKGNTGQLTWTRLPQGFKNSPTLFNEALHRDLASFRALNPQVVMLQYVDDLLVAAPTYRDCKEGTRRLLQELSKLGYRVSAKKAQLCREEVTYLGYLLKGGKRWLTPARKATVMKIPTPTTPRQVREFLGKAGFCRLFIPGFASLAAPLYPLTRPKVPFTWTEAHQEAFGRIKEALLSAPALALPDLTKPFALYVDEKEGVARGVLTQTLGPWRRPVAYLSKKLDPVASGWPTCLKAIAAVALLLKDADKLTLGQNVLVIAPHNLESIVRQPPDRWMTNARMTHYQSLLLNERVSFAPPAILNPATLLPVESDDTPIHICSEILAEETGTRPDLRDQPLPGVPAWYTDGSSFIMDGRRQAGAAIVDNKRTVWASNLPEGTSAQKAELIALTQALRLAEGKSINIYTDSRYAFATAHVHGAIYKQRGWLTSAGKDIKNKEEILALLEAIHLPKRVAIIHCPGHQRGTDPVATGNRKADEAAKQAAQSTRILTETTKNAGKRTADGSEFEKRTADGSEFESPKKKAKVE

SEQ ID NO: 1780 - protein, 2213 aa, synthetic construct
  source 1..2213: note = Description of Artificial Sequence: Synthetic polypeptide
MPAAKRVKLDGGDKKYSIGLDIGTNSVGWAVITDEYKVPSKKFKVLGNTDRHSIKKNLIGALLFDSGETAEATRLKRTARRRYTRRKNRICYLQEIFSNEMAKVDDSFFHRLEESFLVEEDKKHERHPIFGNIVDEVAYHEKYPTIYHLRKKLVDSTDKADLRLIYLALAHMIKFRGHFLIEGDLNPDNSDVDKLFIQLVQTYNQLFEENPINASGVDAKAILSARLSKSRRLENLIAQLPGEKKNGLFGNLIALSLGLTPNFKSNFDLAEDAKLQLSKDTYDDDLDNLLAQIGDQYADLFLAAKNLSDAILLSDILRVNTEITKAPLSASMIKRYDEHHQDLTLLKALVRQQLPEKYKEIFFDQSKNGYAGYIDGGASQEEFYKFIKPILEKMDGTEELLVKLNREDLLRKQRTFDNGSIPHQIHLGELHAILRRQEDFYPFLKDNREKIEKILTFRIPYYVGPLARGNSRFAWMTRKSEETITPWNFEEVVDKGASAQSFIERMTNFDKNLPNEKVLPKHSLLYEYFTVYNELTKVKYVTEGMRKPAFLSGEQKKAIVDLLFKTNRKVTVKQLKEDYFKKIECFDSVEISGVEDRFNASLGTYHDLLKIIKDKDFLDNEENEDILEDIVLTLTLFEDREMIEERLKTYAHLFDDKVMKQLKRRRYTGWGRLSRKLINGIRDKQSGKTILDFLKSDGFANRNFMQLIHDDSLTFKEDIQKAQVSGQGDSLHEHIANLAGSPAIKKGILQTVKVVDELVKVMGRHKPENIVIEMARENQTTQKGQKNSRERMKRIEEGIKELGSQILKEHPVENTQLQNEKLYLYYLQNGRDMYVDQELDINRLSDYDVDHIVPQSFLKDDSIDNKVLTRSDKARGKSDNVPSEEVVKKMKNYWRQLLNAKLITQRKFDNLTKAERGGLSELDKAGFIKRQLVETRQITKHVAQILDSRMNTKYDENDKLIREVKVITLKSKLVSDFRKDFQFYKVREINNYHHAHDAYLNAVVGTALIKKYPKLESEFVYGDYKVYDVRKMIAKSEQEIGKATAKYFFYSNIMNFFKTEITLANGEIRKRPLIETNGETGEIVWDKGRDFATVRKVLSMPQVNIVKKTEVQTGGFSKESILPKRNSDKLIARKKDWDPKKYGGFDSPTVAYSVLVVAKVEKGKSKKLKSVKELLGITIMERSSFEKNPIDFLEAKGYKEVKKDLIIKLPKYSLFELENGRKRMLASAGELQKGNELALPSKYVNFLYLASHYEKLKGSPEDNEQKQLFVEQHKHYLDEIIEQISEFSKRVILADANLDKVLSAYNKHRDKPIREQAENIIHLFTLTNLGAPAAFKYFDTTIDRKRYTSTKEVLDATLIHQSITGLYETRIDLSQLGGDGGPAPGSSGGTLGDQGSRGSDPLPEPRVTLTVEGIPTEFLVNTGAEHSVLTKPMGKMGSKRTVVAGATGSKVYPWTTKRLLKIGQKQVTHSFLVIPECPAPLLGRDLLTKLKAQIQFSTEGPQVTWEDRPAMCLVLNLEEEYRLHEKPVPPSIDPSWLQLFPMVWAEKAGMGLANQVPPVVVELKSDASPVAVRQYPMSKEAREGIRPHIQRFLDLGILVPCQSPWNTPLLPVKKPGTNDYRPVQDLREVNKRVQDIHPTVPNPYNLLSSLPPSHTWYSVLDLKDAFFCLKLHPNSQPLFAFEWRDPEKGNTGQLTWTRLPQGFKNSPTLFNEALHRDLASFRALNPQVVMLQYVDDLLVAAPTYRDCKEGTRRLLQELSKLGYRVSAKKAQLCREEVTYLGYLLKGGKRWLTPARKATVMKIPTPTTPRQVREFLGKAGFCRLFIPGFASLAAPLYPLTRPKVPFTWTEAHQEAFGRIKEALLSAPALALPDLTKPFALYVDEKEGVARGVLTQTLGPWRRPVAYLSKKLDPVASGWPTCLKAIAAVALLLKDADKLTLGQNVLVIAPHNLESIVRQPPDRWMTNARMTHYQSLLLNERVSFAPPAILNPATLLPVESDDTPIHICSEILAEETGTRPDLRDQPLPGVPAWYTDGSSFIMDGRRQAGAAIVDNKRTVWASNLPEGTSAQKAELIALTQALRLAEGKSINIYTDSRYAFATAHVHGAIYKQRGWLTSAGKDIKNKEEILALLEAIHLPKRVAIIHCPGHQRGTDPVATGNRKADEAAKQAAQSTRILTETTKNAGKRTADGSEFEKRTADGSEFESPKKKAKVE

SEQ ID NO: 1781 - protein, 2222 aa, synthetic construct
  source 1..2222: note = Description of Artificial Sequence: Synthetic polypeptide
MPAAKRVKLDGGDKKYSIGLDIGTNSVGWAVITDEYKVPSKKFKVLGNTDRHSIKKNLIGALLFDSGETAEATRLKRTARRRYTRRKNRICYLQEIFSNEMAKVDDSFFHRLEESFLVEEDKKHERHPIFGNIVDEVAYHEKYPTIYHLRKKLVDSTDKADLRLIYLALAHMIKFRGHFLIEGDLNPDNSDVDKLFIQLVQTYNQLFEENPINASGVDAKAILSARLSKSRRLENLIAQLPGEKKNGLFGNLIALSLGLTPNFKSNFDLAEDAKLQLSKDTYDDDLDNLLAQIGDQYADLFLAAKNLSDAILLSDILRVNTEITKAPLSASMIKRYDEHHQDLTLLKALVRQQLPEKYKEIFFDQSKNGYAGYIDGGASQEEFYKFIKPILEKMDGTEELLVKLNREDLLRKQRTFDNGSIPHQIHLGELHAILRRQEDFYPFLKDNREKIEKILTFRIPYYVGPLARGNSRFAWMTRKSEETITPWNFEEVVDKGASAQSFIERMTNFDKNLPNEKVLPKHSLLYEYFTVYNELTKVKYVTEGMRKPAFLSGEQKKAIVDLLFKTNRKVTVKQLKEDYFKKIECFDSVEISGVEDRFNASLGTYHDLLKIIKDKDFLDNEENEDILEDIVLTLTLFEDREMIEERLKTYAHLFDDKVMKQLKRRRYTGWGRLSRKLINGIRDKQSGKTILDFLKSDGFANRNFMQLIHDDSLTFKEDIQKAQVSGQGDSLHEHIANLAGSPAIKKGILQTVKVVDELVKVMGRHKPENIVIEMARENQTTQKGQKNSRERMKRIEEGIKELGSQILKEHPVENTQLQNEKLYLYYLQNGRDMYVDQELDINRLSDYDVDHIVPQSFLKDDSIDNKVLTRSDKARGKSDNVPSEEVVKKMKNYWRQLLNAKLITQRKFDNLTKAERGGLSELDKAGFIKRQLVETRQITKHVAQILDSRMNTKYDENDKLIREVKVITLKSKLVSDFRKDFQFYKVREINNYHHAHDAYLNAVVGTALIKKYPKLESEFVYGDYKVYDVRKMIAKSEQEIGKATAKYFFYSNIMNFFKTEITLANGEIRKRPLIETNGETGEIVWDKGRDFATVRKVLSMPQVNIVKKTEVQTGGFSKESILPKRNSDKLIARKKDWDPKKYGGFDSPTVAYSVLVVAKVEKGKSKKLKSVKELLGITIMERSSFEKNPIDFLEAKGYKEVKKDLIIKLPKYSLFELENGRKRMLASAGELQKGNELALPSKYVNFLYLASHYEKLKGSPEDNEQKQLFVEQHKHYLDEIIEQISEFSKRVILADANLDKVLSAYNKHRDKPIREQAENIIHLFTLTNLGAPAAFKYFDTTIDRKRYTSTKEVLDATLIHQSITGLYETRIDLSQLGGDGGEAAAKGGGGSEAAAKGGTLGDQGSRGSDPLPEPRVTLTVEGIPTEFLVNTGAEHSVLTKPMGKMGSKRTVVAGATGSKVYPWTTKRLLKIGQKQVTHSFLVIPECPAPLLGRDLLTKLKAQIQFSTEGPQVTWEDRPAMCLVLNLEEEYRLHEKPVPPSIDPSWLQLFPMVWAEKAGMGLANQVPPVVVELKSDASPVAVRQYPMSKEAREGIRPHIQRFLDLGILVPCQSPWNTPLLPVKKPGTNDYRPVQDLREVNKRVQDIHPTVPNPYNLLSSLPPSHTWYSVLDLKDAFFCLKLHPNSQPLFAFEWRDPEKGNTGQLTWTRLPQGFKNSPTLFNEALHRDLASFRALNPQVVMLQYVDDLLVAAPTYRDCKEGTRRLLQELSKLGYRVSAKKAQLCREEVTYLGYLLKGGKRWLTPARKATVMKIPTPTTPRQVREFLGKAGFCRLFIPGFASLAAPLYPLTRPKVPFTWTEAHQEAFGRIKEALLSAPALALPDLTKPFALYVDEKEGVARGVLTQTLGPWRRPVAYLSKKLDPVASGWPTCLKAIAAVALLLKDADKLTLGQNVLVIAPHNLESIVRQPPDRWMTNARMTHYQSLLLNERVSFAPPAILNPATLLPVESDDTPIHICSEILAEETGTRPDLRDQPLPGVPAWYTDGSSFIMDGRRQAGAAIVDNKRTVWASNLPEGTSAQKAELIALTQALRLAEGKSINIYTDSRYAFATAHVHGAIYKQRGWLTSAGKDIKNKEEILALLEAIHLPKRVAIIHCPGHQRGTDPVATGNRKADEAAKQAAQSTRILTETTKNAGKRTADGSEFEKRTADGSEFESPKKKAKVE

SEQ ID NO: 1782 - protein, 2219 aa, synthetic construct
  source 1..2219: note = Description of Artificial Sequence: Synthetic polypeptide
MPAAKRVKLDGGDKKYSIGLDIGTNSVGWAVITDEYKVPSKKFKVLGNTDRHSIKKNLIGALLFDSGETAEATRLKRTARRRYTRRKNRICYLQEIFSNEMAKVDDSFFHRLEESFLVEEDKKHERHPIFGNIVDEVAYHEKYPTIYHLRKKLVDSTDKADLRLIYLALAHMIKFRGHFLIEGDLNPDNSDVDKLFIQLVQTYNQLFEENPINASGVDAKAILSARLSKSRRLENLIAQLPGEKKNGLFGNLIALSLGLTPNFKSNFDLAEDAKLQLSKDTYDDDLDNLLAQIGDQYADLFLAAKNLSDAILLSDILRVNTEITKAPLSASMIKRYDEHHQDLTLLKALVRQQLPEKYKEIFFDQSKNGYAGYIDGGASQEEFYKFIKPILEKMDGTEELLVKLNREDLLRKQRTFDNGSIPHQIHLGELHAILRRQEDFYPFLKDNREKIEKILTFRIPYYVGPLARGNSRFAWMTRKSEETITPWNFEEVVDKGASAQSFIERMTNFDKNLPNEKVLPKHSLLYEYFTVYNELTKVKYVTEGMRKPAFLSGEQKKAIVDLLFKTNRKVTVKQLKEDYFKKIECFDSVEISGVEDRFNASLGTYHDLLKIIKDKDFLDNEENEDILEDIVLTLTLFEDREMIEERLKTYAHLFDDKVMKQLKRRRYTGWGRLSRKLINGIRDKQSGKTILDFLKSDGFANRNFMQLIHDDSLTFKEDIQKAQVSGQGDSLHEHIANLAGSPAIKKGILQTVKVVDELVKVMGRHKPENIVIEMARENQTTQKGQKNSRERMKRIEEGIKELGSQILKEHPVENTQLQNEKLYLYYLQNGRDMYVDQELDINRLSDYDVDHIVPQSFLKDDSIDNKVLTRSDKARGKSDNVPSEEVVKKMKNYWRQLLNAKLITQRKFDNLTKAERGGLSELDKAGFIKRQLVETRQITKHVAQILDSRMNTKYDENDKLIREVKVITLKSKLVSDFRKDFQFYKVREINNYHHAHDAYLNAVVGTALIKKYPKLESEFVYGDYKVYDVRKMIAKSEQEIGKATAKYFFYSNIMNFFKTEITLANGEIRKRPLIETNGETGEIVWDKGRDFATVRKVLSMPQVNIVKKTEVQTGGFSKESILPKRNSDKLIARKKDWDPKKYGGFDSPTVAYSVLVVAKVEKGKSKKLKSVKELLGITIMERSSFEKNPIDFLEAKGYKEVKKDLIIKLPKYSLFELENGRKRMLASAGELQKGNELALPSKYVNFLYLASHYEKLKGSPEDNEQKQLFVEQHKHYLDEIIEQISEFSKRVILADANLDKVLSAYNKHRDKPIREQAENIIHLFTLTNLGAPAAFKYFDTTIDRKRYTSTKEVLDATLIHQSITGLYETRIDLSQLGGDGGGSAGSAAGSGEFGGTLGDQGSRGSDPLPEPRVTLTVEGIPTEFLVNTGAEHSVLTKPMGKMGSKRTVVAGATGSKVYPWTTKRLLKIGQKQVTHSFLVIPECPAPLLGRDLLTKLKAQIQFSTEGPQVTWEDRPAMCLVLNLEEEYRLHEKPVPPSIDPSWLQLFPMVWAEKAGMGLANQVPPVVVELKSDASPVAVRQYPMSKEAREGIRPHIQRFLDLGILVPCQSPWNTPLLPVKKPGTNDYRPVQDLREVNKRVQDIHPTVPNPYNLLSSLPPSHTWYSVLDLKDAFFCLKLHPNSQPLFAFEWRDPEKGNTGQLTWTRLPQGFKNSPTLFNEALHRDLASFRALNPQVVMLQYVDDLLVAAPTYRDCKEGTRRLLQELSKLGYRVSAKKAQLCREEVTYLGYLLKGGKRWLTPARKATVMKIPTPTTPRQVREFLGKAGFCRLFIPGFASLAAPLYPLTRPKVPFTWTEAHQEAFGRIKEALLSAPALALPDLTKPFALYVDEKEGVARGVLTQTLGPWRRPVAYLSKKLDPVASGWPTCLKAIAAVALLLKDADKLTLGQNVLVIAPHNLESIVRQPPDRWMTNARMTHYQSLLLNERVSFAPPAILNPATLLPVESDDTPIHICSEILAEETGTRPDLRDQPLPGVPAWYTDGSSFIMDGRRQAGAAIVDNKRTVWASNLPEGTSAQKAELIALTQALRLAEGKSINIYTDSRYAFATAHVHGAIYKQRGWLTSAGKDIKNKEEILALLEAIHLPKRVAIIHCPGHQRGTDPVATGNRKADEAAKQAAQSTRILTETTKNAGKRTADGSEFEKRTADGSEFESPKKKAKVE

SEQ ID NO: 1783 - protein, 2218 aa, synthetic construct
  source 1..2218: note = Description of Artificial Sequence: Synthetic polypeptide
MPAAKRVKLDGGDKKYSIGLDIGTNSVGWAVITDEYKVPSKKFKVLGNTDRHSIKKNLIGALLFDSGETAEATRLKRTARRRYTRRKNRICYLQEIFSNEMAKVDDSFFHRLEESFLVEEDKKHERHPIFGNIVDEVAYHEKYPTIYHLRKKLVDSTDKADLRLIYLALAHMIKFRGHFLIEGDLNPDNSDVDKLFIQLVQTYNQLFEENPINASGVDAKAILSARLSKSRRLENLIAQLPGEKKNGLFGNLIALSLGLTPNFKSNFDLAEDAKLQLSKDTYDDDLDNLLAQIGDQYADLFLAAKNLSDAILLSDILRVNTEITKAPLSASMIKRYDEHHQDLTLLKALVRQQLPEKYKEIFFDQSKNGYAGYIDGGASQEEFYKFIKPILEKMDGTEELLVKLNREDLLRKQRTFDNGSIPHQIHLGELHAILRRQEDFYPFLKDNREKIEKILTFRIPYYVGPLARGNSRFAWMTRKSEETITPWNFEEVVDKGASAQSFIERMTNFDKNLPNEKVLPKHSLLYEYFTVYNELTKVKYVTEGMRKPAFLSGEQKKAIVDLLFKTNRKVTVKQLKEDYFKKIECFDSVEISGVEDRFNASLGTYHDLLKIIKDKDFLDNEENEDILEDIVLTLTLFEDREMIEERLKTYAHLFDDKVMKQLKRRRYTGWGRLSRKLINGIRDKQSGKTILDFLKSDGFANRNFMQLIHDDSLTFKEDIQKAQVSGQGDSLHEHIANLAGSPAIKKGILQTVKVVDELVKVMGRHKPENIVIEMARENQTTQKGQKNSRERMKRIEEGIKELGSQILKEHPVENTQLQNEKLYLYYLQNGRDMYVDQELDINRLSDYDVDHIVPQSFLKDDSIDNKVLTRSDKARGKSDNVPSEEVVKKMKNYWRQLLNAKLITQRKFDNLTKAERGGLSELDKAGFIKRQLVETRQITKHVAQILDSRMNTKYDENDKLIREVKVITLKSKLVSDFRKDFQFYKVREINNYHHAHDAYLNAVVGTALIKKYPKLESEFVYGDYKVYDVRKMIAKSEQEIGKATAKYFFYSNIMNFFKTEITLANGEIRKRPLIETNGETGEIVWDKGRDFATVRKVLSMPQVNIVKKTEVQTGGFSKESILPKRNSDKLIARKKDWDPKKYGGFDSPTVAYSVLVVAKVEKGKSKKLKSVKELLGITIMERSSFEKNPIDFLEAKGYKEVKKDLIIKLPKYSLFELENGRKRMLASAGELQKGNELALPSKYVNFLYLASHYEKLKGSPEDNEQKQLFVEQHKHYLDEIIEQISEFSKRVILADANLDKVLSAYNKHRDKPIREQAENIIHLFTLTNLGAPAAFKYFDTTIDRKRYTSTKEVLDATLIHQSITGLYETRIDLSQLGGDGGPAPAPAPAPAPGGTLGDQGSRGSDPLPEPRVTLTVEGIPTEFLVNTGAEHSVLTKPMGKMGSKRTVVAGATGSKVYPWTTKRLLKIGQKQVTHSFLVIPECPAPLLGRDLLTKLKAQIQFSTEGPQVTWEDRPAMCLVLNLEEEYRLHEKPVPPSIDPSWLQLFPMVWAEKAGMGLANQVPPVVVELKSDASPVAVRQYPMSKEAREGIRPHIQRFLDLGILVPCQSPWNTPLLPVKKPGTNDYRPVQDLREVNKRVQDIHPTVPNPYNLLSSLPPSHTWYSVLDLKDAFFCLKLHPNSQPLFAFEWRDPEKGNTGQLTWTRLPQGFKNSPTLFNEALHRDLASFRALNPQVVMLQYVDDLLVAAPTYRDCKEGTRRLLQELSKLGYRVSAKKAQLCREEVTYLGYLLKGGKRWLTPARKATVMKIPTPTTPRQVREFLGKAGFCRLFIPGFASLAAPLYPLTRPKVPFTWTEAHQEAFGRIKEALLSAPALALPDLTKPFALYVDEKEGVARGVLTQTLGPWRRPVAYLSKKLDPVASGWPTCLKAIAAVALLLKDADKLTLGQNVLVIAPHNLESIVRQPPDRWMTNARMTHYQSLLLNERVSFAPPAILNPATLLPVESDDTPIHICSEILAEETGTRPDLRDQPLPGVPAWYTDGSSFIMDGRRQAGAAIVDNKRTVWASNLPEGTSAQKAELIALTQALRLAEGKSINIYTDSRYAFATAHVHGAIYKQRGWLTSAGKDIKNKEEILALLEAIHLPKRVAIIHCPGHQRGTDPVATGNRKADEAAKQAAQSTRILTETTKNAGKRTADGSEFEKRTADGSEFESPKKKAKVE

SEQ ID NO: 1784 - protein, 2253 aa, synthetic construct
  source 1..2253: note = Description of Artificial Sequence: Synthetic polypeptide
MPAAKRVKLDGGDKKYSIGLDIGTNSVGWAVITDEYKVPSKKFKVLGNTDRHSIKKNLIGALLFDSGETAEATRLKRTARRRYTRRKNRICYLQEIFSNEMAKVDDSFFHRLEESFLVEEDKKHERHPIFGNIVDEVAYHEKYPTIYHLRKKLVDSTDKADLRLIYLALAHMIKFRGHFLIEGDLNPDNSDVDKLFIQLVQTYNQLFEENPINASGVDAKAILSARLSKSRRLENLIAQLPGEKKNGLFGNLIALSLGLTPNFKSNFDLAEDAKLQLSKDTYDDDLDNLLAQIGDQYADLFLAAKNLSDAILLSDILRVNTEITKAPLSASMIKRYDEHHQDLTLLKALVRQQLPEKYKEIFFDQSKNGYAGYIDGGASQEEFYKFIKPILEKMDGTEELLVKLNREDLLRKQRTFDNGSIPHQIHLGELHAILRRQEDFYPFLKDNREKIEKILTFRIPYYVGPLARGNSRFAWMTRKSEETITPWNFEEVVDKGASAQSFIERMTNFDKNLPNEKVLPKHSLLYEYFTVYNELTKVKYVTEGMRKPAFLSGEQKKAIVDLLFKTNRKVTVKQLKEDYFKKIECFDSVEISGVEDRFNASLGTYHDLLKIIKDKDFLDNEENEDILEDIVLTLTLFEDREMIEERLKTYAHLFDDKVMKQLKRRRYTGWGRLSRKLINGIRDKQSGKTILDFLKSDGFANRNFMQLIHDDSLTFKEDIQKAQVSGQGDSLHEHIANLAGSPAIKKGILQTVKVVDELVKVMGRHKPENIVIEMARENQTTQKGQKNSRERMKRIEEGIKELGSQILKEHPVENTQLQNEKLYLYYLQNGRDMYVDQELDINRLSDYDVDHIVPQSFLKDDSIDNKVLTRSDKARGKSDNVPSEEVVKKMKNYWRQLLNAKLITQRKFDNLTKAERGGLSELDKAGFIKRQLVETRQITKHVAQILDSRMNTKYDENDKLIREVKVITLKSKLVSDFRKDFQFYKVREINNYHHAHDAYLNAVVGTALIKKYPKLESEFVYGDYKVYDVRKMIAKSEQEIGKATAKYFFYSNIMNFFKTEITLANGEIRKRPLIETNGETGEIVWDKGRDFATVRKVLSMPQVNIVKKTEVQTGGFSKESILPKRNSDKLIARKKDWDPKKYGGFDSPTVAYSVLVVAKVEKGKSKKLKSVKELLGITIMERSSFEKNPIDFLEAKGYKEVKKDLIIKLPKYSLFELENGRKRMLASAGELQKGNELALPSKYVNFLYLASHYEKLKGSPEDNEQKQLFVEQHKHYLDEIIEQISEFSKRVILADANLDKVLSAYNKHRDKPIREQAENIIHLFTLTNLGAPAAFKYFDTTIDRKRYTSTKEVLDATLIHQSITGLYETRIDLSQLGGDGGAEAAAKEAAAKEAAAKEAAAKALEAEAAAKEAAAKEAAAKEAAAKAGGTLGDQGSRGSDPLPEPRVTLTVEGIPTEFLVNTGAEHSVLTKPMGKMGSKRTVVAGATGSKVYPWTTKRLLKIGQKQVTHSFLVIPECPAPLLGRDLLTKLKAQIQFSTEGPQVTWEDRPAMCLVLNLEEEYRLHEKPVPPSIDPSWLQLFPMVWAEKAGMGLANQVPPVVVELKSDASPVAVRQYPMSKEAREGIRPHIQRFLDLGILVPCQSPWNTPLLPVKKPGTNDYRPVQDLREVNKRVQDIHPTVPNPYNLLSSLPPSHTWYSVLDLKDAFFCLKLHPNSQPLFAFEWRDPEKGNTGQLTWTRLPQGFKNSPTLFNEALHRDLASFRALNPQVVMLQYVDDLLVAAPTYRDCKEGTRRLLQELSKLGYRVSAKKAQLCREEVTYLGYLLKGGKRWLTPARKATVMKIPTPTTPRQVREFLGKAGFCRLFIPGFASLAAPLYPLTRPKVPFTWTEAHQEAFGRIKEALLSAPALALPDLTKPFALYVDEKEGVARGVLTQTLGPWRRPVAYLSKKLDPVASGWPTCLKAIAAVALLLKDADKLTLGQNVLVIAPHNLESIVRQPPDRWMTNARMTHYQSLLLNERVSFAPPAILNPATLLPVESDDTPIHICSEILAEETGTRPDLRDQPLPGVPAWYTDGSSFIMDGRRQAGAAIVDNKRTVWASNLPEGTSAQKAELIALTQALRLAEGKSINIYTDSRYAFATAHVHGAIYKQRGWLTSAGKDIKNKEEILALLEAIHLPKRVAIIHCPGHQRGTDPVATGNRKADEAAKQAAQSTRILTETTKNAGKRTADGSEFEKRTADGSEFESPKKKAKVE

SEQ ID NO: 1785 - protein, 2216 aa, synthetic construct
  source 1..2216: note = Description of Artificial Sequence: Synthetic polypeptide
MPAAKRVKLDGGDKKYSIGLDIGTNSVGWAVITDEYKVPSKKFKVLGNTDRHSIKKNLIGALLFDSGETAEATRLKRTARRRYTRRKNRICYLQEIFSNEMAKVDDSFFHRLEESFLVEEDKKHERHPIFGNIVDEVAYHEKYPTIYHLRKKLVDSTDKADLRLIYLALAHMIKFRGHFLIEGDLNPDNSDVDKLFIQLVQTYNQLFEENPINASGVDAKAILSARLSKSRRLENLIAQLPGEKKNGLFGNLIALSLGLTPNFKSNFDLAEDAKLQLSKDTYDDDLDNLLAQIGDQYADLFLAAKNLSDAILLSDILRVNTEITKAPLSASMIKRYDEHHQDLTLLKALVRQQLPEKYKEIFFDQSKNGYAGYIDGGASQEEFYKFIKPILEKMDGTEELLVKLNREDLLRKQRTFDNGSIPHQIHLGELHAILRRQEDFYPFLKDNREKIEKILTFRIPYYVGPLARGNSRFAWMTRKSEETITPWNFEEVVDKGASAQSFIERMTNFDKNLPNEKVLPKHSLLYEYFTVYNELTKVKYVTEGMRKPAFLSGEQKKAIVDLLFKTNRKVTVKQLKEDYFKKIECFDSVEISGVEDRFNASLGTYHDLLKIIKDKDFLDNEENEDILEDIVLTLTLFEDREMIEERLKTYAHLFDDKVMKQLKRRRYTGWGRLSRKLINGIRDKQSGKTILDFLKSDGFANRNFMQLIHDDSLTFKEDIQKAQVSGQGDSLHEHIANLAGSPAIKKGILQTVKVVDELVKVMGRHKPENIVIEMARENQTTQKGQKNSRERMKRIEEGIKELGSQILKEHPVENTQLQNEKLYLYYLQNGRDMYVDQELDINRLSDYDVDHIVPQSFLKDDSIDNKVLTRSDKARGKSDNVPSEEVVKKMKNYWRQLLNAKLITQRKFDNLTKAERGGLSELDKAGFIKRQLVETRQITKHVAQILDSRMNTKYDENDKLIREVKVITLKSKLVSDFRKDFQFYKVREINNYHHAHDAYLNAVVGTALIKKYPKLESEFVYGDYKVYDVRKMIAKSEQEIGKATAKYFFYSNIMNFFKTEITLANGEIRKRPLIETNGETGEIVWDKGRDFATVRKVLSMPQVNIVKKTEVQTGGFSKESILPKRNSDKLIARKKDWDPKKYGGFDSPTVAYSVLVVAKVEKGKSKKLKSVKELLGITIMERSSFEKNPIDFLEAKGYKEVKKDLIIKLPKYSLFELENGRKRMLASAGELQKGNELALPSKYVNFLYLASHYEKLKGSPEDNEQKQLFVEQHKHYLDEIIEQISEFSKRVILADANLDKVLSAYNKHRDKPIREQAENIIHLFTLTNLGAPAAFKYFDTTIDRKRYTSTKEVLDATLIHQSITGLYETRIDLSQLGGDGGGGSGSSGGGGGTLGDQGSRGSDPLPEPRVTLTVEGIPTEFLVNTGAEHSVLTKPMGKMGSKRTVVAGATGSKVYPWTTKRLLKIGQKQVTHSFLVIPECPAPLLGRDLLTKLKAQIQFSTEGPQVTWEDRPAMCLVLNLEEEYRLHEKPVPPSIDPSWLQLFPMVWAEKAGMGLANQVPPVVVELKSDASPVAVRQYPMSKEAREGIRPHIQRFLDLGILVPCQSPWNTPLLPVKKPGTNDYRPVQDLREVNKRVQDIHPTVPNPYNLLSSLPPSHTWYSVLDLKDAFFCLKLHPNSQPLFAFEWRDPEKGNTGQLTWTRLPQGFKNSPTLFNEALHRDLASFRALNPQVVMLQYVDDLLVAAPTYRDCKEGTRRLLQELSKLGYRVSAKKAQLCREEVTYLGYLLKGGKRWLTPARKATVMKIPTPTTPRQVREFLGKAGFCRLFIPGFASLAAPLYPLTRPKVPFTWTEAHQEAFGRIKEALLSAPALALPDLTKPFALYVDEKEGVARGVLTQTLGPWRRPVAYLSKKLDPVASGWPTCLKAIAAVALLLKDADKLTLGQNVLVIAPHNLESIVRQPPDRWMTNARMTHYQSLLLNERVSFAPPAILNPATLLPVESDDTPIHICSEILAEETGTRPDLRDQPLPGVPAWYTDGSSFIMDGRRQAGAAIVDNKRTVWASNLPEGTSAQKAELIALTQALRLAEGKSINIYTDSRYAFATAHVHGAIYKQRGWLTSAGKDIKNKEEILALLEAIHLPKRVAIIHCPGHQRGTDPVATGNRKADEAAKQAAQSTRILTETTKNAGKRTADGSEFEKRTADGSEFESPKKKAKVE

SEQ ID NO: 1786 - protein, 2218 aa, synthetic construct
  source 1..2218: note = Description of Artificial Sequence: Synthetic polypeptide
MPAAKRVKLDGGDKKYSIGLDIGTNSVGWAVITDEYKVPSKKFKVLGNTDRHSIKKNLIGALLFDSGETAEATRLKRTARRRYTRRKNRICYLQEIFSNEMAKVDDSFFHRLEESFLVEEDKKHERHPIFGNIVDEVAYHEKYPTIYHLRKKLVDSTDKADLRLIYLALAHMIKFRGHFLIEGDLNPDNSDVDKLFIQLVQTYNQLFEENPINASGVDAKAILSARLSKSRRLENLIAQLPGEKKNGLFGNLIALSLGLTPNFKSNFDLAEDAKLQLSKDTYDDDLDNLLAQIGDQYADLFLAAKNLSDAILLSDILRVNTEITKAPLSASMIKRYDEHHQDLTLLKALVRQQLPEKYKEIFFDQSKNGYAGYIDGGASQEEFYKFIKPILEKMDGTEELLVKLNREDLLRKQRTFDNGSIPHQIHLGELHAILRRQEDFYPFLKDNREKIEKILTFRIPYYVGPLARGNSRFAWMTRKSEETITPWNFEEVVDKGASAQSFIERMTNFDKNLPNEKVLPKHSLLYEYFTVYNELTKVKYVTEGMRKPAFLSGEQKKAIVDLLFKTNRKVTVKQLKEDYFKKIECFDSVEISGVEDRFNASLGTYHDLLKIIKDKDFLDNEENEDILEDIVLTLTLFEDREMIEERLKTYAHLFDDKVMKQLKRRRYTGWGRLSRKLINGIRDKQSGKTILDFLKSDGFANRNFMQLIHDDSLTFKEDIQKAQVSGQGDSLHEHIANLAGSPAIKKGILQTVKVVDELVKVMGRHKPENIVIEMARENQTTQKGQKNSRERMKRIEEGIKELGSQILKEHPVENTQLQNEKLYLYYLQNGRDMYVDQELDINRLSDYDVDHIVPQSFLKDDSIDNKVLTRSDKARGKSDNVPSEEVVKKMKNYWRQLLNAKLITQRKFDNLTKAERGGLSELDKAGFIKRQLVETRQITKHVAQILDSRMNTKYDENDKLIREVKVITLKSKLVSDFRKDFQFYKVREINNYHHAHDAYLNAVVGTALIKKYPKLESEFVYGDYKVYDVRKMIAKSEQEIGKATAKYFFYSNIMNFFKTEITLANGEIRKRPLIETNGETGEIVWDKGRDFATVRKVLSMPQVNIVKKTEVQTGGFSKESILPKRNSDKLIARKKDWDPKKYGGFDSPTVAYSVLVVAKVEKGKSKKLKSVKELLGITIMERSSFEKNPIDFLEAKGYKEVKKDLIIKLPKYSLFELENGRKRMLASAGELQKGNELALPSKYVNFLYLASHYEKLKGSPEDNEQKQLFVEQHKHYLDEIIEQISEFSKRVILADANLDKVLSAYNKHRDKPIREQAENIIHLFTLTNLGAPAAFKYFDTTIDRKRYTSTKEVLDATLIHQSITGLYETRIDLSQLGGDGGEAAAKPAPGGSGGTLGDQGSRGSDPLPEPRVTLTVEGIPTEFLVNTGAEHSVLTKPMGKMGSKRTVVAGATGSKVYPWTTKRLLKIGQKQVTHSFLVIPECPAPLLGRDLLTKLKAQIQFSTEGPQVTWEDRPAMCLVLNLEEEYRLHEKPVPPSIDPSWLQLFPMVWAEKAGMGLANQVPPVVVELKSDASPVAVRQYPMSKEAREGIRPHIQRFLDLGILVPCQSPWNTPLLPVKKPGTNDYRPVQDLREVNKRVQDIHPTVPNPYNLLSSLPPSHTWYSVLDLKDAFFCLKLHPNSQPLFAFEWRDPEKGNTGQLTWTRLPQGFKNSPTLFNEALHRDLASFRALNPQVVMLQYVDDLLVAAPTYRDCKEGTRRLLQELSKLGYRVSAKKAQLCREEVTYLGYLLKGGKRWLTPARKATVMKIPTPTTPRQVREFLGKAGFCRLFIPGFASLAAPLYPLTRPKVPFTWTEAHQEAFGRIKEALLSAPALALPDLTKPFALYVDEKEGVARGVLTQTLGPWRRPVAYLSKKLDPVASGWPTCLKAIAAVALLLKDADKLTLGQNVLVIAPHNLESIVRQPPDRWMTNARMTHYQSLLLNERVSFAPPAILNPATLLPVESDDTPIHICSEILAEETGTRPDLRDQPLPGVPAWYTDGSSFIMDGRRQAGAAIVDNKRTVWASNLPEGTSAQKAELIALTQALRLAEGKSINIYTDSRYAFATAHVHGAIYKQRGWLTSAGKDIKNKEEILALLEAIHLPKRVAIIHCPGHQRGTDPVATGNRKADEAAKQAAQSTRILTETTKNAGKRTADGSEFEKRTADGSEFESPKKKAKVE

SEQ ID NO: 1787 - protein, 2218 aa, synthetic construct
  source 1..2218: note = Description of Artificial Sequence: Synthetic polypeptide
MPAAKRVKLDGGDKKYSIGLDIGTNSVGWAVITDEYKVPSKKFKVLGNTDRHSIKKNLIGALLFDSGETAEATRLKRTARRRYTRRKNRICYLQEIFSNEMAKVDDSFFHRLEESFLVEEDKKHERHPIFGNIVDEVAYHEKYPTIYHLRKKLVDSTDKADLRLIYLALAHMIKFRGHFLIEGDLNPDNSDVDKLFIQLVQTYNQLFEENPINASGVDAKAILSARLSKSRRLENLIAQLPGEKKNGLFGNLIALSLGLTPNFKSNFDLAEDAKLQLSKDTYDDDLDNLLAQIGDQYADLFLAAKNLSDAILLSDILRVNTEITKAPLSASMIKRYDEHHQDLTLLKALVRQQLPEKYKEIFFDQSKNGYAGYIDGGASQEEFYKFIKPILEKMDGTEELLVKLNREDLLRKQRTFDNGSIPHQIHLGELHAILRRQEDFYPFLKDNREKIEKILTFRIPYYVGPLARGNSRFAWMTRKSEETITPWNFEEVVDKGASAQSFIERMTNFDKNLPNEKVLPKHSLLYEYFTVYNELTKVKYVTEGMRKPAFLSGEQKKAIVDLLFKTNRKVTVKQLKEDYFKKIECFDSVEISGVEDRFNASLGTYHDLLKIIKDKDFLDNEENEDILEDIVLTLTLFEDREMIEERLKTYAHLFDDKVMKQLKRRRYTGWGRLSRKLINGIRDKQSGKTILDFLKSDGFANRNFMQLIHDDSLTFKEDIQKAQVSGQGDSLHEHIANLAGSPAIKKGILQTVKVVDELVKVMGRHKPENIVIEMARENQTTQKGQKNSRERMKRIEEGIKELGSQILKEHPVENTQLQNEKLYLYYLQNGRDMYVDQELDINRLSDYDVDHIVPQSFLKDDSIDNKVLTRSDKARGKSDNVPSEEVVKKMKNYWRQLLNAKLITQRKFDNLTKAERGGLSELDKAGFIKRQLVETRQITKHVAQILDSRMNTKYDENDKLIREVKVITLKSKLVSDFRKDFQFYKVREINNYHHAHDAYLNAVVGTALIKKYPKLESEFVYGDYKVYDVRKMIAKSEQEIGKATAKYFFYSNIMNFFKTEITLANGEIRKRPLIETNGETGEIVWDKGRDFATVRKVLSMPQVNIVKKTEVQTGGFSKESILPKRNSDKLIARKKDWDPKKYGGFDSPTVAYSVLVVAKVEKGKSKKLKSVKELLGITIMERSSFEKNPIDFLEAKGYKEVKKDLIIKLPKYSLFELENGRKRMLASAGELQKGNELALPSKYVNFLYLASHYEKLKGSPEDNEQKQLFVEQHKHYLDEIIEQISEFSKRVILADANLDKVLSAYNKHRDKPIREQAENIIHLFTLTNLGAPAAFKYFDTTIDRKRYTSTKEVLDATLIHQSITGLYETRIDLSQLGGDGGGGSPAPEAAAKGGTLGDQGSRGSDPLPEPRVTLTVEGIPTEFLVNTGAEHSVLTKPMGKMGSKRTVVAGATGSKVYPWTTKRLLKIGQKQVTHSFLVIPECPAPLLGRDLLTKLKAQIQFSTEGPQVTWEDRPAMCLVLNLEEEYRLHEKPVPPSIDPSWLQLFPMVWAEKAGMGLANQVPPVVVELKSDASPVAVRQYPMSKEAREGIRPHIQRFLDLGILVPCQSPWNTPLLPVKKPGTNDYRPVQDLREVNKRVQDIHPTVPNPYNLLSSLPPSHTWYSVLDLKDAFFCLKLHPNSQPLFAFEWRDPEKGNTGQLTWTRLPQGFKNSPTLFNEALHRDLASFRALNPQVVMLQYVDDLLVAAPTYRDCKEGTRRLLQELSKLGYRVSAKKAQLCREEVTYLGYLLKGGKRWLTPARKATVMKIPTPTTPRQVREFLGKAGFCRLFIPGFASLAAPLYPLTRPKVPFTWTEAHQEAFGRIKEALLSAPALALPDLTKPFALYVDEKEGVARGVLTQTLGPWRRPVAYLSKKLDPVASGWPTCLKAIAAVALLLKDADKLTLGQNVLVIAPHNLESIVRQPPDRWMTNARMTHYQSLLLNERVSFAPPAILNPATLLPVESDDTPIHICSEILAEETGTRPDLRDQPLPGVPAWYTDGSSFIMDGRRQAGAAIVDNKRTVWASNLPEGTSAQKAELIALTQALRLAEGKSINIYTDSRYAFATAHVHGAIYKQRGWLTSAGKDIKNKEEILALLEAIHLPKRVAIIHCPGHQRGTDPVATGNRKADEAAKQAAQSTRILTETTKNAGKRTADGSEFEKRTADGSEFESPKKKAKVE

SEQ ID NO: 1788 - protein, 2212 aa, synthetic construct
  source 1..2212: note = Description of Artificial Sequence: Synthetic polypeptide
MPAAKRVKLDGGDKKYSIGLDIGTNSVGWAVITDEYKVPSKKFKVLGNTDRHSIKKNLIGALLFDSGETAEATRLKRTARRRYTRRKNRICYLQEIFSNEMAKVDDSFFHRLEESFLVEEDKKHERHPIFGNIVDEVAYHEKYPTIYHLRKKLVDSTDKADLRLIYLALAHMIKFRGHFLIEGDLNPDNSDVDKLFIQLVQTYNQLFEENPINASGVDAKAILSARLSKSRRLENLIAQLPGEKKNGLFGNLIALSLGLTPNFKSNFDLAEDAKLQLSKDTYDDDLDNLLAQIGDQYADLFLAAKNLSDAILLSDILRVNTEITKAPLSASMIKRYDEHHQDLTLLKALVRQQLPEKYKEIFFDQSKNGYAGYIDGGASQEEFYKFIKPILEKMDGTEELLVKLNREDLLRKQRTFDNGSIPHQIHLGELHAILRRQEDFYPFLKDNREKIEKILTFRIPYYVGPLARGNSRFAWMTRKSEETITPWNFEEVVDKGASAQSFIERMTNFDKNLPNEKVLPKHSLLYEYFTVYNELTKVKYVTEGMRKPAFLSGEQKKAIVDLLFKTNRKVTVKQLKEDYFKKIECFDSVEISGVEDRFNASLGTYHDLLKIIKDKDFLDNEENEDILEDIVLTLTLFEDREMIEERLKTYAHLFDDKVMKQLKRRRYTGWGRLSRKLINGIRDKQSGKTILDFLKSDGFANRNFMQLIHDDSLTFKEDIQKAQVSGQGDSLHEHIANLAGSPAIKKGILQTVKVVDELVKVMGRHKPENIVIEMARENQTTQKGQKNSRERMKRIEEGIKELGSQILKEHPVENTQLQNEKLYLYYLQNGRDMYVDQELDINRLSDYDVDHIVPQSFLKDDSIDNKVLTRSDKARGKSDNVPSEEVVKKMKNYWRQLLNAKLITQRKFDNLTKAERGGLSELDKAGFIKRQLVETRQITKHVAQILDSRMNTKYDENDKLIREVKVITLKSKLVSDFRKDFQFYKVREINNYHHAHDAYLNAVVGTALIKKYPKLESEFVYGDYKVYDVRKMIAKSEQEIGKATAKYFFYSNIMNFFKTEITLANGEIRKRPLIETNGETGEIVWDKGRDFATVRKVLSMPQVNIVKKTEVQTGGFSKESILPKRNSDKLIARKKDWDPKKYGGFDSPTVAYSVLVVAKVEKGKSKKLKSVKELLGITIMERSSFEKNPIDFLEAKGYKEVKKDLIIKLPKYSLFELENGRKRMLASAGELQKGNELALPSKYVNFLYLASHYEKLKGSPEDNEQKQLFVEQHKHYLDEIIEQISEFSKRVILADANLDKVLSAYNKHRDKPIREQAENIIHLFTLTNLGAPAAFKYFDTTIDRKRYTSTKEVLDATLIHQSITGLYETRIDLSQLGGDGGGGGGSGGTLGDQGSRGSDPLPEPRVTLTVEGIPTEFLVNTGAEHSVLTKPMGKMGSKRTVVAGATGSKVYPWTTKRLLKIGQKQVTHSFLVIPECPAPLLGRDLLTKLKAQIQFSTEGPQVTWEDRPAMCLVLNLEEEYRLHEKPVPPSIDPSWLQLFPMVWAEKAGMGLANQVPPVVVELKSDASPVAVRQYPMSKEAREGIRPHIQRFLDLGILVPCQSPWNTPLLPVKKPGTNDYRPVQDLREVNKRVQDIHPTVPNPYNLLSSLPPSHTWYSVLDLKDAFFCLKLHPNSQPLFAFEWRDPEKGNTGQLTWTRLPQGFKNSPTLFNEALHRDLASFRALNPQVVMLQYVDDLLVAAPTYRDCKEGTRRLLQELSKLGYRVSAKKAQLCREEVTYLGYLLKGGKRWLTPARKATVMKIPTPTTPRQVREFLGKAGFCRLFIPGFASLAAPLYPLTRPKVPFTWTEAHQEAFGRIKEALLSAPALALPDLTKPFALYVDEKEGVARGVLTQTLGPWRRPVAYLSKKLDPVASGWPTCLKAIAAVALLLKDADKLTLGQNVLVIAPHNLESIVRQPPDRWMTNARMTHYQSLLLNERVSFAPPAILNPATLLPVESDDTPIHICSEILAEETGTRPDLRDQPLPGVPAWYTDGSSFIMDGRRQAGAAIVDNKRTVWASNLPEGTSAQKAELIALTQALRLAEGKSINIYTDSRYAFATAHVHGAIYKQRGWLTSAGKDIKNKEEILALLEAIHLPKRVAIIHCPGHQRGTDPVATGNRKADEAAKQAAQSTRILTETTKNAGKRTADGSEFEKRTADGSEFESPKKKAKVE

SEQ ID NO: 1789 - protein, 2218 aa, synthetic construct
  source 1..2218: note = Description of Artificial Sequence: Synthetic polypeptide
MPAAKRVKLDGGDKKYSIGLDIGTNSVGWAVITDEYKVPSKKFKVLGNTDRHSIKKNLIGALLFDSGETAEATRLKRTARRRYTRRKNRICYLQEIFSNEMAKVDDSFFHRLEESFLVEEDKKHERHPIFGNIVDEVAYHEKYPTIYHLRKKLVDSTDKADLRLIYLALAHMIKFRGHFLIEGDLNPDNSDVDKLFIQLVQTYNQLFEENPINASGVDAKAILSARLSKSRRLENLIAQLPGEKKNGLFGNLIALSLGLTPNFKSNFDLAEDAKLQLSKDTYDDDLDNLLAQIGDQYADLFLAAKNLSDAILLSDILRVNTEITKAPLSASMIKRYDEHHQDLTLLKALVRQQLPEKYKEIFFDQSKNGYAGYIDGGASQEEFYKFIKPILEKMDGTEELLVKLNREDLLRKQRTFDNGSIPHQIHLGELHAILRRQEDFYPFLKDNREKIEKILTFRIPYYVGPLARGNSRFAWMTRKSEETITPWNFEEVVDKGASAQSFIERMTNFDKNLPNEKVLPKHSLLYEYFTVYNELTKVKYVTEGMRKPAFLSGEQKKAIVDLLFKTNRKVTVKQLKEDYFKKIECFDSVEISGVEDRFNASLGTYHDLLKIIKDKDFLDNEENEDILEDIVLTLTLFEDREMIEERLKTYAHLFDDKVMKQLKRRRYTGWGRLSRKLINGIRDKQSGKTILDFLKSDGFANRNFMQLIHDDSLTFKEDIQKAQVSGQGDSLHEHIANLAGSPAIKKGILQTVKVVDELVKVMGRHKPENIVIEMARENQTTQKGQKNSRERMKRIEEGIKELGSQILKEHPVENTQLQNEKLYLYYLQNGRDMYVDQELDINRLSDYDVDHIVPQSFLKDDSIDNKVLTRSDKARGKSDNVPSEEVVKKMKNYWRQLLNAKLITQRKFDNLTKAERGGLSELDKAGFIKRQLVETRQITKHVAQILDSRMNTKYDENDKLIREVKVITLKSKLVSDFRKDFQFYKVREINNYHHAHDAYLNAVVGTALIKKYPKLESEFVYGDYKVYDVRKMIAKSEQEIGKATAKYFFYSNIMNFFKTEITLANGEIRKRPLIETNGETGEIVWDKGRDFATVRKVLSMPQVNIVKKTEVQTGGFSKESILPKRNSDKLIARKKDWDPKKYGGFDSPTVAYSVLVVAKVEKGKSKKLKSVKELLGITIMERSSFEKNPIDFLEAKGYKEVKKDLIIKLPKYSLFELENGRKRMLASAGELQKGNELALPSKYVNFLYLASHYEKLKGSPEDNEQKQLFVEQHKHYLDEIIEQISEFSKRVILADANLDKVLSAYNKHRDKPIREQAENIIHLFTLTNLGAPAAFKYFDTTIDRKRYTSTKEVLDATLIHQSITGLYETRIDLSQLGGDGGGGGEAAAKPAPGGTLGDQGSRGSDPLPEPRVTLTVEGIPTEFLVNTGAEHSVLTKPMGKMGSKRTVVAGATGSKVYPWTTKRLLKIGQKQVTHSFLVIPECPAPLLGRDLLTKLKAQIQFSTEGPQVTWEDRPAMCLVLNLEEEYRLHEKPVPPSIDPSWLQLFPMVWAEKAGMGLANQVPPVVVELKSDASPVAVRQYPMSKEAREGIRPHIQRFLDLGILVPCQSPWNTPLLPVKKPGTNDYRPVQDLREVNKRVQDIHPTVPNPYNLLSSLPPSHTWYSVLDLKDAFFCLKLHPNSQPLFAFEWRDPEKGNTGQLTWTRLPQGFKNSPTLFNEALHRDLASFRALNPQVVMLQYVDDLLVAAPTYRDCKEGTRRLLQELSKLGYRVSAKKAQLCREEVTYLGYLLKGGKRWLTPARKATVMKIPTPTTPRQVREFLGKAGFCRLFIPGFASLAAPLYPLTRPKVPFTWTEAHQEAFGRIKEALLSAPALALPDLTKPFALYVDEKEGVARGVLTQTLGPWRRPVAYLSKKLDPVASGWPTCLKAIAAVALLLKDADKLTLGQNVLVIAPHNLESIVRQPPDRWMTNARMTHYQSLLLNERVSFAPPAILNPATLLPVESDDTPIHICSEILAEETGTRPDLRDQPLPGVPAWYTDGSSFIMDGRRQAGAAIVDNKRTVWASNLPEGTSAQKAELIALTQALRLAEGKSINIYTDSRYAFATAHVHGAIYKQRGWLTSAGKDIKNKEEILALLEAIHLPKRVAIIHCPGHQRGTDPVATGNRKADEAAKQAAQSTRILTETTKNAGKRTADGSEFEKRTADGSEFESPKKKAKVE

SEQ ID NO: 1790 - protein, 2214 aa, synthetic construct
  source 1..2214: note = Description of Artificial Sequence: Synthetic polypeptide
MPAAKRVKLDGGDKKYSIGLDIGTNSVGWAVITDEYKVPSKKFKVLGNTDRHSIKKNLIGALLFDSGETAEATRLKRTARRRYTRRKNRICYLQEIFSNEMAKVDDSFFHRLEESFLVEEDKKHERHPIFGNIVDEVAYHEKYPTIYHLRKKLVDSTDKADLRLIYLALAHMIKFRGHFLIEGDLNPDNSDVDKLFIQLVQTYNQLFEENPINASGVDAKAILSARLSKSRRLENLIAQLPGEKKNGLFGNLIALSLGLTPNFKSNFDLAEDAKLQLSKDTYDDDLDNLLAQIGDQYADLFLAAKNLSDAILLSDILRVNTEITKAPLSASMIKRYDEHHQDLTLLKALVRQQLPEKYKEIFFDQSKNGYAGYIDGGASQEEFYKFIKPILEKMDGTEELLVKLNREDLLRKQRTFDNGSIPHQIHLGELHAILRRQEDFYPFLKDNREKIEKILTFRIPYYVGPLARGNSRFAWMTRKSEETITPWNFEEVVDKGASAQSFIERMTNFDKNLPNEKVLPKHSLLYEYFTVYNELTKVKYVTEGMRKPAFLSGEQKKAIVDLLFKTNRKVTVKQLKEDYFKKIECFDSVEISGVEDRFNASLGTYHDLLKIIKDKDFLDNEENEDILEDIVLTLTLFEDREMIEERLKTYAHLFDDKVMKQLKRRRYTGWGRLSRKLINGIRDKQSGKTILDFLKSDGFANRNFMQLIHDDSLTFKEDIQKAQVSGQGDSLHEHIANLAGSPAIKKGILQTVKVVDELVKVMGRHKPENIVIEMARENQTTQKGQKNSRERMKRIEEGIKELGSQILKEHPVENTQLQNEKLYLYYLQNGRDMYVDQELDINRLSDYDVDHIVPQSFLKDDSIDNKVLTRSDKARGKSDNVPSEEVVKKMKNYWRQLLNAKLITQRKFDNLTKAERGGLSELDKAGFIKRQLVETRQITKHVAQILDSRMNTKYDENDKLIREVKVITLKSKLVSDFRKDFQFYKVREINNYHHAHDAYLNAVVGTALIKKYPKLESEFVYGDYKVYDVRKMIAKSEQEIGKATAKYFFYSNIMNFFKTEITLANGEIRKRPLIETNGETGEIVWDKGRDFATVRKVLSMPQVNIVKKTEVQTGGFSKESILPKRNSDKLIARKKDWDPKKYGGFDSPTVAYSVLVVAKVEKGKSKKLKSVKELLGITIMERSSFEKNPIDFLEAKGYKEVKKDLIIKLPKYSLFELENGRKRMLASAGELQKGNELALPSKYVNFLYLASHYEKLKGSPEDNEQKQLFVEQHKHYLDEIIEQISEFSKRVILADANLDKVLSAYNKHRDKPIREQAENIIHLFTLTNLGAPAAFKYFDTTIDRKRYTSTKEVLDATLIHQSITGLYETRIDLSQLGGDGGGGGGGGGGGTLGDQGSRGSDPLPEPRVTLTVEGIPTEFLVNTGAEHSVLTKPMGKMGSKRTVVAGATGSKVYPWTTKRLLKIGQKQVTHSFLVIPECPAPLLGRDLLTKLKAQIQFSTEGPQVTWEDRPAMCLVLNLEEEYRLHEKPVPPSIDPSWLQLFPMVWAEKAGMGLANQVPPVVVELKSDASPVAVRQYPMSKEAREGIRPHIQRFLDLGILVPCQSPWNTPLLPVKKPGTNDYRPVQDLREVNKRVQDIHPTVPNPYNLLSSLPPSHTWYSVLDLKDAFFCLKLHPNSQPLFAFEWRDPEKGNTGQLTWTRLPQGFKNSPTLFNEALHRDLASFRALNPQVVMLQYVDDLLVAAPTYRDCKEGTRRLLQELSKLGYRVSAKKAQLCREEVTYLGYLLKGGKRWLTPARKATVMKIPTPTTPRQVREFLGKAGFCRLFIPGFASLAAPLYPLTRPKVPFTWTEAHQEAFGRIKEALLSAPALALPDLTKPFALYVDEKEGVARGVLTQTLGPWRRPVAYLSKKLDPVASGWPTCLKAIAAVALLLKDADKLTLGQNVLVIAPHNLESIVRQPPDRWMTNARMTHYQSLLLNERVSFAPPAILNPATLLPVESDDTPIHICSEILAEETGTRPDLRDQPLPGVPAWYTDGSSFIMDGRRQAGAAIVDNKRTVWASNLPEGTSAQKAELIALTQALRLAEGKSINIYTDSRYAFATAHVHGAIYKQRGWLTSAGKDIKNKEEILALLEAIHLPKRVAIIHCPGHQRGTDPVATGNRKADEAAKQAAQSTRILTETTKNAGKRTADGSEFEKRTADGSEFESPKKKAKVE

SEQ ID NO: 1791 - protein, 2210 aa, synthetic construct
  source 1..2210: note = Description of Artificial Sequence: Synthetic polypeptide
MPAAKRVKLDGGDKKYSIGLDIGTNSVGWAVITDEYKVPSKKFKVLGNTDRHSIKKNLIGALLFDSGETAEATRLKRTARRRYTRRKNRICYLQEIFSNEMAKVDDSFFHRLEESFLVEEDKKHERHPIFGNIVDEVAYHEKYPTIYHLRKKLVDSTDKADLRLIYLALAHMIKFRGHFLIEGDLNPDNSDVDKLFIQLVQTYNQLFEENPINASGVDAKAILSARLSKSRRLENLIAQLPGEKKNGLFGNLIALSLGLTPNFKSNFDLAEDAKLQLSKDTYDDDLDNLLAQIGDQYADLFLAAKNLSDAILLSDILRVNTEITKAPLSASMIKRYDEHHQDLTLLKALVRQQLPEKYKEIFFDQSKNGYAGYIDGGASQEEFYKFIKPILEKMDGTEELLVKLNREDLLRKQRTFDNGSIPHQIHLGELHAILRRQEDFYPFLKDNREKIEKILTFRIPYYVGPLARGNSRFAWMTRKSEETITPWNFEEVVDKGASAQSFIERMTNFDKNLPNEKVLPKHSLLYEYFTVYNELTKVKYVTEGMRKPAFLSGEQKKAIVDLLFKTNRKVTVKQLKEDYFKKIECFDSVEISGVEDRFNASLGTYHDLLKIIKDKDFLDNEENEDILEDIVLTLTLFEDREMIEERLKTYAHLFDDKVMKQLKRRRYTGWGRLSRKLINGIRDKQSGKTILDFLKSDGFANRNFMQLIHDDSLTFKEDIQKAQVSGQGDSLHEHIANLAGSPAIKKGILQTVKVVDELVKVMGRHKPENIVIEMARENQTTQKGQKNSRERMKRIEEGIKELGSQILKEHPVENTQLQNEKLYLYYLQNGRDMYVDQELDINRLSDYDVDHIVPQSFLKDDSIDNKVLTRSDKARGKSDNVPSEEVVKKMKNYWRQLLNAKLITQRKFDNLTKAERGGLSELDKAGFIKRQLVETRQITKHVAQILDSRMNTKYDENDKLIREVKVITLKSKLVSDFRKDFQFYKVREINNYHHAHDAYLNAVVGTALIKKYPKLESEFVYGDYKVYDVRKMIAKSEQEIGKATAKYFFYSNIMNFFKTEITLANGEIRKRPLIETNGETGEIVWDKGRDFATVRKVLSMPQVNIVKKTEVQTGGFSKESILPKRNSDKLIARKKDWDPKKYGGFDSPTVAYSVLVVAKVEKGKSKKLKSVKELLGITIMERSSFEKNPIDFLEAKGYKEVKKDLIIKLPKYSLFELENGRKRMLASAGELQKGNELALPSKYVNFLYLASHYEKLKGSPEDNEQKQLFVEQHKHYLDEIIEQISEFSKRVILADANLDKVLSAYNKHRDKPIREQAENIIHLFTLTNLGAPAAFKYFDTTIDRKRYTSTKEVLDATLIHQSITGLYETRIDLSQLGGDGGGGSGGTLGDQGSRGSDPLPEPRVTLTVEGIPTEFLVNTGAEHSVLTKPMGKMGSKRTVVAGATGSKVYPWTTKRLLKIGQKQVTHSFLVIPECPAPLLGRDLLTKLKAQIQFSTEGPQVTWEDRPAMCLVLNLEEEYRLHEKPVPPSIDPSWLQLFPMVWAEKAGMGLANQVPPVVVELKSDASPVAVRQYPMSKEAREGIRPHIQRFLDLGILVPCQSPWNTPLLPVKKPGTNDYRPVQDLREVNKRVQDIHPTVPNPYNLLSSLPPSHTWYSVLDLKDAFFCLKLHPNSQPLFAFEWRDPEKGNTGQLTWTRLPQGFKNSPTLFNEALHRDLASFRALNPQVVMLQYVDDLLVAAPTYRDCKEGTRRLLQELSKLGYRVSAKKAQLCREEVTYLGYLLKGGKRWLTPARKATVMKIPTPTTPRQVREFLGKAGFCRLFIPGFASLAAPLYPLTRPKVPFTWTEAHQEAFGRIKEALLSAPALALPDLTKPFALYVDEKEGVARGVLTQTLGPWRRPVAYLSKKLDPVASGWPTCLKAIAAVALLLKDADKLTLGQNVLVIAPHNLESIVRQPPDRWMTNARMTHYQSLLLNERVSFAPPAILNPATLLPVESDDTPIHICSEILAEETGTRPDLRDQPLPGVPAWYTDGSSFIMDGRRQAGAAIVDNKRTVWASNLPEGTSAQKAELIALTQALRLAEGKSINIYTDSRYAFATAHVHGAIYKQRGWLTSAGKDIKNKEEILALLEAIHLPKRVAIIHCPGHQRGTDPVATGNRKADEAAKQAAQSTRILTETTKNAGKRTADGSEFEKRTADGSEFESPKKKAKVE

SEQ ID NO: 1792 - protein, 2216 aa, synthetic construct
  source 1..2216: note = Description of Artificial Sequence: Synthetic polypeptide
MPAAKRVKLDGGDKKYSIGLDIGTNSVGWAVITDEYKVPSKKFKVLGNTDRHSIKKNLIGALLFDSGETAEATRLKRTARRRYTRRKNRICYLQEIFSNEMAKVDDSFFHRLEESFLVEEDKKHERHPIFGNIVDEVAYHEKYPTIYHLRKKLVDSTDKADLRLIYLALAHMIKFRGHFLIEGDLNPDNSDVDKLFIQLVQTYNQLFEENPINASGVDAKAILSARLSKSRRLENLIAQLPGEKKNGLFGNLIALSLGLTPNFKSNFDLAEDAKLQLSKDTYDDDLDNLLAQIGDQYADLFLAAKNLSDAILLSDILRVNTEITKAPLSASMIKRYDEHHQDLTLLKALVRQQLPEKYKEIFFDQSKNGYAGYIDGGASQEEFYKFIKPILEKMDGTEELLVKLNREDLLRKQRTFDNGSIPHQIHLGELHAILRRQEDFYPFLKDNREKIEKILTFRIPYYVGPLARGNSRFAWMTRKSEETITPWNFEEVVDKGASAQSFIERMTNFDKNLPNEKVLPKHSLLYEYFTVYNELTKVKYVTEGMRKPAFLSGEQKKAIVDLLFKTNRKVTVKQLKEDYFKKIECFDSVEISGVEDRFNASLGTYHDLLKIIKDKDFLDNEENEDILEDIVLTLTLFEDREMIEERLKTYAHLFDDKVMKQLKRRRYTGWGRLSRKLINGIRDKQSGKTILDFLKSDGFANRNFMQLIHDDSLTFKEDIQKAQVSGQGDSLHEHIANLAGSPAIKKGILQTVKVVDELVKVMGRHKPENIVIEMARENQTTQKGQKNSRERMKRIEEGIKELGSQILKEHPVENTQLQNEKLYLYYLQNGRDMYVDQELDINRLSDYDVDHIVPQSFLKDDSIDNKVLTRSDKARGKSDNVPSEEVVKKMKNYWRQLLNAKLITQRKFDNLTKAERGGLSELDKAGFIKRQLVETRQITKHVAQILDSRMNTKYDENDKLIREVKVITLKSKLVSDFRKDFQFYKVREINNYHHAHDAYLNAVVGTALIKKYPKLESEFVYGDYKVYDVRKMIAKSEQEIGKATAKYFFYSNIMNFFKTEITLANGEIRKRPLIETNGETGEIVWDKGRDFATVRKVLSMPQVNIVKKTEVQTGGFSKESILPKRNSDKLIARKKDWDPKKYGGFDSPTVAYSVLVVAKVEKGKSKKLKSVKELLGITIMERSSFEKNPIDFLEAKGYKEVKKDLIIKLPKYSLFELENGRKRMLASAGELQKGNELALPSKYVNFLYLASHYEKLKGSPEDNEQKQLFVEQHKHYLDEIIEQISEFSKRVILADANLDKVLSAYNKHRDKPIREQAENIIHLFTLTNLGAPAAFKYFDTTIDRKRYTSTKEVLDATLIHQSITGLYETRIDLSQLGGDGGPAPGGSGGGGGTLGDQGSRGSDPLPEPRVTLTVEGIPTEFLVNTGAEHSVLTKPMGKMGSKRTVVAGATGSKVYPWTTKRLLKIGQKQVTHSFLVIPECPAPLLGRDLLTKLKAQIQFSTEGPQVTWEDRPAMCLVLNLEEEYRLHEKPVPPSIDPSWLQLFPMVWAEKAGMGLANQVPPVVVELKSDASPVAVRQYPMSKEAREGIRPHIQRFLDLGILVPCQSPWNTPLLPVKKPGTNDYRPVQDLREVNKRVQDIHPTVPNPYNLLSSLPPSHTWYSVLDLKDAFFCLKLHPNSQPLFAFEWRDPEKGNTGQLTWTRLPQGFKNSPTLFNEALHRDLASFRALNPQVVMLQYVDDLLVAAPTYRDCKEGTRRLLQELSKLGYRVSAKKAQLCREEVTYLGYLLKGGKRWLTPARKATVMKIPTPTTPRQVREFLGKAGFCRLFIPGFASLAAPLYPLTRPKVPFTWTEAHQEAFGRIKEALLSAPALALPDLTKPFALYVDEKEGVARGVLTQTLGPWRRPVAYLSKKLDPVASGWPTCLKAIAAVALLLKDADKLTLGQNVLVIAPHNLESIVRQPPDRWMTNARMTHYQSLLLNERVSFAPPAILNPATLLPVESDDTPIHICSEILAEETGTRPDLRDQPLPGVPAWYTDGSSFIMDGRRQAGAAIVDNKRTVWASNLPEGTSAQKAELIALTQALRLAEGKSINIYTDSRYAFATAHVHGAIYKQRGWLTSAGKDIKNKEEILALLEAIHLPKRVAIIHCPGHQRGTDPVATGNRKADEAAKQAAQSTRILTETTKNAGKRTADGSEFEKRTADGSEFESPKKKAKVE

SEQ ID NO: 1793 - protein, 2220 aa, synthetic construct
  source 1..2220: note = Description of Artificial Sequence: Synthetic polypeptide
MPAAKRVKLDGGDKKYSIGLDIGTNSVGWAVITDEYKVPSKKFKVLGNTDRHSIKKNLIGALLFDSGETAEATRLKRTARRRYTRRKNRICYLQEIFSNEMAKVDDSFFHRLEESFLVEEDKKHERHPIFGNIVDEVAYHEKYPTIYHLRKKLVDSTDKADLRLIYLALAHMIKFRGHFLIEGDLNPDNSDVDKLFIQLVQTYNQLFEENPINASGVDAKAILSARLSKSRRLENLIAQLPGEKKNGLFGNLIALSLGLTPNFKSNFDLAEDAKLQLSKDTYDDDLDNLLAQIGDQYADLFLAAKNLSDAILLSDILRVNTEITKAPLSASMIKRYDEHHQDLTLLKALVRQQLPEKYKEIFFDQSKNGYAGYIDGGASQEEFYKFIKPILEKMDGTEELLVKLNREDLLRKQRTFDNGSIPHQIHLGELHAILRRQEDFYPFLKDNREKIEKILTFRIPYYVGPLARGNSRFAWMTRKSEETITPWNFEEVVDKGASAQSFIERMTNFDKNLPNEKVLPKHSLLYEYFTVYNELTKVKYVTEGMRKPAFLSGEQKKAIVDLLFKTNRKVTVKQLKEDYFKKIECFDSVEISGVEDRFNASLGTYHDLLKIIKDKDFLDNEENEDILEDIVLTLTLFEDREMIEERLKTYAHLFDDKVMKQLKRRRYTGWGRLSRKLINGIRDKQSGKTILDFLKSDGFANRNFMQLIHDDSLTFKEDIQKAQVSGQGDSLHEHIANLAGSPAIKKGILQTVKVVDELVKVMGRHKPENIVIEMARENQTTQKGQKNSRERMKRIEEGIKELGSQILKEHPVENTQLQNEKLYLYYLQNGRDMYVDQELDINRLSDYDVDHIVPQSFLKDDSIDNKVLTRSDKARGKSDNVPSEEVVKKMKNYWRQLLNAKLITQRKFDNLTKAERGGLSELDKAGFIKRQLVETRQITKHVAQILDSRMNTKYDENDKLIREVKVITLKSKLVSDFRKDFQFYKVREINNYHHAHDAYLNAVVGTALIKKYPKLESEFVYGDYKVYDVRKMIAKSEQEIGKATAKYFFYSNIMNFFKTEITLANGEIRKRPLIETNGETGEIVWDKGRDFATVRKVLSMPQVNIVKKTEVQTGGFSKESILPKRNSDKLIARKKDWDPKKYGGFDSPTVAYSVLVVAKVEKGKSKKLKSVKELLGITIMERSSFEKNPIDFLEAKGYKEVKKDLIIKLPKYSLFELENGRKRMLASAGELQKGNELALPSKYVNFLYLASHYEKLKGSPEDNEQKQLFVEQHKHYLDEIIEQISEFSKRVILADANLDKVLSAYNKHRDKPIREQAENIIHLFTLTNLGAPAAFKYFDTTIDRKRYTSTKEVLDATLIHQSITGLYETRIDLSQLGGDGGPAPAPAPAPAPAPGGTLGDQGSRGSDPLPEPRVTLTVEGIPTEFLVNTGAEHSVLTKPMGKMGSKRTVVAGATGSKVYPWTTKRLLKIGQKQVTHSFLVIPECPAPLLGRDLLTKLKAQIQFSTEGPQVTWEDRPAMCLVLNLEEEYRLHEKPVPPSIDPSWLQLFPMVWAEKAGMGLANQVPPVVVELKSDASPVAVRQYPMSKEAREGIRPHIQRFLDLGILVPCQSPWNTPLLPVKKPGTNDYRPVQDLREVNKRVQDIHPTVPNPYNLLSSLPPSHTWYSVLDLKDAFFCLKLHPNSQPLFAFEWRDPEKGNTGQLTWTRLPQGFKNSPTLFNEALHRDLASFRALNPQVVMLQYVDDLLVAAPTYRDCKEGTRRLLQELSKLGYRVSAKKAQLCREEVTYLGYLLKGGKRWLTPARKATVMKIPTPTTPRQVREFLGKAGFCRLFIPGFASLAAPLYPLTRPKVPFTWTEAHQEAFGRIKEALLSAPALALPDLTKPFALYVDEKEGVARGVLTQTLGPWRRPVAYLSKKLDPVASGWPTCLKAIAAVALLLKDADKLTLGQNVLVIAPHNLESIVRQPPDRWMTNARMTHYQSLLLNERVSFAPPAILNPATLLPVESDDTPIHICSEILAEETGTRPDLRDQPLPGVPAWYTDGSSFIMDGRRQAGAAIVDNKRTVWASNLPEGTSAQKAELIALTQALRLAEGKSINIYTDSRYAFATAHVHGAIYKQRGWLTSAGKDIKNKEEILALLEAIHLPKRVAIIHCPGHQRGTDPVATGNRKADEAAKQAAQSTRILTETTKNAGKRTADGSEFEKRTADGSEFESPKKKAKVE

SEQ ID NO: 1794 - protein, 2213 aa, synthetic construct
  source 1..2213: note = Description of Artificial Sequence: Synthetic polypeptide
MPAAKRVKLDGGDKKYSIGLDIGTNSVGWAVITDEYKVPSKKFKVLGNTDRHSIKKNLIGALLFDSGETAEATRLKRTARRRYTRRKNRICYLQEIFSNEMAKVDDSFFHRLEESFLVEEDKKHERHPIFGNIVDEVAYHEKYPTIYHLRKKLVDSTDKADLRLIYLALAHMIKFRGHFLIEGDLNPDNSDVDKLFIQLVQTYNQLFEENPINASGVDAKAILSARLSKSRRLENLIAQLPGEKKNGLFGNLIALSLGLTPNFKSNFDLAEDAKLQLSKDTYDDDLDNLLAQIGDQYADLFLAAKNLSDAILLSDILRVNTEITKAPLSASMIKRYDEHHQDLTLLKALVRQQLPEKYKEIFFDQSKNGYAGYIDGGASQEEFYKFIKPILEKMDGTEELLVKLNREDLLRKQRTFDNGSIPHQIHLGELHAILRRQEDFYPFLKDNREKIEKILTFRIPYYVGPLARGNSRFAWMTRKSEETITPWNFEEVVDKGASAQSFIERMTNFDKNLPNEKVLPKHSLLYEYFTVYNELTKVKYVTEGMRKPAFLSGEQKKAIVDLLFKTNRKVTVKQLKEDYFKKIECFDSVEISGVEDRFNASLGTYHDLLKIIKDKDFLDNEENEDILEDIVLTLTLFEDREMIEERLKTYAHLFDDKVMKQLKRRRYTGWGRLSRKLINGIRDKQSGKTILDFLKSDGFANRNFMQLIHDDSLTFKEDIQKAQVSGQGDSLHEHIANLAGSPAIKKGILQTVKVVDELVKVMGRHKPENIVIEMARENQTTQKGQKNSRERMKRIEEGIKELGSQILKEHPVENTQLQNEKLYLYYLQNGRDMYVDQELDINRLSDYDVDHIVPQSFLKDDSIDNKVLTRSDKARGKSDNVPSEEVVKKMKNYWRQLLNAKLITQRKFDNLTKAERGGLSELDKAGFIKRQLVETRQITKHVAQILDSRMNTKYDENDKLIREVKVITLKSKLVSDFRKDFQFYKVREINNYHHAHDAYLNAVVGTALIKKYPKLESEFVYGDYKVYDVRKMIAKSEQEIGKATAKYFFYSNIMNFFKTEITLANGEIRKRPLIETNGETGEIVWDKGRDFATVRKVLSMPQVNIVKKTEVQTGGFSKESILPKRNSDKLIARKKDWDPKKYGGFDSPTVAYSVLVVAKVEKGKSKKLKSVKELLGITIMERSSFEKNPIDFLEAKGYKEVKKDLIIKLPKYSLFELENGRKRMLASAGELQKGNELALPSKYVNFLYLASHYEKLKGSPEDNEQKQLFVEQHKHYLDEIIEQISEFSKRVILADANLDKVLSAYNKHRDKPIREQAENIIHLFTLTNLGAPAAFKYFDTTIDRKRYTSTKEVLDATLIHQSITGLYETRIDLSQLGGDGGPAPGGGGGTLGDQGSRGSDPLPEPRVTLTVEGIPTEFLVNTGAEHSVLTKPMGKMGSKRTVVAGATGSKVYPWTTKRLLKIGQKQVTHSFLVIPECPAPLLGRDLLTKLKAQIQFSTEGPQVTWEDRPAMCLVLNLEEEYRLHEKPVPPSIDPSWLQLFPMVWAEKAGMGLANQVPPVVVELKSDASPVAVRQYPMSKEAREGIRPHIQRFLDLGILVPCQSPWNTPLLPVKKPGTNDYRPVQDLREVNKRVQDIHPTVPNPYNLLSSLPPSHTWYSVLDLKDAFFCLKLHPNSQPLFAFEWRDPEKGNTGQLTWTRLPQGFKNSPTLFNEALHRDLASFRALNPQVVMLQYVDDLLVAAPTYRDCKEGTRRLLQELSKLGYRVSAKKAQLCREEVTYLGYLLKGGKRWLTPARKATVMKIPTPTTPRQVREFLGKAGFCRLFIPGFASLAAPLYPLTRPKVPFTWTEAHQEAFGRIKEALLSAPALALPDLTKPFALYVDEKEGVARGVLTQTLGPWRRPVAYLSKKLDPVASGWPTCLKAIAAVALLLKDADKLTLGQNVLVIAPHNLESIVRQPPDRWMTNARMTHYQSLLLNERVSFAPPAILNPATLLPVESDDTPIHICSEILAEETGTRPDLRDQPLPGVPAWYTDGSSFIMDGRRQAGAAIVDNKRTVWASNLPEGTSAQKAELIALTQALRLAEGKSINIYTDSRYAFATAHVHGAIYKQRGWLTSAGKDIKNKEEILALLEAIHLPKRVAIIHCPGHQRGTDPVATGNRKADEAAKQAAQSTRILTETTKNAGKRTADGSEFEKRTADGSEFESPKKKAKVE

SEQ ID NO: 1795 - protein, 2218 aa, synthetic construct
  source 1..2218: note = Description of Artificial Sequence: Synthetic polypeptide
MPAAKRVKLDGGDKKYSIGLDIGTNSVGWAVITDEYKVPSKKFKVLGNTDRHSIKKNLIGALLFDSGETAEATRLKRTARRRYTRRKNRICYLQEIFSNEMAKVDDSFFHRLEESFLVEEDKKHERHPIFGNIVDEVAYHEKYPTIYHLRKKLVDSTDKADLRLIYLALAHMIKFRGHFLIEGDLNPDNSDVDKLFIQLVQTYNQLFEENPINASGVDAKAILSARLSKSRRLENLIAQLPGEKKNGLFGNLIALSLGLTPNFKSNFDLAEDAKLQLSKDTYDDDLDNLLAQIGDQYADLFLAAKNLSDAILLSDILRVNTEITKAPLSASMIKRYDEHHQDLTLLKALVRQQLPEKYKEIFFDQSKNGYAGYIDGGASQEEFYKFIKPILEKMDGTEELLVKLNREDLLRKQRTFDNGSIPHQIHLGELHAILRRQEDFYPFLKDNREKIEKILTFRIPYYVGPLARGNSRFAWMTRKSEETITPWNFEEVVDKGASAQSFIERMTNFDKNLPNEKVLPKHSLLYEYFTVYNELTKVKYVTEGMRKPAFLSGEQKKAIVDLLFKTNRKVTVKQLKEDYFKKIECFDSVEISGVEDRFNASLGTYHDLLKIIKDKDFLDNEENEDILEDIVLTLTLFEDREMIEERLKTYAHLFDDKVMKQLKRRRYTGWGRLSRKLINGIRDKQSGKTILDFLKSDGFANRNFMQLIHDDSLTFKEDIQKAQVSGQGDSLHEHIANLAGSPAIKKGILQTVKVVDELVKVMGRHKPENIVIEMARENQTTQKGQKNSRERMKRIEEGIKELGSQILKEHPVENTQLQNEKLYLYYLQNGRDMYVDQELDINRLSDYDVDHIVPQSFLKDDSIDNKVLTRSDKARGKSDNVPSEEVVKKMKNYWRQLLNAKLITQRKFDNLTKAERGGLSELDKAGFIKRQLVETRQITKHVAQILDSRMNTKYDENDKLIREVKVITLKSKLVSDFRKDFQFYKVREINNYHHAHDAYLNAVVGTALIKKYPKLESEFVYGDYKVYDVRKMIAKSEQEIGKATAKYFFYSNIMNFFKTEITLANGEIRKRPLIETNGETGEIVWDKGRDFATVRKVLSMPQVNIVKKTEVQTGGFSKESILPKRNSDKLIARKKDWDPKKYGGFDSPTVAYSVLVVAKVEKGKSKKLKSVKELLGITIMERSSFEKNPIDFLEAKGYKEVKKDLIIKLPKYSLFELENGRKRMLASAGELQKGNELALPSKYVNFLYLASHYEKLKGSPEDNEQKQLFVEQHKHYLDEIIEQISEFSKRVILADANLDKVLSAYNKHRDKPIREQAENIIHLFTLTNLGAPAAFKYFDTTIDRKRYTSTKEVLDATLIHQSITGLYETRIDLSQLGGDGGGSSPAPEAAAKGGTLGDQGSRGSDPLPEPRVTLTVEGIPTEFLVNTGAEHSVLTKPMGKMGSKRTVVAGATGSKVYPWTTKRLLKIGQKQVTHSFLVIPECPAPLLGRDLLTKLKAQIQFSTEGPQVTWEDRPAMCLVLNLEEEYRLHEKPVPPSIDPSWLQLFPMVWAEKAGMGLANQVPPVVVELKSDASPVAVRQYPMSKEAREGIRPHIQRFLDLGILVPCQSPWNTPLLPVKKPGTNDYRPVQDLREVNKRVQDIHPTVPNPYNLLSSLPPSHTWYSVLDLKDAFFCLKLHPNSQPLFAFEWRDPEKGNTGQLTWTRLPQGFKNSPTLFNEALHRDLASFRALNPQVVMLQYVDDLLVAAPTYRDCKEGTRRLLQELSKLGYRVSAKKAQLCREEVTYLGYLLKGGKRWLTPARKATVMKIPTPTTPRQVREFLGKAGFCRLFIPGFASLAAPLYPLTRPKVPFTWTEAHQEAFGRIKEALLSAPALALPDLTKPFALYVDEKEGVARGVLTQTLGPWRRPVAYLSKKLDPVASGWPTCLKAIAAVALLLKDADKLTLGQNVLVIAPHNLESIVRQPPDRWMTNARMTHYQSLLLNERVSFAPPAILNPATLLPVESDDTPIHICSEILAEETGTRPDLRDQPLPGVPAWYTDGSSFIMDGRRQAGAAIVDNKRTVWASNLPEGTSAQKAELIALTQALRLAEGKSINIYTDSRYAFATAHVHGAIYKQRGWLTSAGKDIKNKEEILALLEAIHLPKRVAIIHCPGHQRGTDPVATGNRKADEAAKQAAQSTRILTETTKNAGKRTADGSEFEKRTADGSEFESPKKKAKVE

SEQ ID NO: 1796 - protein, 2218 aa, synthetic construct
  source 1..2218: note = Description of Artificial Sequence: Synthetic polypeptide
MPAAKRVKLDGGDKKYSIGLDIGTNSVGWAVITDEYKVPSKKFKVLGNTDRHSIKKNLIGALLFDSGETAEATRLKRTARRRYTRRKNRICYLQEIFSNEMAKVDDSFFHRLEESFLVEEDKKHERHPIFGNIVDEVAYHEKYPTIYHLRKKLVDSTDKADLRLIYLALAHMIKFRGHFLIEGDLNPDNSDVDKLFIQLVQTYNQLFEENPINASGVDAKAILSARLSKSRRLENLIAQLPGEKKNGLFGNLIALSLGLTPNFKSNFDLAEDAKLQLSKDTYDDDLDNLLAQIGDQYADLFLAAKNLSDAILLSDILRVNTEITKAPLSASMIKRYDEHHQDLTLLKALVRQQLPEKYKEIFFDQSKNGYAGYIDGGASQEEFYKFIKPILEKMDGTEELLVKLNREDLLRKQRTFDNGSIPHQIHLGELHAILRRQEDFYPFLKDNREKIEKILTFRIPYYVGPLARGNSRFAWMTRKSEETITPWNFEEVVDKGASAQSFIERMTNFDKNLPNEKVLPKHSLLYEYFTVYNELTKVKYVTEGMRKPAFLSGEQKKAIVDLLFKTNRKVTVKQLKEDYFKKIECFDSVEISGVEDRFNASLGTYHDLLKIIKDKDFLDNEENEDILEDIVLTLTLFEDREMIEERLKTYAHLFDDKVMKQLKRRRYTGWGRLSRKLINGIRDKQSGKTILDFLKSDGFANRNFMQLIHDDSLTFKEDIQKAQVSGQGDSLHEHIANLAGSPAIKKGILQTVKVVDELVKVMGRHKPENIVIEMARENQTTQKGQKNSRERMKRIEEGIKELGSQILKEHPVENTQLQNEKLYLYYLQNGRDMYVDQELDINRLSDYDVDHIVPQSFLKDDSIDNKVLTRSDKARGKSDNVPSEEVVKKMKNYWRQLLNAKLITQRKFDNLTKAERGGLSELDKAGFIKRQLVETRQITKHVAQILDSRMNTKYDENDKLIREVKVITLKSKLVSDFRKDFQFYKVREINNYHHAHDAYLNAVVGTALIKKYPKLESEFVYGDYKVYDVRKMIAKSEQEIGKATAKYFFYSNIMNFFKTEITLANGEIRKRPLIETNGETGEIVWDKGRDFATVRKVLSMPQVNIVKKTEVQTGGFSKESILPKRNSDKLIARKKDWDPKKYGGFDSPTVAYSVLVVAKVEKGKSKKLKSVKELLGITIMERSSFEKNPIDFLEAKGYKEVKKDLIIKLPKYSLFELENGRKRMLASAGELQKGNELALPSKYVNFLYLASHYEKLKGSPEDNEQKQLFVEQHKHYLDEIIEQISEFSKRVILADANLDKVLSAYNKHRDKPIREQAENIIHLFTLTNLGAPAAFKYFDTTIDRKRYTSTKEVLDATLIHQSITGLYETRIDLSQLGGDGGGGGEAAAKGSSGGTLGDQGSRGSDPLPEPRVTLTVEGIPTEFLVNTGAEHSVLTKPMGKMGSKRTVVAGATGSKVYPWTTKRLLKIGQKQVTHSFLVIPECPAPLLGRDLLTKLKAQIQFSTEGPQVTWEDRPAMCLVLNLEEEYRLHEKPVPPSIDPSWLQLFPMVWAEKAGMGLANQVPPVVVELKSDASPVAVRQYPMSKEAREGIRPHIQRFLDLGILVPCQSPWNTPLLPVKKPGTNDYRPVQDLREVNKRVQDIHPTVPNPYNLLSSLPPSHTWYSVLDLKDAFFCLKLHPNSQPLFAFEWRDPEKGNTGQLTWTRLPQGFKNSPTLFNEALHRDLASFRALNPQVVMLQYVDDLLVAAPTYRDCKEGTRRLLQELSKLGYRVSAKKAQLCREEVTYLGYLLKGGKRWLTPARKATVMKIPTPTTPRQVREFLGKAGFCRLFIPGFASLAAPLYPLTRPKVPFTWTEAHQEAFGRIKEALLSAPALALPDLTKPFALYVDEKEGVARGVLTQTLGPWRRPVAYLSKKLDPVASGWPTCLKAIAAVALLLKDADKLTLGQNVLVIAPHNLESIVRQPPDRWMTNARMTHYQSLLLNERVSFAPPAILNPATLLPVESDDTPIHICSEILAEETGTRPDLRDQPLPGVPAWYTDGSSFIMDGRRQAGAAIVDNKRTVWASNLPEGTSAQKAELIALTQALRLAEGKSINIYTDSRYAFATAHVHGAIYKQRGWLTSAGKDIKNKEEILALLEAIHLPKRVAIIHCPGHQRGTDPVATGNRKADEAAKQAAQSTRILTETTKNAGKRTADGSEFEKRTADGSEFESPKKKAKVE

SEQ ID NO: 1797 - protein, 2215 aa, synthetic construct
  source 1..2215: note = Description of Artificial Sequence: Synthetic polypeptide
MPAAKRVKLDGGDKKYSIGLDIGTNSVGWAVITDEYKVPSKKFKVLGNTDRHSIKKNLIGALLFDSGETAEATRLKRTARRRYTRRKNRICYLQEIFSNEMAKVDDSFFHRLEESFLVEEDKKHERHPIFGNIVDEVAYHEKYPTIYHLRKKLVDSTDKADLRLIYLALAHMIKFRGHFLIEGDLNPDNSDVDKLFIQLVQTYNQLFEENPINASGVDAKAILSARLSKSRRLENLIAQLPGEKKNGLFGNLIALSLGLTPNFKSNFDLAEDAKLQLSKDTYDDDLDNLLAQIGDQYADLFLAAKNLSDAILLSDILRVNTEITKAPLSASMIKRYDEHHQDLTLLKALVRQQLPEKYKEIFFDQSKNGYAGYIDGGASQEEFYKFIKPILEKMDGTEELLVKLNREDLLRKQRTFDNGSIPHQIHLGELHAILRRQEDFYPFLKDNREKIEKILTFRIPYYVGPLARGNSRFAWMTRKSEETITPWNFEEVVDKGASAQSFIERMTNFDKNLPNEKVLPKHSLLYEYFTVYNELTKVKYVTEGMRKPAFLSGEQKKAIVDLLFKTNRKVTVKQLKEDYFKKIECFDSVEISGVEDRFNASLGTYHDLLKIIKDKDFLDNEENEDILEDIVLTLTLFEDREMIEERLKTYAHLFDDKVMKQLKRRRYTGWGRLSRKLINGIRDKQSGKTILDFLKSDGFANRNFMQLIHDDSLTFKEDIQKAQVSGQGDSLHEHIANLAGSPAIKKGILQTVKVVDELVKVMGRHKPENIVIEMARENQTTQKGQKNSRERMKRIEEGIKELGSQILKEHPVENTQLQNEKLYLYYLQNGRDMYVDQELDINRLSDYDVDHIVPQSFLKDDSIDNKVLTRSDKARGKSDNVPSEEVVKKMKNYWRQLLNAKLITQRKFDNLTKAERGGLSELDKAGFIKRQLVETRQITKHVAQILDSRMNTKYDENDKLIREVKVITLKSKLVSDFRKDFQFYKVREINNYHHAHDAYLNAVVGTALIKKYPKLESEFVYGDYKVYDVRKMIAKSEQEIGKATAKYFFYSNIMNFFKTEITLANGEIRKRPLIETNGETGEIVWDKGRDFATVRKVLSMPQVNIVKKTEVQTGGFSKESILPKRNSDKLIARKKDWDPKKYGGFDSPTVAYSVLVVAKVEKGKSKKLKSVKELLGITIMERSSFEKNPIDFLEAKGYKEVKKDLIIKLPKYSLFELENGRKRMLASAGELQKGNELALPSKYVNFLYLASHYEKLKGSPEDNEQKQLFVEQHKHYLDEIIEQISEFSKRVILADANLDKVLSAYNKHRDKPIREQAENIIHLFTLTNLGAPAAFKYFDTTIDRKRYTSTKEVLDATLIHQSITGLYETRIDLSQLGGDGGGSSEAAAKGGTLGDQGSRGSDPLPEPRVTLTVEGIPTEFLVNTGAEHSVLTKPMGKMGSKRTVVAGATGSKVYPWTTKRLLKIGQKQVTHSFLVIPECPAPLLGRDLLTKLKAQIQFSTEGPQVTWEDRPAMCLVLNLEEEYRLHEKPVPPSIDPSWLQLFPMVWAEKAGMGLANQVPPVVVELKSDASPVAVRQYPMSKEAREGIRPHIQRFLDLGILVPCQSPWNTPLLPVKKPGTNDYRPVQDLREVNKRVQDIHPTVPNPYNLLSSLPPSHTWYSVLDLKDAFFCLKLHPNSQPLFAFEWRDPEKGNTGQLTWTRLPQGFKNSPTLFNEALHRDLASFRALNPQVVMLQYVDDLLVAAPTYRDCKEGTRRLLQELSKLGYRVSAKKAQLCREEVTYLGYLLKGGKRWLTPARKATVMKIPTPTTPRQVREFLGKAGFCRLFIPGFASLAAPLYPLTRPKVPFTWTEAHQEAFGRIKEALLSAPALALPDLTKPFALYVDEKEGVARGVLTQTLGPWRRPVAYLSKKLDPVASGWPTCLKAIAAVALLLKDADKLTLGQNVLVIAPHNLESIVRQPPDRWMTNARMTHYQSLLLNERVSFAPPAILNPATLLPVESDDTPIHICSEILAEETGTRPDLRDQPLPGVPAWYTDGSSFIMDGRRQAGAAIVDNKRTVWASNLPEGTSAQKAELIALTQALRLAEGKSINIYTDSRYAFATAHVHGAIYKQRGWLTSAGKDIKNKEEILALLEAIHLPKRVAIIHCPGHQRGTDPVATGNRKADEAAKQAAQSTRILTETTKNAGKRTADGSEFEKRTADGSEFESPKKKAKVE

SEQ ID NO: 1798 - protein, 2211 aa, synthetic construct
  source 1..2211: note = Description of Artificial Sequence: Synthetic polypeptide
MPAAKRVKLDGGDKKYSIGLDIGTNSVGWAVITDEYKVPSKKFKVLGNTDRHSIKKNLIGALLFDSGETAEATRLKRTARRRYTRRKNRICYLQEIFSNEMAKVDDSFFHRLEESFLVEEDKKHERHPIFGNIVDEVAYHEKYPTIYHLRKKLVDSTDKADLRLIYLALAHMIKFRGHFLIEGDLNPDNSDVDKLFIQLVQTYNQLFEENPINASGVDAKAILSARLSKSRRLENLIAQLPGEKKNGLFGNLIALSLGLTPNFKSNFDLAEDAKLQLSKDTYDDDLDNLLAQIGDQYADLFLAAKNLSDAILLSDILRVNTEITKAPLSASMIKRYDEHHQDLTLLKALVRQQLPEKYKEIFFDQSKNGYAGYIDGGASQEEFYKFIKPILEKMDGTEELLVKLNREDLLRKQRTFDNGSIPHQIHLGELHAILRRQEDFYPFLKDNREKIEKILTFRIPYYVGPLARGNSRFAWMTRKSEETITPWNFEEVVDKGASAQSFIERMTNFDKNLPNEKVLPKHSLLYEYFTVYNELTKVKYVTEGMRKPAFLSGEQKKAIVDLLFKTNRKVTVKQLKEDYFKKIECFDSVEISGVEDRFNASLGTYHDLLKIIKDKDFLDNEENEDILEDIVLTLTLFEDREMIEERLKTYAHLFDDKVMKQLKRRRYTGWGRLSRKLINGIRDKQSGKTILDFLKSDGFANRNFMQLIHDDSLTFKEDIQKAQVSGQGDSLHEHIANLAGSPAIKKGILQTVKVVDELVKVMGRHKPENIVIEMARENQTTQKGQKNSRERMKRIEEGIKELGSQILKEHPVENTQLQNEKLYLYYLQNGRDMYVDQELDINRLSDYDVDHIVPQSFLKDDSIDNKVLTRSDKARGKSDNVPSEEVVKKMKNYWRQLLNAKLITQRKFDNLTKAERGGLSELDKAGFIKRQLVETRQITKHVAQILDSRMNTKYDENDKLIREVKVITLKSKLVSDFRKDFQFYKVREINNYHHAHDAYLNAVVGTALIKKYPKLESEFVYGDYKVYDVRKMIAKSEQEIGKATAKYFFYSNIMNFFKTEITLANGEIRKRPLIETNGETGEIVWDKGRDFATVRKVLSMPQVNIVKKTEVQTGGFSKESILPKRNSDKLIARKKDWDPKKYGGFDSPTVAYSVLVVAKVEKGKSKKLKSVKELLGITIMERSSFEKNPIDFLEAKGYKEVKKDLIIKLPKYSLFELENGRKRMLASAGELQKGNELALPSKYVNFLYLASHYEKLKGSPEDNEQKQLFVEQHKHYLDEIIEQISEFSKRVILADANLDKVLSAYNKHRDKPIREQAENIIHLFTLTNLGAPAAFKYFDTTIDRKRYTSTKEVLDATLIHQSITGLYETRIDLSQLGGDGGGGGGGGTLGDQGSRGSDPLPEPRVTLTVEGIPTEFLVNTGAEHSVLTKPMGKMGSKRTVVAGATGSKVYPWTTKRLLKIGQKQVTHSFLVIPECPAPLLGRDLLTKLKAQIQFSTEGPQVTWEDRPAMCLVLNLEEEYRLHEKPVPPSIDPSWLQLFPMVWAEKAGMGLANQVPPVVVELKSDASPVAVRQYPMSKEAREGIRPHIQRFLDLGILVPCQSPWNTPLLPVKKPGTNDYRPVQDLREVNKRVQDIHPTVPNPYNLLSSLPPSHTWYSVLDLKDAFFCLKLHPNSQPLFAFEWRDPEKGNTGQLTWTRLPQGFKNSPTLFNEALHRDLASFRALNPQVVMLQYVDDLLVAAPTYRDCKEGTRRLLQELSKLGYRVSAKKAQLCREEVTYLGYLLKGGKRWLTPARKATVMKIPTPTTPRQVREFLGKAGFCRLFIPGFASLAAPLYPLTRPKVPFTWTEAHQEAFGRIKEALLSAPALALPDLTKPFALYVDEKEGVARGVLTQTLGPWRRPVAYLSKKLDPVASGWPTCLKAIAAVALLLKDADKLTLGQNVLVIAPHNLESIVRQPPDRWMTNARMTHYQSLLLNERVSFAPPAILNPATLLPVESDDTPIHICSEILAEETGTRPDLRDQPLPGVPAWYTDGSSFIMDGRRQAGAAIVDNKRTVWASNLPEGTSAQKAELIALTQALRLAEGKSINIYTDSRYAFATAHVHGAIYKQRGWLTSAGKDIKNKEEILALLEAIHLPKRVAIIHCPGHQRGTDPVATGNRKADEAAKQAAQSTRILTETTKNAGKRTADGSEFEKRTADGSEFESPKKKAKVE

SEQ ID NO: 1799 - protein, 2215 aa, synthetic construct
  source 1..2215: note = Description of Artificial Sequence: Synthetic polypeptide
MPAAKRVKLDGGDKKYSIGLDIGTNSVGWAVITDEYKVPSKKFKVLGNTDRHSIKKNLIGALLFDSGETAEATRLKRTARRRYTRRKNRICYLQEIFSNEMAKVDDSFFHRLEESFLVEEDKKHERHPIFGNIVDEVAYHEKYPTIYHLRKKLVDSTDKADLRLIYLALAHMIKFRGHFLIEGDLNPDNSDVDKLFIQLVQTYNQLFEENPINASGVDAKAILSARLSKSRRLENLIAQLPGEKKNGLFGNLIALSLGLTPNFKSNFDLAEDAKLQLSKDTYDDDLDNLLAQIGDQYADLFLAAKNLSDAILLSDILRVNTEITKAPLSASMIKRYDEHHQDLTLLKALVRQQLPEKYKEIFFDQSKNGYAGYIDGGASQEEFYKFIKPILEKMDGTEELLVKLNREDLLRKQRTFDNGSIPHQIHLGELHAILRRQEDFYPFLKDNREKIEKILTFRIPYYVGPLARGNSRFAWMTRKSEETITPWNFEEVVDKGASAQSFIERMTNFDKNLPNEKVLPKHSLLYEYFTVYNELTKVKYVTEGMRKPAFLSGEQKKAIVDLLFKTNRKVTVKQLKEDYFKKIECFDSVEISGVEDRFNASLGTYHDLLKIIKDKDFLDNEENEDILEDIVLTLTLFEDREMIEERLKTYAHLFDDKVMKQLKRRRYTGWGRLSRKLINGIRDKQSGKTILDFLKSDGFANRNFMQLIHDDSLTFKEDIQKAQVSGQGDSLHEHIANLAGSPAIKKGILQTVKVVDELVKVMGRHKPENIVIEMARENQTTQKGQKNSRERMKRIEEGIKELGSQILKEHPVENTQLQNEKLYLYYLQNGRDMYVDQELDINRLSDYDVDHIVPQSFLKDDSIDNKVLTRSDKARGKSDNVPSEEVVKKMKNYWRQLLNAKLITQRKFDNLTKAERGGLSELDKAGFIKRQLVETRQITKHVAQILDSRMNTKYDENDKLIREVKVITLKSKLVSDFRKDFQFYKVREINNYHHAHDAYLNAVVGTALIKKYPKLESEFVYGDYKVYDVRKMIAKSEQEIGKATAKYFFYSNIMNFFKTEITLANGEIRKRPLIETNGETGEIVWDKGRDFATVRKVLSMPQVNIVKKTEVQTGGFSKESILPKRNSDKLIARKKDWDPKKYGGFDSPTVAYSVLVVAKVEKGKSKKLKSVKELLGITIMERSSFEKNPIDFLEAKGYKEVKKDLIIKLPKYSLFELENGRKRMLASAGELQKGNELALPSKYVNFLYLASHYEKLKGSPEDNEQKQLFVEQHKHYLDEIIEQISEFSKRVILADANLDKVLSAYNKHRDKPIREQAENIIHLFTLTNLGAPAAFKYFDTTIDRKRYTSTKEVLDATLIHQSITGLYETRIDLSQLGGDGGGGGGGGGGGGTLGDQGSRGSDPLPEPRVTLTVEGIPTEFLVNTGAEHSVLTKPMGKMGSKRTVVAGATGSKVYPWTTKRLLKIGQKQVTHSFLVIPECPAPLLGRDLLTKLKAQIQFSTEGPQVTWEDRPAMCLVLNLEEEYRLHEKPVPPSIDPSWLQLFPMVWAEKAGMGLANQVPPVVVELKSDASPVAVRQYPMSKEAREGIRPHIQRFLDLGILVPCQSPWNTPLLPVKKPGTNDYRPVQDLREVNKRVQDIHPTVPNPYNLLSSLPPSHTWYSVLDLKDAFFCLKLHPNSQPLFAFEWRDPEKGNTGQLTWTRLPQGFKNSPTLFNEALHRDLASFRALNPQVVMLQYVDDLLVAAPTYRDCKEGTRRLLQELSKLGYRVSAKKAQLCREEVTYLGYLLKGGKRWLTPARKATVMKIPTPTTPRQVREFLGKAGFCRLFIPGFASLAAPLYPLTRPKVPFTWTEAHQEAFGRIKEALLSAPALALPDLTKPFALYVDEKEGVARGVLTQTLGPWRRPVAYLSKKLDPVASGWPTCLKAIAAVALLLKDADKLTLGQNVLVIAPHNLESIVRQPPDRWMTNARMTHYQSLLLNERVSFAPPAILNPATLLPVESDDTPIHICSEILAEETGTRPDLRDQPLPGVPAWYTDGSSFIMDGRRQAGAAIVDNKRTVWASNLPEGTSAQKAELIALTQALRLAEGKSINIYTDSRYAFATAHVHGAIYKQRGWLTSAGKDIKNKEEILALLEAIHLPKRVAIIHCPGHQRGTDPVATGNRKADEAAKQAAQSTRILTETTKNAGKRTADGSEFEKRTADGSEFESPKKKAKVE

SEQ ID NO: 1800 - protein, 2223 aa, synthetic construct
  source 1..2223: note = Description of Artificial Sequence: Synthetic polypeptide
MPAAKRVKLDGGDKKYSIGLDIGTNSVGWAVITDEYKVPSKKFKVLGNTDRHSIKKNLIGALLFDSGETAEATRLKRTARRRYTRRKNRICYLQEIFSNEMAKVDDSFFHRLEESFLVEEDKKHERHPIFGNIVDEVAYHEKYPTIYHLRKKLVDSTDKADLRLIYLALAHMIKFRGHFLIEGDLNPDNSDVDKLFIQLVQTYNQLFEENPINASGVDAKAILSARLSKSRRLENLIAQLPGEKKNGLFGNLIALSLGLTPNFKSNFDLAEDAKLQLSKDTYDDDLDNLLAQIGDQYADLFLAAKNLSDAILLSDILRVNTEITKAPLSASMIKRYDEHHQDLTLLKALVRQQLPEKYKEIFFDQSKNGYAGYIDGGASQEEFYKFIKPILEKMDGTEELLVKLNREDLLRKQRTFDNGSIPHQIHLGELHAILRRQEDFYPFLKDNREKIEKILTFRIPYYVGPLARGNSRFAWMTRKSEETITPWNFEEVVDKGASAQSFIERMTNFDKNLPNEKVLPKHSLLYEYFTVYNELTKVKYVTEGMRKPAFLSGEQKKAIVDLLFKTNRKVTVKQLKEDYFKKIECFDSVEISGVEDRFNASLGTYHDLLKIIKDKDFLDNEENEDILEDIVLTLTLFEDREMIEERLKTYAHLFDDKVMKQLKRRRYTGWGRLSRKLINGIRDKQSGKTILDFLKSDGFANRNFMQLIHDDSLTFKEDIQKAQVSGQGDSLHEHIANLAGSPAIKKGILQTVKVVDELVKVMGRHKPENIVIEMARENQTTQKGQKNSRERMKRIEEGIKELGSQILKEHPVENTQLQNEKLYLYYLQNGRDMYVDQELDINRLSDYDVDHIVPQSFLKDDSIDNKVLTRSDKARGKSDNVPSEEVVKKMKNYWRQLLNAKLITQRKFDNLTKAERGGLSELDKAGFIKRQLVETRQITKHVAQILDSRMNTKYDENDKLIREVKVITLKSKLVSDFRKDFQFYKVREINNYHHAHDAYLNAVVGTALIKKYPKLESEFVYGDYKVYDVRKMIAKSEQEIGKATAKYFFYSNIMNFFKTEITLANGEIRKRPLIETNGETGEIVWDKGRDFATVRKVLSMPQVNIVKKTEVQTGGFSKESILPKRNSDKLIARKKDWDPKKYGGFDSPTVAYSVLVVAKVEKGKSKKLKSVKELLGITIMERSSFEKNPIDFLEAKGYKEVKKDLIIKLPKYSLFELENGRKRMLASAGELQKGNELALPSKYVNFLYLASHYEKLKGSPEDNEQKQLFVEQHKHYLDEIIEQISEFSKRVILADANLDKVLSAYNKHRDKPIREQAENIIHLFTLTNLGAPAAFKYFDTTIDRKRYTSTKEVLDATLIHQSITGLYETRIDLSQLGGDGGSGSETPGTSESATPESGGTLGDQGSRGSDPLPEPRVTLTVEGIPTEFLVNTGAEHSVLTKPMGKMGSKRTVVAGATGSKVYPWTTKRLLKIGQKQVTHSFLVIPECPAPLLGRDLLTKLKAQIQFSTEGPQVTWEDRPAMCLVLNLEEEYRLHEKPVPPSIDPSWLQLFPMVWAEKAGMGLANQVPPVVVELKSDASPVAVRQYPMSKEAREGIRPHIQRFLDLGILVPCQSPWNTPLLPVKKPGTNDYRPVQDLREVNKRVQDIHPTVPNPYNLLSSLPPSHTWYSVLDLKDAFFCLKLHPNSQPLFAFEWRDPEKGNTGQLTWTRLPQGFKNSPTLFNEALHRDLASFRALNPQVVMLQYVDDLLVAAPTYRDCKEGTRRLLQELSKLGYRVSAKKAQLCREEVTYLGYLLKGGKRWLTPARKATVMKIPTPTTPRQVREFLGKAGFCRLFIPGFASLAAPLYPLTRPKVPFTWTEAHQEAFGRIKEALLSAPALALPDLTKPFALYVDEKEGVARGVLTQTLGPWRRPVAYLSKKLDPVASGWPTCLKAIAAVALLLKDADKLTLGQNVLVIAPHNLESIVRQPPDRWMTNARMTHYQSLLLNERVSFAPPAILNPATLLPVESDDTPIHICSEILAEETGTRPDLRDQPLPGVPAWYTDGSSFIMDGRRQAGAAIVDNKRTVWASNLPEGTSAQKAELIALTQALRLAEGKSINIYTDSRYAFATAHVHGAIYKQRGWLTSAGKDIKNKEEILALLEAIHLPKRVAIIHCPGHQRGTDPVATGNRKADEAAKQAAQSTRILTETTKNAGKRTADGSEFEKRTADGSEFESPKKKAKVE

SEQ ID NO: 1801 - protein, 2218 aa, synthetic construct
  source 1..2218: note = Description of Artificial Sequence: Synthetic polypeptide
MPAAKRVKLDGGDKKYSIGLDIGTNSVGWAVITDEYKVPSKKFKVLGNTDRHSIKKNLIGALLFDSGETAEATRLKRTARRRYTRRKNRICYLQEIFSNEMAKVDDSFFHRLEESFLVEEDKKHERHPIFGNIVDEVAYHEKYPTIYHLRKKLVDSTDKADLRLIYLALAHMIKFRGHFLIEGDLNPDNSDVDKLFIQLVQTYNQLFEENPINASGVDAKAILSARLSKSRRLENLIAQLPGEKKNGLFGNLIALSLGLTPNFKSNFDLAEDAKLQLSKDTYDDDLDNLLAQIGDQYADLFLAAKNLSDAILLSDILRVNTEITKAPLSASMIKRYDEHHQDLTLLKALVRQQLPEKYKEIFFDQSKNGYAGYIDGGASQEEFYKFIKPILEKMDGTEELLVKLNREDLLRKQRTFDNGSIPHQIHLGELHAILRRQEDFYPFLKDNREKIEKILTFRIPYYVGPLARGNSRFAWMTRKSEETITPWNFEEVVDKGASAQSFIERMTNFDKNLPNEKVLPKHSLLYEYFTVYNELTKVKYVTEGMRKPAFLSGEQKKAIVDLLFKTNRKVTVKQLKEDYFKKIECFDSVEISGVEDRFNASLGTYHDLLKIIKDKDFLDNEENEDILEDIVLTLTLFEDREMIEERLKTYAHLFDDKVMKQLKRRRYTGWGRLSRKLINGIRDKQSGKTILDFLKSDGFANRNFMQLIHDDSLTFKEDIQKAQVSGQGDSLHEHIANLAGSPAIKKGILQTVKVVDELVKVMGRHKPENIVIEMARENQTTQKGQKNSRERMKRIEEGIKELGSQILKEHPVENTQLQNEKLYLYYLQNGRDMYVDQELDINRLSDYDVDHIVPQSFLKDDSIDNKVLTRSDKARGKSDNVPSEEVVKKMKNYWRQLLNAKLITQRKFDNLTKAERGGLSELDKAGFIKRQLVETRQITKHVAQILDSRMNTKYDENDKLIREVKVITLKSKLVSDFRKDFQFYKVREINNYHHAHDAYLNAVVGTALIKKYPKLESEFVYGDYKVYDVRKMIAKSEQEIGKATAKYFFYSNIMNFFKTEITLANGEIRKRPLIETNGETGEIVWDKGRDFATVRKVLSMPQVNIVKKTEVQTGGFSKESILPKRNSDKLIARKKDWDPKKYGGFDSPTVAYSVLVVAKVEKGKSKKLKSVKELLGITIMERSSFEKNPIDFLEAKGYKEVKKDLIIKLPKYSLFELENGRKRMLASAGELQKGNELALPSKYVNFLYLASHYEKLKGSPEDNEQKQLFVEQHKHYLDEIIEQISEFSKRVILADANLDKVLSAYNKHRDKPIREQAENIIHLFTLTNLGAPAAFKYFDTTIDRKRYTSTKEVLDATLIHQSITGLYETRIDLSQLGGDGGGSSGGSEAAAKGGTLGDQGSRGSDPLPEPRVTLTVEGIPTEFLVNTGAEHSVLTKPMGKMGSKRTVVAGATGSKVYPWTTKRLLKIGQKQVTHSFLVIPECPAPLLGRDLLTKLKAQIQFSTEGPQVTWEDRPAMCLVLNLEEEYRLHEKPVPPSIDPSWLQLFPMVWAEKAGMGLANQVPPVVVELKSDASPVAVRQYPMSKEAREGIRPHIQRFLDLGILVPCQSPWNTPLLPVKKPGTNDYRPVQDLREVNKRVQDIHPTVPNPYNLLSSLPPSHTWYSVLDLKDAFFCLKLHPNSQPLFAFEWRDPEKGNTGQLTWTRLPQGFKNSPTLFNEALHRDLASFRALNPQVVMLQYVDDLLVAAPTYRDCKEGTRRLLQELSKLGYRVSAKKAQLCREEVTYLGYLLKGGKRWLTPARKATVMKIPTPTTPRQVREFLGKAGFCRLFIPGFASLAAPLYPLTRPKVPFTWTEAHQEAFGRIKEALLSAPALALPDLTKPFALYVDEKEGVARGVLTQTLGPWRRPVAYLSKKLDPVASGWPTCLKAIAAVALLLKDADKLTLGQNVLVIAPHNLESIVRQPPDRWMTNARMTHYQSLLLNERVSFAPPAILNPATLLPVESDDTPIHICSEILAEETGTRPDLRDQPLPGVPAWYTDGSSFIMDGRRQAGAAIVDNKRTVWASNLPEGTSAQKAELIALTQALRLAEGKSINIYTDSRYAFATAHVHGAIYKQRGWLTSAGKDIKNKEEILALLEAIHLPKRVAIIHCPGHQRGTDPVATGNRKADEAAKQAAQSTRILTETTKNAGKRTADGSEFEKRTADGSEFESPKKKAKVE

SEQ ID NO: 1802 - protein, 2216 aa, synthetic construct
  source 1..2216: note = Description of Artificial Sequence: Synthetic polypeptide
MPAAKRVKLDGGDKKYSIGLDIGTNSVGWAVITDEYKVPSKKFKVLGNTDRHSIKKNLIGALLFDSGETAEATRLKRTARRRYTRRKNRICYLQEIFSNEMAKVDDSFFHRLEESFLVEEDKKHERHPIFGNIVDEVAYHEKYPTIYHLRKKLVDSTDKADLRLIYLALAHMIKFRGHFLIEGDLNPDNSDVDKLFIQLVQTYNQLFEENPINASGVDAKAILSARLSKSRRLENLIAQLPGEKKNGLFGNLIALSLGLTPNFKSNFDLAEDAKLQLSKDTYDDDLDNLLAQIGDQYADLFLAAKNLSDAILLSDILRVNTEITKAPLSASMIKRYDEHHQDLTLLKALVRQQLPEKYKEIFFDQSKNGYAGYIDGGASQEEFYKFIKPILEKMDGTEELLVKLNREDLLRKQRTFDNGSIPHQIHLGELHAILRRQEDFYPFLKDNREKIEKILTFRIPYYVGPLARGNSRFAWMTRKSEETITPWNFEEVVDKGASAQSFIERMTNFDKNLPNEKVLPKHSLLYEYFTVYNELTKVKYVTEGMRKPAFLSGEQKKAIVDLLFKTNRKVTVKQLKEDYFKKIECFDSVEISGVEDRFNASLGTYHDLLKIIKDKDFLDNEENEDILEDIVLTLTLFEDREMIEERLKTYAHLFDDKVMKQLKRRRYTGWGRLSRKLINGIRDKQSGKTILDFLKSDGFANRNFMQLIHDDSLTFKEDIQKAQVSGQGDSLHEHIANLAGSPAIKKGILQTVKVVDELVKVMGRHKPENIVIEMARENQTTQKGQKNSRERMKRIEEGIKELGSQILKEHPVENTQLQNEKLYLYYLQNGRDMYVDQELDINRLSDYDVDHIVPQSFLKDDSIDNKVLTRSDKARGKSDNVPSEEVVKKMKNYWRQLLNAKLITQRKFDNLTKAERGGLSELDKAGFIKRQLVETRQITKHVAQILDSRMNTKYDENDKLIREVKVITLKSKLVSDFRKDFQFYKVREINNYHHAHDAYLNAVVGTALIKKYPKLESEFVYGDYKVYDVRKMIAKSEQEIGKATAKYFFYSNIMNFFKTEITLANGEIRKRPLIETNGETGEIVWDKGRDFATVRKVLSMPQVNIVKKTEVQTGGFSKESILPKRNSDKLIARKKDWDPKKYGGFDSPTVAYSVLVVAKVEKGKSKKLKSVKELLGITIMERSSFEKNPIDFLEAKGYKEVKKDLIIKLPKYSLFELENGRKRMLASAGELQKGNELALPSKYVNFLYLASHYEKLKGSPEDNEQKQLFVEQHKHYLDEIIEQISEFSKRVILADANLDKVLSAYNKHRDKPIREQAENIIHLFTLTNLGAPAAFKYFDTTIDRKRYTSTKEVLDATLIHQSITGLYETRIDLSQLGGDGGGGSPAPGSSGGTLGDQGSRGSDPLPEPRVTLTVEGIPTEFLVNTGAEHSVLTKPMGKMGSKRTVVAGATGSKVYPWTTKRLLKIGQKQVTHSFLVIPECPAPLLGRDLLTKLKAQIQFSTEGPQVTWEDRPAMCLVLNLEEEYRLHEKPVPPSIDPSWLQLFPMVWAEKAGMGLANQVPPVVVELKSDASPVAVRQYPMSKEAREGIRPHIQRFLDLGILVPCQSPWNTPLLPVKKPGTNDYRPVQDLREVNKRVQDIHPTVPNPYNLLSSLPPSHTWYSVLDLKDAFFCLKLHPNSQPLFAFEWRDPEKGNTGQLTWTRLPQGFKNSPTLFNEALHRDLASFRALNPQVVMLQYVDDLLVAAPTYRDCKEGTRRLLQELSKLGYRVSAKKAQLCREEVTYLGYLLKGGKRWLTPARKATVMKIPTPTTPRQVREFLGKAGFCRLFIPGFASLAAPLYPLTRPKVPFTWTEAHQEAFGRIKEALLSAPALALPDLTKPFALYVDEKEGVARGVLTQTLGPWRRPVAYLSKKLDPVASGWPTCLKAIAAVALLLKDADKLTLGQNVLVIAPHNLESIVRQPPDRWMTNARMTHYQSLLLNERVSFAPPAILNPATLLPVESDDTPIHICSEILAEETGTRPDLRDQPLPGVPAWYTDGSSFIMDGRRQAGAAIVDNKRTVWASNLPEGTSAQKAELIALTQALRLAEGKSINIYTDSRYAFATAHVHGAIYKQRGWLTSAGKDIKNKEEILALLEAIHLPKRVAIIHCPGHQRGTDPVATGNRKADEAAKQAAQSTRILTETTKNAGKRTADGSEFEKRTADGSEFESPKKKAKVE

SEQ ID NO: 1803 - protein, 2237 aa, synthetic construct
  source 1..2237: note = Description of Artificial Sequence: Synthetic polypeptide
MPAAKRVKLDGGDKKYSIGLDIGTNSVGWAVITDEYKVPSKKFKVLGNTDRHSIKKNLIGALLFDSGETAEATRLKRTARRRYTRRKNRICYLQEIFSNEMAKVDDSFFHRLEESFLVEEDKKHERHPIFGNIVDEVAYHEKYPTIYHLRKKLVDSTDKADLRLIYLALAHMIKFRGHFLIEGDLNPDNSDVDKLFIQLVQTYNQLFEENPINASGVDAKAILSARLSKSRRLENLIAQLPGEKKNGLFGNLIALSLGLTPNFKSNFDLAEDAKLQLSKDTYDDDLDNLLAQIGDQYADLFLAAKNLSDAILLSDILRVNTEITKAPLSASMIKRYDEHHQDLTLLKALVRQQLPEKYKEIFFDQSKNGYAGYIDGGASQEEFYKFIKPILEKMDGTEELLVKLNREDLLRKQRTFDNGSIPHQIHLGELHAILRRQEDFYPFLKDNREKIEKILTFRIPYYVGPLARGNSRFAWMTRKSEETITPWNFEEVVDKGASAQSFIERMTNFDKNLPNEKVLPKHSLLYEYFTVYNELTKVKYVTEGMRKPAFLSGEQKKAIVDLLFKTNRKVTVKQLKEDYFKKIECFDSVEISGVEDRFNASLGTYHDLLKIIKDKDFLDNEENEDILEDIVLTLTLFEDREMIEERLKTYAHLFDDKVMKQLKRRRYTGWGRLSRKLINGIRDKQSGKTILDFLKSDGFANRNFMQLIHDDSLTFKEDIQKAQVSGQGDSLHEHIANLAGSPAIKKGILQTVKVVDELVKVMGRHKPENIVIEMARENQTTQKGQKNSRERMKRIEEGIKELGSQILKEHPVENTQLQNEKLYLYYLQNGRDMYVDQELDINRLSDYDVDHIVPQSFLKDDSIDNKVLTRSDKARGKSDNVPSEEVVKKMKNYWRQLLNAKLITQRKFDNLTKAERGGLSELDKAGFIKRQLVETRQITKHVAQILDSRMNTKYDENDKLIREVKVITLKSKLVSDFRKDFQFYKVREINNYHHAHDAYLNAVVGTALIKKYPKLESEFVYGDYKVYDVRKMIAKSEQEIGKATAKYFFYSNIMNFFKTEITLANGEIRKRPLIETNGETGEIVWDKGRDFATVRKVLSMPQVNIVKKTEVQTGGFSKESILPKRNSDKLIARKKDWDPKKYGGFDSPTVAYSVLVVAKVEKGKSKKLKSVKELLGITIMERSSFEKNPIDFLEAKGYKEVKKDLIIKLPKYSLFELENGRKRMLASAGELQKGNELALPSKYVNFLYLASHYEKLKGSPEDNEQKQLFVEQHKHYLDEIIEQISEFSKRVILADANLDKVLSAYNKHRDKPIREQAENIIHLFTLTNLGAPAAFKYFDTTIDRKRYTSTKEVLDATLIHQSITGLYETRIDLSQLGGDGGGGGGSGGGGSGGGGSGGGGSGGGGSGGGGSGGTLGDQGSRGSDPLPEPRVTLTVEGIPTEFLVNTGAEHSVLTKPMGKMGSKRTVVAGATGSKVYPWTTKRLLKIGQKQVTHSFLVIPECPAPLLGRDLLTKLKAQIQFSTEGPQVTWEDRPAMCLVLNLEEEYRLHEKPVPPSIDPSWLQLFPMVWAEKAGMGLANQVPPVVVELKSDASPVAVRQYPMSKEAREGIRPHIQRFLDLGILVPCQSPWNTPLLPVKKPGTNDYRPVQDLREVNKRVQDIHPTVPNPYNLLSSLPPSHTWYSVLDLKDAFFCLKLHPNSQPLFAFEWRDPEKGNTGQLTWTRLPQGFKNSPTLFNEALHRDLASFRALNPQVVMLQYVDDLLVAAPTYRDCKEGTRRLLQELSKLGYRVSAKKAQLCREEVTYLGYLLKGGKRWLTPARKATVMKIPTPTTPRQVREFLGKAGFCRLFIPGFASLAAPLYPLTRPKVPFTWTEAHQEAFGRIKEALLSAPALALPDLTKPFALYVDEKEGVARGVLTQTLGPWRRPVAYLSKKLDPVASGWPTCLKAIAAVALLLKDADKLTLGQNVLVIAPHNLESIVRQPPDRWMTNARMTHYQSLLLNERVSFAPPAILNPATLLPVESDDTPIHICSEILAEETGTRPDLRDQPLPGVPAWYTDGSSFIMDGRRQAGAAIVDNKRTVWASNLPEGTSAQKAELIALTQALRLAEGKSINIYTDSRYAFATAHVHGAIYKQRGWLTSAGKDIKNKEEILALLEAIHLPKRVAIIHCPGHQRGTDPVATGNRKADEAAKQAAQSTRILTETTKNAGKRTADGSEFEKRTADGSEFESPKKKAKVE

SEQ ID NO: 1804 - protein, 2218 aa, synthetic construct
  source 1..2218: note = Description of Artificial Sequence: Synthetic polypeptide
MPAAKRVKLDGGDKKYSIGLDIGTNSVGWAVITDEYKVPSKKFKVLGNTDRHSIKKNLIGALLFDSGETAEATRLKRTARRRYTRRKNRICYLQEIFSNEMAKVDDSFFHRLEESFLVEEDKKHERHPIFGNIVDEVAYHEKYPTIYHLRKKLVDSTDKADLRLIYLALAHMIKFRGHFLIEGDLNPDNSDVDKLFIQLVQTYNQLFEENPINASGVDAKAILSARLSKSRRLENLIAQLPGEKKNGLFGNLIALSLGLTPNFKSNFDLAEDAKLQLSKDTYDDDLDNLLAQIGDQYADLFLAAKNLSDAILLSDILRVNTEITKAPLSASMIKRYDEHHQDLTLLKALVRQQLPEKYKEIFFDQSKNGYAGYIDGGASQEEFYKFIKPILEKMDGTEELLVKLNREDLLRKQRTFDNGSIPHQIHLGELHAILRRQEDFYPFLKDNREKIEKILTFRIPYYVGPLARGNSRFAWMTRKSEETITPWNFEEVVDKGASAQSFIERMTNFDKNLPNEKVLPKHSLLYEYFTVYNELTKVKYVTEGMRKPAFLSGEQKKAIVDLLFKTNRKVTVKQLKEDYFKKIECFDSVEISGVEDRFNASLGTYHDLLKIIKDKDFLDNEENEDILEDIVLTLTLFEDREMIEERLKTYAHLFDDKVMKQLKRRRYTGWGRLSRKLINGIRDKQSGKTILDFLKSDGFANRNFMQLIHDDSLTFKEDIQKAQVSGQGDSLHEHIANLAGSPAIKKGILQTVKVVDELVKVMGRHKPENIVIEMARENQTTQKGQKNSRERMKRIEEGIKELGSQILKEHPVENTQLQNEKLYLYYLQNGRDMYVDQELDINRLSDYDVDHIVPQSFLKDDSIDNKVLTRSDKARGKSDNVPSEEVVKKMKNYWRQLLNAKLITQRKFDNLTKAERGGLSELDKAGFIKRQLVETRQITKHVAQILDSRMNTKYDENDKLIREVKVITLKSKLVSDFRKDFQFYKVREINNYHHAHDAYLNAVVGTALIKKYPKLESEFVYGDYKVYDVRKMIAKSEQEIGKATAKYFFYSNIMNFFKTEITLANGEIRKRPLIETNGETGEIVWDKGRDFATVRKVLSMPQVNIVKKTEVQTGGFSKESILPKRNSDKLIARKKDWDPKKYGGFDSPTVAYSVLVVAKVEKGKSKKLKSVKELLGITIMERSSFEKNPIDFLEAKGYKEVKKDLIIKLPKYSLFELENGRKRMLASAGELQKGNELALPSKYVNFLYLASHYEKLKGSPEDNEQKQLFVEQHKHYLDEIIEQISEFSKRVILADANLDKVLSAYNKHRDKPIREQAENIIHLFTLTNLGAPAAFKYFDTTIDRKRYTSTKEVLDATLIHQSITGLYETRIDLSQLGGDGGEAAAKGSSPAPGGTLGDQGSRGSDPLPEPRVTLTVEGIPTEFLVNTGAEHSVLTKPMGKMGSKRTVVAGATGSKVYPWTTKRLLKIGQKQVTHSFLVIPECPAPLLGRDLLTKLKAQIQFSTEGPQVTWEDRPAMCLVLNLEEEYRLHEKPVPPSIDPSWLQLFPMVWAEKAGMGLANQVPPVVVELKSDASPVAVRQYPMSKEAREGIRPHIQRFLDLGILVPCQSPWNTPLLPVKKPGTNDYRPVQDLREVNKRVQDIHPTVPNPYNLLSSLPPSHTWYSVLDLKDAFFCLKLHPNSQPLFAFEWRDPEKGNTGQLTWTRLPQGFKNSPTLFNEALHRDLASFRALNPQVVMLQYVDDLLVAAPTYRDCKEGTRRLLQELSKLGYRVSAKKAQLCREEVTYLGYLLKGGKRWLTPARKATVMKIPTPTTPRQVREFLGKAGFCRLFIPGFASLAAPLYPLTRPKVPFTWTEAHQEAFGRIKEALLSAPALALPDLTKPFALYVDEKEGVARGVLTQTLGPWRRPVAYLSKKLDPVASGWPTCLKAIAAVALLLKDADKLTLGQNVLVIAPHNLESIVRQPPDRWMTNARMTHYQSLLLNERVSFAPPAILNPATLLPVESDDTPIHICSEILAEETGTRPDLRDQPLPGVPAWYTDGSSFIMDGRRQAGAAIVDNKRTVWASNLPEGTSAQKAELIALTQALRLAEGKSINIYTDSRYAFATAHVHGAIYKQRGWLTSAGKDIKNKEEILALLEAIHLPKRVAIIHCPGHQRGTDPVATGNRKADEAAKQAAQSTRILTETTKNAGKRTADGSEFEKRTADGSEFESPKKKAKVE

SEQ ID NO: 1805 - protein, 2218 aa, synthetic construct
  source 1..2218: note = Description of Artificial Sequence: Synthetic polypeptide
MPAAKRVKLDGGDKKYSIGLDIGTNSVGWAVITDEYKVPSKKFKVLGNTDRHSIKKNLIGALLFDSGETAEATRLKRTARRRYTRRKNRICYLQEIFSNEMAKVDDSFFHRLEESFLVEEDKKHERHPIFGNIVDEVAYHEKYPTIYHLRKKLVDSTDKADLRLIYLALAHMIKFRGHFLIEGDLNPDNSDVDKLFIQLVQTYNQLFEENPINASGVDAKAILSARLSKSRRLENLIAQLPGEKKNGLFGNLIALSLGLTPNFKSNFDLAEDAKLQLSKDTYDDDLDNLLAQIGDQYADLFLAAKNLSDAILLSDILRVNTEITKAPLSASMIKRYDEHHQDLTLLKALVRQQLPEKYKEIFFDQSKNGYAGYIDGGASQEEFYKFIKPILEKMDGTEELLVKLNREDLLRKQRTFDNGSIPHQIHLGELHAILRRQEDFYPFLKDNREKIEKILTFRIPYYVGPLARGNSRFAWMTRKSEETITPWNFEEVVDKGASAQSFIERMTNFDKNLPNEKVLPKHSLLYEYFTVYNELTKVKYVTEGMRKPAFLSGEQKKAIVDLLFKTNRKVTVKQLKEDYFKKIECFDSVEISGVEDRFNASLGTYHDLLKIIKDKDFLDNEENEDILEDIVLTLTLFEDREMIEERLKTYAHLFDDKVMKQLKRRRYTGWGRLSRKLINGIRDKQSGKTILDFLKSDGFANRNFMQLIHDDSLTFKEDIQKAQVSGQGDSLHEHIANLAGSPAIKKGILQTVKVVDELVKVMGRHKPENIVIEMARENQTTQKGQKNSRERMKRIEEGIKELGSQILKEHPVENTQLQNEKLYLYYLQNGRDMYVDQELDINRLSDYDVDHIVPQSFLKDDSIDNKVLTRSDKARGKSDNVPSEEVVKKMKNYWRQLLNAKLITQRKFDNLTKAERGGLSELDKAGFIKRQLVETRQITKHVAQILDSRMNTKYDENDKLIREVKVITLKSKLVSDFRKDFQFYKVREINNYHHAHDAYLNAVVGTALIKKYPKLESEFVYGDYKVYDVRKMIAKSEQEIGKATAKYFFYSNIMNFFKTEITLANGEIRKRPLIETNGETGEIVWDKGRDFATVRKVLSMPQVNIVKKTEVQTGGFSKESILPKRNSDKLIARKKDWDPKKYGGFDSPTVAYSVLVVAKVEKGKSKKLKSVKELLGITIMERSSFEKNPIDFLEAKGYKEVKKDLIIKLPKYSLFELENGRKRMLASAGELQKGNELALPSKYVNFLYLASHYEKLKGSPEDNEQKQLFVEQHKHYLDEIIEQISEFSKRVILADANLDKVLSAYNKHRDKPIREQAENIIHLFTLTNLGAPAAFKYFDTTIDRKRYTSTKEVLDATLIHQSITGLYETRIDLSQLGGDGGGGSGSSEAAAKGGTLGDQGSRGSDPLPEPRVTLTVEGIPTEFLVNTGAEHSVLTKPMGKMGSKRTVVAGATGSKVYPWTTKRLLKIGQKQVTHSFLVIPECPAPLLGRDLLTKLKAQIQFSTEGPQVTWEDRPAMCLVLNLEEEYRLHEKPVPPSIDPSWLQLFPMVWAEKAGMGLANQVPPVVVELKSDASPVAVRQYPMSKEAREGIRPHIQRFLDLGILVPCQSPWNTPLLPVKKPGTNDYRPVQDLREVNKRVQDIHPTVPNPYNLLSSLPPSHTWYSVLDLKDAFFCLKLHPNSQPLFAFEWRDPEKGNTGQLTWTRLPQGFKNSPTLFNEALHRDLASFRALNPQVVMLQYVDDLLVAAPTYRDCKEGTRRLLQELSKLGYRVSAKKAQLCREEVTYLGYLLKGGKRWLTPARKATVMKIPTPTTPRQVREFLGKAGFCRLFIPGFASLAAPLYPLTRPKVPFTWTEAHQEAFGRIKEALLSAPALALPDLTKPFALYVDEKEGVARGVLTQTLGPWRRPVAYLSKKLDPVASGWPTCLKAIAAVALLLKDADKLTLGQNVLVIAPHNLESIVRQPPDRWMTNARMTHYQSLLLNERVSFAPPAILNPATLLPVESDDTPIHICSEILAEETGTRPDLRDQPLPGVPAWYTDGSSFIMDGRRQAGAAIVDNKRTVWASNLPEGTSAQKAELIALTQALRLAEGKSINIYTDSRYAFATAHVHGAIYKQRGWLTSAGKDIKNKEEILALLEAIHLPKRVAIIHCPGHQRGTDPVATGNRKADEAAKQAAQSTRILTETTKNAGKRTADGSEFEKRTADGSEFESPKKKAKVE

SEQ ID NO: 1806 - protein, 2216 aa, synthetic construct
  source 1..2216: note = Description of Artificial Sequence: Synthetic polypeptide
MPAAKRVKLDGGDKKYSIGLDIGTNSVGWAVITDEYKVPSKKFKVLGNTDRHSIKKNLIGALLFDSGETAEATRLKRTARRRYTRRKNRICYLQEIFSNEMAKVDDSFFHRLEESFLVEEDKKHERHPIFGNIVDEVAYHEKYPTIYHLRKKLVDSTDKADLRLIYLALAHMIKFRGHFLIEGDLNPDNSDVDKLFIQLVQTYNQLFEENPINASGVDAKAILSARLSKSRRLENLIAQLPGEKKNGLFGNLIALSLGLTPNFKSNFDLAEDAKLQLSKDTYDDDLDNLLAQIGDQYADLFLAAKNLSDAILLSDILRVNTEITKAPLSASMIKRYDEHHQDLTLLKALVRQQLPEKYKEIFFDQSKNGYAGYIDGGASQEEFYKFIKPILEKMDGTEELLVKLNREDLLRKQRTFDNGSIPHQIHLGELHAILRRQEDFYPFLKDNREKIEKILTFRIPYYVGPLARGNSRFAWMTRKSEETITPWNFEEVVDKGASAQSFIERMTNFDKNLPNEKVLPKHSLLYEYFTVYNELTKVKYVTEGMRKPAFLSGEQKKAIVDLLFKTNRKVTVKQLKEDYFKKIECFDSVEISGVEDRFNASLGTYHDLLKIIKDKDFLDNEENEDILEDIVLTLTLFEDREMIEERLKTYAHLFDDKVMKQLKRRRYTGWGRLSRKLINGIRDKQSGKTILDFLKSDGFANRNFMQLIHDDSLTFKEDIQKAQVSGQGDSLHEHIANLAGSPAIKKGILQTVKVVDELVKVMGRHKPENIVIEMARENQTTQKGQKNSRERMKRIEEGIKELGSQILKEHPVENTQLQNEKLYLYYLQNGRDMYVDQELDINRLSDYDVDHIVPQSFLKDDSIDNKVLTRSDKARGKSDNVPSEEVVKKMKNYWRQLLNAKLITQRKFDNLTKAERGGLSELDKAGFIKRQLVETRQITKHVAQILDSRMNTKYDENDKLIREVKVITLKSKLVSDFRKDFQFYKVREINNYHHAHDAYLNAVVGTALIKKYPKLESEFVYGDYKVYDVRKMIAKSEQEIGKATAKYFFYSNIMNFFKTEITLANGEIRKRPLIETNGETGEIVWDKGRDFATVRKVLSMPQVNIVKKTEVQTGGFSKESILPKRNSDKLIARKKDWDPKKYGGFDSPTVAYSVLVVAKVEKGKSKKLKSVKELLGITIMERSSFEKNPIDFLEAKGYKEVKKDLIIKLPKYSLFELENGRKRMLASAGELQKGNELALPSKYVNFLYLASHYEKLKGSPEDNEQKQLFVEQHKHYLDEIIEQISEFSKRVILADANLDKVLSAYNKHRDKPIREQAENIIHLFTLTNLGAPAAFKYFDTTIDRKRYTSTKEVLDATLIHQSITGLYETRIDLSQLGGDGGPAPGSSGGGGGTLGDQGSRGSDPLPEPRVTLTVEGIPTEFLVNTGAEHSVLTKPMGKMGSKRTVVAGATGSKVYPWTTKRLLKIGQKQVTHSFLVIPECPAPLLGRDLLTKLKAQIQFSTEGPQVTWEDRPAMCLVLNLEEEYRLHEKPVPPSIDPSWLQLFPMVWAEKAGMGLANQVPPVVVELKSDASPVAVRQYPMSKEAREGIRPHIQRFLDLGILVPCQSPWNTPLLPVKKPGTNDYRPVQDLREVNKRVQDIHPTVPNPYNLLSSLPPSHTWYSVLDLKDAFFCLKLHPNSQPLFAFEWRDPEKGNTGQLTWTRLPQGFKNSPTLFNEALHRDLASFRALNPQVVMLQYVDDLLVAAPTYRDCKEGTRRLLQELSKLGYRVSAKKAQLCREEVTYLGYLLKGGKRWLTPARKATVMKIPTPTTPRQVREFLGKAGFCRLFIPGFASLAAPLYPLTRPKVPFTWTEAHQEAFGRIKEALLSAPALALPDLTKPFALYVDEKEGVARGVLTQTLGPWRRPVAYLSKKLDPVASGWPTCLKAIAAVALLLKDADKLTLGQNVLVIAPHNLESIVRQPPDRWMTNARMTHYQSLLLNERVSFAPPAILNPATLLPVESDDTPIHICSEILAEETGTRPDLRDQPLPGVPAWYTDGSSFIMDGRRQAGAAIVDNKRTVWASNLPEGTSAQKAELIALTQALRLAEGKSINIYTDSRYAFATAHVHGAIYKQRGWLTSAGKDIKNKEEILALLEAIHLPKRVAIIHCPGHQRGTDPVATGNRKADEAAKQAAQSTRILTETTKNAGKRTADGSEFEKRTADGSEFESPKKKAKVE

SEQ ID NO: 1807 - protein, 2213 aa, synthetic construct
  source 1..2213: note = Description of Artificial Sequence: Synthetic polypeptide
MPAAKRVKLDGGDKKYSIGLDIGTNSVGWAVITDEYKVPSKKFKVLGNTDRHSIKKNLIGALLFDSGETAEATRLKRTARRRYTRRKNRICYLQEIFSNEMAKVDDSFFHRLEESFLVEEDKKHERHPIFGNIVDEVAYHEKYPTIYHLRKKLVDSTDKADLRLIYLALAHMIKFRGHFLIEGDLNPDNSDVDKLFIQLVQTYNQLFEENPINASGVDAKAILSARLSKSRRLENLIAQLPGEKKNGLFGNLIALSLGLTPNFKSNFDLAEDAKLQLSKDTYDDDLDNLLAQIGDQYADLFLAAKNLSDAILLSDILRVNTEITKAPLSASMIKRYDEHHQDLTLLKALVRQQLPEKYKEIFFDQSKNGYAGYIDGGASQEEFYKFIKPILEKMDGTEELLVKLNREDLLRKQRTFDNGSIPHQIHLGELHAILRRQEDFYPFLKDNREKIEKILTFRIPYYVGPLARGNSRFAWMTRKSEETITPWNFEEVVDKGASAQSFIERMTNFDKNLPNEKVLPKHSLLYEYFTVYNELTKVKYVTEGMRKPAFLSGEQKKAIVDLLFKTNRKVTVKQLKEDYFKKIECFDSVEISGVEDRFNASLGTYHDLLKIIKDKDFLDNEENEDILEDIVLTLTLFEDREMIEERLKTYAHLFDDKVMKQLKRRRYTGWGRLSRKLINGIRDKQSGKTILDFLKSDGFANRNFMQLIHDDSLTFKEDIQKAQVSGQGDSLHEHIANLAGSPAIKKGILQTVKVVDELVKVMGRHKPENIVIEMARENQTTQKGQKNSRERMKRIEEGIKELGSQILKEHPVENTQLQNEKLYLYYLQNGRDMYVDQELDINRLSDYDVDHIVPQSFLKDDSIDNKVLTRSDKARGKSDNVPSEEVVKKMKNYWRQLLNAKLITQRKFDNLTKAERGGLSELDKAGFIKRQLVETRQITKHVAQILDSRMNTKYDENDKLIREVKVITLKSKLVSDFRKDFQFYKVREINNYHHAHDAYLNAVVGTALIKKYPKLESEFVYGDYKVYDVRKMIAKSEQEIGKATAKYFFYSNIMNFFKTEITLANGEIRKRPLIETNGETGEIVWDKGRDFATVRKVLSMPQVNIVKKTEVQTGGFSKESILPKRNSDKLIARKKDWDPKKYGGFDSPTVAYSVLVVAKVEKGKSKKLKSVKELLGITIMERSSFEKNPIDFLEAKGYKEVKKDLIIKLPKYSLFELENGRKRMLASAGELQKGNELALPSKYVNFLYLASHYEKLKGSPEDNEQKQLFVEQHKHYLDEIIEQISEFSKRVILADANLDKVLSAYNKHRDKPIREQAENIIHLFTLTNLGAPAAFKYFDTTIDRKRYTSTKEVLDATLIHQSITGLYETRIDLSQLGGDGGGGGPAPGGTLGDQGSRGSDPLPEPRVTLTVEGIPTEFLVNTGAEHSVLTKPMGKMGSKRTVVAGATGSKVYPWTTKRLLKIGQKQVTHSFLVIPECPAPLLGRDLLTKLKAQIQFSTEGPQVTWEDRPAMCLVLNLEEEYRLHEKPVPPSIDPSWLQLFPMVWAEKAGMGLANQVPPVVVELKSDASPVAVRQYPMSKEAREGIRPHIQRFLDLGILVPCQSPWNTPLLPVKKPGTNDYRPVQDLREVNKRVQDIHPTVPNPYNLLSSLPPSHTWYSVLDLKDAFFCLKLHPNSQPLFAFEWRDPEKGNTGQLTWTRLPQGFKNSPTLFNEALHRDLASFRALNPQVVMLQYVDDLLVAAPTYRDCKEGTRRLLQELSKLGYRVSAKKAQLCREEVTYLGYLLKGGKRWLTPARKATVMKIPTPTTPRQVREFLGKAGFCRLFIPGFASLAAPLYPLTRPKVPFTWTEAHQEAFGRIKEALLSAPALALPDLTKPFALYVDEKEGVARGVLTQTLGPWRRPVAYLSKKLDPVASGWPTCLKAIAAVALLLKDADKLTLGQNVLVIAPHNLESIVRQPPDRWMTNARMTHYQSLLLNERVSFAPPAILNPATLLPVESDDTPIHICSEILAEETGTRPDLRDQPLPGVPAWYTDGSSFIMDGRRQAGAAIVDNKRTVWASNLPEGTSAQKAELIALTQALRLAEGKSINIYTDSRYAFATAHVHGAIYKQRGWLTSAGKDIKNKEEILALLEAIHLPKRVAIIHCPGHQRGTDPVATGNRKADEAAKQAAQSTRILTETTKNAGKRTADGSEFEKRTADGSEFESPKKKAKVE

SEQ ID NO: 1808 - protein, 2213 aa, synthetic construct
  source 1..2213: note = Description of Artificial Sequence: Synthetic polypeptide
MPAAKRVKLDGGDKKYSIGLDIGTNSVGWAVITDEYKVPSKKFKVLGNTDRHSIKKNLIGALLFDSGETAEATRLKRTARRRYTRRKNRICYLQEIFSNEMAKVDDSFFHRLEESFLVEEDKKHERHPIFGNIVDEVAYHEKYPTIYHLRKKLVDSTDKADLRLIYLALAHMIKFRGHFLIEGDLNPDNSDVDKLFIQLVQTYNQLFEENPINASGVDAKAILSARLSKSRRLENLIAQLPGEKKNGLFGNLIALSLGLTPNFKSNFDLAEDAKLQLSKDTYDDDLDNLLAQIGDQYADLFLAAKNLSDAILLSDILRVNTEITKAPLSASMIKRYDEHHQDLTLLKALVRQQLPEKYKEIFFDQSKNGYAGYIDGGASQEEFYKFIKPILEKMDGTEELLVKLNREDLLRKQRTFDNGSIPHQIHLGELHAILRRQEDFYPFLKDNREKIEKILTFRIPYYVGPLARGNSRFAWMTRKSEETITPWNFEEVVDKGASAQSFIERMTNFDKNLPNEKVLPKHSLLYEYFTVYNELTKVKYVTEGMRKPAFLSGEQKKAIVDLLFKTNRKVTVKQLKEDYFKKIECFDSVEISGVEDRFNASLGTYHDLLKIIKDKDFLDNEENEDILEDIVLTLTLFEDREMIEERLKTYAHLFDDKVMKQLKRRRYTGWGRLSRKLINGIRDKQSGKTILDFLKSDGFANRNFMQLIHDDSLTFKEDIQKAQVSGQGDSLHEHIANLAGSPAIKKGILQTVKVVDELVKVMGRHKPENIVIEMARENQTTQKGQKNSRERMKRIEEGIKELGSQILKEHPVENTQLQNEKLYLYYLQNGRDMYVDQELDINRLSDYDVDHIVPQSFLKDDSIDNKVLTRSDKARGKSDNVPSEEVVKKMKNYWRQLLNAKLITQRKFDNLTKAERGGLSELDKAGFIKRQLVETRQITKHVAQILDSRMNTKYDENDKLIREVKVITLKSKLVSDFRKDFQFYKVREINNYHHAHDAYLNAVVGTALIKKYPKLESEFVYGDYKVYDVRKMIAKSEQEIGKATAKYFFYSNIMNFFKTEITLANGEIRKRPLIETNGETGEIVWDKGRDFATVRKVLSMPQVNIVKKTEVQTGGFSKESILPKRNSDKLIARKKDWDPKKYGGFDSPTVAYSVLVVAKVEKGKSKKLKSVKELLGITIMERSSFEKNPIDFLEAKGYKEVKKDLIIKLPKYSLFELENGRKRMLASAGELQKGNELALPSKYVNFLYLASHYEKLKGSPEDNEQKQLFVEQHKHYLDEIIEQISEFSKRVILADANLDKVLSAYNKHRDKPIREQAENIIHLFTLTNLGAPAAFKYFDTTIDRKRYTSTKEVLDATLIHQSITGLYETRIDLSQLGGDGGGGSGSSGGTLGDQGSRGSDPLPEPRVTLTVEGIPTEFLVNTGAEHSVLTKPMGKMGSKRTVVAGATGSKVYPWTTKRLLKIGQKQVTHSFLVIPECPAPLLGRDLLTKLKAQIQFSTEGPQVTWEDRPAMCLVLNLEEEYRLHEKPVPPSIDPSWLQLFPMVWAEKAGMGLANQVPPVVVELKSDASPVAVRQYPMSKEAREGIRPHIQRFLDLGILVPCQSPWNTPLLPVKKPGTNDYRPVQDLREVNKRVQDIHPTVPNPYNLLSSLPPSHTWYSVLDLKDAFFCLKLHPNSQPLFAFEWRDPEKGNTGQLTWTRLPQGFKNSPTLFNEALHRDLASFRALNPQVVMLQYVDDLLVAAPTYRDCKEGTRRLLQELSKLGYRVSAKKAQLCREEVTYLGYLLKGGKRWLTPARKATVMKIPTPTTPRQVREFLGKAGFCRLFIPGFASLAAPLYPLTRPKVPFTWTEAHQEAFGRIKEALLSAPALALPDLTKPFALYVDEKEGVARGVLTQTLGPWRRPVAYLSKKLDPVASGWPTCLKAIAAVALLLKDADKLTLGQNVLVIAPHNLESIVRQPPDRWMTNARMTHYQSLLLNERVSFAPPAILNPATLLPVESDDTPIHICSEILAEETGTRPDLRDQPLPGVPAWYTDGSSFIMDGRRQAGAAIVDNKRTVWASNLPEGTSAQKAELIALTQALRLAEGKSINIYTDSRYAFATAHVHGAIYKQRGWLTSAGKDIKNKEEILALLEAIHLPKRVAIIHCPGHQRGTDPVATGNRKADEAAKQAAQSTRILTETTKNAGKRTADGSEFEKRTADGSEFESPKKKAKVE

SEQ ID NO: 1809 - protein, 2227 aa, synthetic construct
  source 1..2227: note = Description of Artificial Sequence: Synthetic polypeptide
MPAAKRVKLDGGDKKYSIGLDIGTNSVGWAVITDEYKVPSKKFKVLGNTDRHSIKKNLIGALLFDSGETAEATRLKRTARRRYTRRKNRICYLQEIFSNEMAKVDDSFFHRLEESFLVEEDKKHERHPIFGNIVDEVAYHEKYPTIYHLRKKLVDSTDKADLRLIYLALAHMIKFRGHFLIEGDLNPDNSDVDKLFIQLVQTYNQLFEENPINASGVDAKAILSARLSKSRRLENLIAQLPGEKKNGLFGNLIALSLGLTPNFKSNFDLAEDAKLQLSKDTYDDDLDNLLAQIGDQYADLFLAAKNLSDAILLSDILRVNTEITKAPLSASMIKRYDEHHQDLTLLKALVRQQLPEKYKEIFFDQSKNGYAGYIDGGASQEEFYKFIKPILEKMDGTEELLVKLNREDLLRKQRTFDNGSIPHQIHLGELHAILRRQEDFYPFLKDNREKIEKILTFRIPYYVGPLARGNSRFAWMTRKSEETITPWNFEEVVDKGASAQSFIERMTNFDKNLPNEKVLPKHSLLYEYFTVYNELTKVKYVTEGMRKPAFLSGEQKKAIVDLLFKTNRKVTVKQLKEDYFKKIECFDSVEISGVEDRFNASLGTYHDLLKIIKDKDFLDNEENEDILEDIVLTLTLFEDREMIEERLKTYAHLFDDKVMKQLKRRRYTGWGRLSRKLINGIRDKQSGKTILDFLKSDGFANRNFMQLIHDDSLTFKEDIQKAQVSGQGDSLHEHIANLAGSPAIKKGILQTVKVVDELVKVMGRHKPENIVIEMARENQTTQKGQKNSRERMKRIEEGIKELGSQILKEHPVENTQLQNEKLYLYYLQNGRDMYVDQELDINRLSDYDVDHIVPQSFLKDDSIDNKVLTRSDKARGKSDNVPSEEVVKKMKNYWRQLLNAKLITQRKFDNLTKAERGGLSELDKAGFIKRQLVETRQITKHVAQILDSRMNTKYDENDKLIREVKVITLKSKLVSDFRKDFQFYKVREINNYHHAHDAYLNAVVGTALIKKYPKLESEFVYGDYKVYDVRKMIAKSEQEIGKATAKYFFYSNIMNFFKTEITLANGEIRKRPLIETNGETGEIVWDKGRDFATVRKVLSMPQVNIVKKTEVQTGGFSKESILPKRNSDKLIARKKDWDPKKYGGFDSPTVAYSVLVVAKVEKGKSKKLKSVKELLGITIMERSSFEKNPIDFLEAKGYKEVKKDLIIKLPKYSLFELENGRKRMLASAGELQKGNELALPSKYVNFLYLASHYEKLKGSPEDNEQKQLFVEQHKHYLDEIIEQISEFSKRVILADANLDKVLSAYNKHRDKPIREQAENIIHLFTLTNLGAPAAFKYFDTTIDRKRYTSTKEVLDATLIHQSITGLYETRIDLSQLGGDGGEAAAKEAAAKEAAAKEAAAKGGTLGDQGSRGSDPLPEPRVTLTVEGIPTEFLVNTGAEHSVLTKPMGKMGSKRTVVAGATGSKVYPWTTKRLLKIGQKQVTHSFLVIPECPAPLLGRDLLTKLKAQIQFSTEGPQVTWEDRPAMCLVLNLEEEYRLHEKPVPPSIDPSWLQLFPMVWAEKAGMGLANQVPPVVVELKSDASPVAVRQYPMSKEAREGIRPHIQRFLDLGILVPCQSPWNTPLLPVKKPGTNDYRPVQDLREVNKRVQDIHPTVPNPYNLLSSLPPSHTWYSVLDLKDAFFCLKLHPNSQPLFAFEWRDPEKGNTGQLTWTRLPQGFKNSPTLFNEALHRDLASFRALNPQVVMLQYVDDLLVAAPTYRDCKEGTRRLLQELSKLGYRVSAKKAQLCREEVTYLGYLLKGGKRWLTPARKATVMKIPTPTTPRQVREFLGKAGFCRLFIPGFASLAAPLYPLTRPKVPFTWTEAHQEAFGRIKEALLSAPALALPDLTKPFALYVDEKEGVARGVLTQTLGPWRRPVAYLSKKLDPVASGWPTCLKAIAAVALLLKDADKLTLGQNVLVIAPHNLESIVRQPPDRWMTNARMTHYQSLLLNERVSFAPPAILNPATLLPVESDDTPIHICSEILAEETGTRPDLRDQPLPGVPAWYTDGSSFIMDGRRQAGAAIVDNKRTVWASNLPEGTSAQKAELIALTQALRLAEGKSINIYTDSRYAFATAHVHGAIYKQRGWLTSAGKDIKNKEEILALLEAIHLPKRVAIIHCPGHQRGTDPVATGNRKADEAAKQAAQSTRILTETTKNAGKRTADGSEFEKRTADGSEFESPKKKAKVE

SEQ ID NO: 1810 - protein, 2218 aa, synthetic construct
  source 1..2218: note = Description of Artificial Sequence: Synthetic polypeptide
MPAAKRVKLDGGDKKYSIGLDIGTNSVGWAVITDEYKVPSKKFKVLGNTDRHSIKKNLIGALLFDSGETAEATRLKRTARRRYTRRKNRICYLQEIFSNEMAKVDDSFFHRLEESFLVEEDKKHERHPIFGNIVDEVAYHEKYPTIYHLRKKLVDSTDKADLRLIYLALAHMIKFRGHFLIEGDLNPDNSDVDKLFIQLVQTYNQLFEENPINASGVDAKAILSARLSKSRRLENLIAQLPGEKKNGLFGNLIALSLGLTPNFKSNFDLAEDAKLQLSKDTYDDDLDNLLAQIGDQYADLFLAAKNLSDAILLSDILRVNTEITKAPLSASMIKRYDEHHQDLTLLKALVRQQLPEKYKEIFFDQSKNGYAGYIDGGASQEEFYKFIKPILEKMDGTEELLVKLNREDLLRKQRTFDNGSIPHQIHLGELHAILRRQEDFYPFLKDNREKIEKILTFRIPYYVGPLARGNSRFAWMTRKSEETITPWNFEEVVDKGASAQSFIERMTNFDKNLPNEKVLPKHSLLYEYFTVYNELTKVKYVTEGMRKPAFLSGEQKKAIVDLLFKTNRKVTVKQLKEDYFKKIECFDSVEISGVEDRFNASLGTYHDLLKIIKDKDFLDNEENEDILEDIVLTLTLFEDREMIEERLKTYAHLFDDKVMKQLKRRRYTGWGRLSRKLINGIRDKQSGKTILDFLKSDGFANRNFMQLIHDDSLTFKEDIQKAQVSGQGDSLHEHIANLAGSPAIKKGILQTVKVVDELVKVMGRHKPENIVIEMARENQTTQKGQKNSRERMKRIEEGIKELGSQILKEHPVENTQLQNEKLYLYYLQNGRDMYVDQELDINRLSDYDVDHIVPQSFLKDDSIDNKVLTRSDKARGKSDNVPSEEVVKKMKNYWRQLLNAKLITQRKFDNLTKAERGGLSELDKAGFIKRQLVETRQITKHVAQILDSRMNTKYDENDKLIREVKVITLKSKLVSDFRKDFQFYKVREINNYHHAHDAYLNAVVGTALIKKYPKLESEFVYGDYKVYDVRKMIAKSEQEIGKATAKYFFYSNIMNFFKTEITLANGEIRKRPLIETNGETGEIVWDKGRDFATVRKVLSMPQVNIVKKTEVQTGGFSKESILPKRNSDKLIARKKDWDPKKYGGFDSPTVAYSVLVVAKVEKGKSKKLKSVKELLGITIMERSSFEKNPIDFLEAKGYKEVKKDLIIKLPKYSLFELENGRKRMLASAGELQKGNELALPSKYVNFLYLASHYEKLKGSPEDNEQKQLFVEQHKHYLDEIIEQISEFSKRVILADANLDKVLSAYNKHRDKPIREQAENIIHLFTLTNLGAPAAFKYFDTTIDRKRYTSTKEVLDATLIHQSITGLYETRIDLSQLGGDGGPAPGGSEAAAKGGTLGDQGSRGSDPLPEPRVTLTVEGIPTEFLVNTGAEHSVLTKPMGKMGSKRTVVAGATGSKVYPWTTKRLLKIGQKQVTHSFLVIPECPAPLLGRDLLTKLKAQIQFSTEGPQVTWEDRPAMCLVLNLEEEYRLHEKPVPPSIDPSWLQLFPMVWAEKAGMGLANQVPPVVVELKSDASPVAVRQYPMSKEAREGIRPHIQRFLDLGILVPCQSPWNTPLLPVKKPGTNDYRPVQDLREVNKRVQDIHPTVPNPYNLLSSLPPSHTWYSVLDLKDAFFCLKLHPNSQPLFAFEWRDPEKGNTGQLTWTRLPQGFKNSPTLFNEALHRDLASFRALNPQVVMLQYVDDLLVAAPTYRDCKEGTRRLLQELSKLGYRVSAKKAQLCREEVTYLGYLLKGGKRWLTPARKATVMKIPTPTTPRQVREFLGKAGFCRLFIPGFASLAAPLYPLTRPKVPFTWTEAHQEAFGRIKEALLSAPALALPDLTKPFALYVDEKEGVARGVLTQTLGPWRRPVAYLSKKLDPVASGWPTCLKAIAAVALLLKDADKLTLGQNVLVIAPHNLESIVRQPPDRWMTNARMTHYQSLLLNERVSFAPPAILNPATLLPVESDDTPIHICSEILAEETGTRPDLRDQPLPGVPAWYTDGSSFIMDGRRQAGAAIVDNKRTVWASNLPEGTSAQKAELIALTQALRLAEGKSINIYTDSRYAFATAHVHGAIYKQRGWLTSAGKDIKNKEEILALLEAIHLPKRVAIIHCPGHQRGTDPVATGNRKADEAAKQAAQSTRILTETTKNAGKRTADGSEFEKRTADGSEFESPKKKAKVE

SEQ ID NO: 1811 - protein, 2213 aa, synthetic construct
  source 1..2213: note = Description of Artificial Sequence: Synthetic polypeptide
MPAAKRVKLDGGDKKYSIGLDIGTNSVGWAVITDEYKVPSKKFKVLGNTDRHSIKKNLIGALLFDSGETAEATRLKRTARRRYTRRKNRICYLQEIFSNEMAKVDDSFFHRLEESFLVEEDKKHERHPIFGNIVDEVAYHEKYPTIYHLRKKLVDSTDKADLRLIYLALAHMIKFRGHFLIEGDLNPDNSDVDKLFIQLVQTYNQLFEENPINASGVDAKAILSARLSKSRRLENLIAQLPGEKKNGLFGNLIALSLGLTPNFKSNFDLAEDAKLQLSKDTYDDDLDNLLAQIGDQYADLFLAAKNLSDAILLSDILRVNTEITKAPLSASMIKRYDEHHQDLTLLKALVRQQLPEKYKEIFFDQSKNGYAGYIDGGASQEEFYKFIKPILEKMDGTEELLVKLNREDLLRKQRTFDNGSIPHQIHLGELHAILRRQEDFYPFLKDNREKIEKILTFRIPYYVGPLARGNSRFAWMTRKSEETITPWNFEEVVDKGASAQSFIERMTNFDKNLPNEKVLPKHSLLYEYFTVYNELTKVKYVTEGMRKPAFLSGEQKKAIVDLLFKTNRKVTVKQLKEDYFKKIECFDSVEISGVEDRFNASLGTYHDLLKIIKDKDFLDNEENEDILEDIVLTLTLFEDREMIEERLKTYAHLFDDKVMKQLKRRRYTGWGRLSRKLINGIRDKQSGKTILDFLKSDGFANRNFMQLIHDDSLTFKEDIQKAQVSGQGDSLHEHIANLAGSPAIKKGILQTVKVVDELVKVMGRHKPENIVIEMARENQTTQKGQKNSRERMKRIEEGIKELGSQILKEHPVENTQLQNEKLYLYYLQNGRDMYVDQELDINRLSDYDVDHIVPQSFLKDDSIDNKVLTRSDKARGKSDNVPSEEVVKKMKNYWRQLLNAKLITQRKFDNLTKAERGGLSELDKAGFIKRQLVETRQITKHVAQILDSRMNTKYDENDKLIREVKVITLKSKLVSDFRKDFQFYKVREINNYHHAHDAYLNAVVGTALIKKYPKLESEFVYGDYKVYDVRKMIAKSEQEIGKATAKYFFYSNIMNFFKTEITLANGEIRKRPLIETNGETGEIVWDKGRDFATVRKVLSMPQVNIVKKTEVQTGGFSKESILPKRNSDKLIARKKDWDPKKYGGFDSPTVAYSVLVVAKVEKGKSKKLKSVKELLGITIMERSSFEKNPIDFLEAKGYKEVKKDLIIKLPKYSLFELENGRKRMLASAGELQKGNELALPSKYVNFLYLASHYEKLKGSPEDNEQKQLFVEQHKHYLDEIIEQISEFSKRVILADANLDKVLSAYNKHRDKPIREQAENIIHLFTLTNLGAPAAFKYFDTTIDRKRYTSTKEVLDATLIHQSITGLYETRIDLSQLGGDGGPAPGGSGGTLGDQGSRGSDPLPEPRVTLTVEGIPTEFLVNTGAEHSVLTKPMGKMGSKRTVVAGATGSKVYPWTTKRLLKIGQKQVTHSFLVIPECPAPLLGRDLLTKLKAQIQFSTEGPQVTWEDRPAMCLVLNLEEEYRLHEKPVPPSIDPSWLQLFPMVWAEKAGMGLANQVPPVVVELKSDASPVAVRQYPMSKEAREGIRPHIQRFLDLGILVPCQSPWNTPLLPVKKPGTNDYRPVQDLREVNKRVQDIHPTVPNPYNLLSSLPPSHTWYSVLDLKDAFFCLKLHPNSQPLFAFEWRDPEKGNTGQLTWTRLPQGFKNSPTLFNEALHRDLASFRALNPQVVMLQYVDDLLVAAPTYRDCKEGTRRLLQELSKLGYRVSAKKAQLCREEVTYLGYLLKGGKRWLTPARKATVMKIPTPTTPRQVREFLGKAGFCRLFIPGFASLAAPLYPLTRPKVPFTWTEAHQEAFGRIKEALLSAPALALPDLTKPFALYVDEKEGVARGVLTQTLGPWRRPVAYLSKKLDPVASGWPTCLKAIAAVALLLKDADKLTLGQNVLVIAPHNLESIVRQPPDRWMTNARMTHYQSLLLNERVSFAPPAILNPATLLPVESDDTPIHICSEILAEETGTRPDLRDQPLPGVPAWYTDGSSFIMDGRRQAGAAIVDNKRTVWASNLPEGTSAQKAELIALTQALRLAEGKSINIYTDSRYAFATAHVHGAIYKQRGWLTSAGKDIKNKEEILALLEAIHLPKRVAIIHCPGHQRGTDPVATGNRKADEAAKQAAQSTRILTETTKNAGKRTADGSEFEKRTADGSEFESPKKKAKVE

SEQ ID NO: 1812 - protein, 2218 aa, synthetic construct
  source 1..2218: note = Description of Artificial Sequence: Synthetic polypeptide
MPAAKRVKLDGGDKKYSIGLDIGTNSVGWAVITDEYKVPSKKFKVLGNTDRHSIKKNLIGALLFDSGETAEATRLKRTARRRYTRRKNRICYLQEIFSNEMAKVDDSFFHRLEESFLVEEDKKHERHPIFGNIVDEVAYHEKYPTIYHLRKKLVDSTDKADLRLIYLALAHMIKFRGHFLIEGDLNPDNSDVDKLFIQLVQTYNQLFEENPINASGVDAKAILSARLSKSRRLENLIAQLPGEKKNGLFGNLIALSLGLTPNFKSNFDLAEDAKLQLSKDTYDDDLDNLLAQIGDQYADLFLAAKNLSDAILLSDILRVNTEITKAPLSASMIKRYDEHHQDLTLLKALVRQQLPEKYKEIFFDQSKNGYAGYIDGGASQEEFYKFIKPILEKMDGTEELLVKLNREDLLRKQRTFDNGSIPHQIHLGELHAILRRQEDFYPFLKDNREKIEKILTFRIPYYVGPLARGNSRFAWMTRKSEETITPWNFEEVVDKGASAQSFIERMTNFDKNLPNEKVLPKHSLLYEYFTVYNELTKVKYVTEGMRKPAFLSGEQKKAIVDLLFKTNRKVTVKQLKEDYFKKIECFDSVEISGVEDRFNASLGTYHDLLKIIKDKDFLDNEENEDILEDIVLTLTLFEDREMIEERLKTYAHLFDDKVMKQLKRRRYTGWGRLSRKLINGIRDKQSGKTILDFLKSDGFANRNFMQLIHDDSLTFKEDIQKAQVSGQGDSLHEHIANLAGSPAIKKGILQTVKVVDELVKVMGRHKPENIVIEMARENQTTQKGQKNSRERMKRIEEGIKELGSQILKEHPVENTQLQNEKLYLYYLQNGRDMYVDQELDINRLSDYDVDHIVPQSFLKDDSIDNKVLTRSDKARGKSDNVPSEEVVKKMKNYWRQLLNAKLITQRKFDNLTKAERGGLSELDKAGFIKRQLVETRQITKHVAQILDSRMNTKYDENDKLIREVKVITLKSKLVSDFRKDFQFYKVREINNYHHAHDAYLNAVVGTALIKKYPKLESEFVYGDYKVYDVRKMIAKSEQEIGKATAKYFFYSNIMNFFKTEITLANGEIRKRPLIETNGETGEIVWDKGRDFATVRKVLSMPQVNIVKKTEVQTGGFSKESILPKRNSDKLIARKKDWDPKKYGGFDSPTVAYSVLVVAKVEKGKSKKLKSVKELLGITIMERSSFEKNPIDFLEAKGYKEVKKDLIIKLPKYSLFELENGRKRMLASAGELQKGNELALPSKYVNFLYLASHYEKLKGSPEDNEQKQLFVEQHKHYLDEIIEQISEFSKRVILADANLDKVLSAYNKHRDKPIREQAENIIHLFTLTNLGAPAAFKYFDTTIDRKRYTSTKEVLDATLIHQSITGLYETRIDLSQLGGDGGGGGPAPEAAAKGGTLGDQGSRGSDPLPEPRVTLTVEGIPTEFLVNTGAEHSVLTKPMGKMGSKRTVVAGATGSKVYPWTTKRLLKIGQKQVTHSFLVIPECPAPLLGRDLLTKLKAQIQFSTEGPQVTWEDRPAMCLVLNLEEEYRLHEKPVPPSIDPSWLQLFPMVWAEKAGMGLANQVPPVVVELKSDASPVAVRQYPMSKEAREGIRPHIQRFLDLGILVPCQSPWNTPLLPVKKPGTNDYRPVQDLREVNKRVQDIHPTVPNPYNLLSSLPPSHTWYSVLDLKDAFFCLKLHPNSQPLFAFEWRDPEKGNTGQLTWTRLPQGFKNSPTLFNEALHRDLASFRALNPQVVMLQYVDDLLVAAPTYRDCKEGTRRLLQELSKLGYRVSAKKAQLCREEVTYLGYLLKGGKRWLTPARKATVMKIPTPTTPRQVREFLGKAGFCRLFIPGFASLAAPLYPLTRPKVPFTWTEAHQEAFGRIKEALLSAPALALPDLTKPFALYVDEKEGVARGVLTQTLGPWRRPVAYLSKKLDPVASGWPTCLKAIAAVALLLKDADKLTLGQNVLVIAPHNLESIVRQPPDRWMTNARMTHYQSLLLNERVSFAPPAILNPATLLPVESDDTPIHICSEILAEETGTRPDLRDQPLPGVPAWYTDGSSFIMDGRRQAGAAIVDNKRTVWASNLPEGTSAQKAELIALTQALRLAEGKSINIYTDSRYAFATAHVHGAIYKQRGWLTSAGKDIKNKEEILALLEAIHLPKRVAIIHCPGHQRGTDPVATGNRKADEAAKQAAQSTRILTETTKNAGKRTADGSEFEKRTADGSEFESPKKKAKVE

SEQ ID NO: 1813 - protein, 2222 aa, synthetic construct
  source 1..2222: note = Description of Artificial Sequence: Synthetic polypeptide
MPAAKRVKLDGGDKKYSIGLDIGTNSVGWAVITDEYKVPSKKFKVLGNTDRHSIKKNLIGALLFDSGETAEATRLKRTARRRYTRRKNRICYLQEIFSNEMAKVDDSFFHRLEESFLVEEDKKHERHPIFGNIVDEVAYHEKYPTIYHLRKKLVDSTDKADLRLIYLALAHMIKFRGHFLIEGDLNPDNSDVDKLFIQLVQTYNQLFEENPINASGVDAKAILSARLSKSRRLENLIAQLPGEKKNGLFGNLIALSLGLTPNFKSNFDLAEDAKLQLSKDTYDDDLDNLLAQIGDQYADLFLAAKNLSDAILLSDILRVNTEITKAPLSASMIKRYDEHHQDLTLLKALVRQQLPEKYKEIFFDQSKNGYAGYIDGGASQEEFYKFIKPILEKMDGTEELLVKLNREDLLRKQRTFDNGSIPHQIHLGELHAILRRQEDFYPFLKDNREKIEKILTFRIPYYVGPLARGNSRFAWMTRKSEETITPWNFEEVVDKGASAQSFIERMTNFDKNLPNEKVLPKHSLLYEYFTVYNELTKVKYVTEGMRKPAFLSGEQKKAIVDLLFKTNRKVTVKQLKEDYFKKIECFDSVEISGVEDRFNASLGTYHDLLKIIKDKDFLDNEENEDILEDIVLTLTLFEDREMIEERLKTYAHLFDDKVMKQLKRRRYTGWGRLSRKLINGIRDKQSGKTILDFLKSDGFANRNFMQLIHDDSLTFKEDIQKAQVSGQGDSLHEHIANLAGSPAIKKGILQTVKVVDELVKVMGRHKPENIVIEMARENQTTQKGQKNSRERMKRIEEGIKELGSQILKEHPVENTQLQNEKLYLYYLQNGRDMYVDQELDINRLSDYDVDHIVPQSFLKDDSIDNKVLTRSDKARGKSDNVPSEEVVKKMKNYWRQLLNAKLITQRKFDNLTKAERGGLSELDKAGFIKRQLVETRQITKHVAQILDSRMNTKYDENDKLIREVKVITLKSKLVSDFRKDFQFYKVREINNYHHAHDAYLNAVVGTALIKKYPKLESEFVYGDYKVYDVRKMIAKSEQEIGKATAKYFFYSNIMNFFKTEITLANGEIRKRPLIETNGETGEIVWDKGRDFATVRKVLSMPQVNIVKKTEVQTGGFSKESILPKRNSDKLIARKKDWDPKKYGGFDSPTVAYSVLVVAKVEKGKSKKLKSVKELLGITIMERSSFEKNPIDFLEAKGYKEVKKDLIIKLPKYSLFELENGRKRMLASAGELQKGNELALPSKYVNFLYLASHYEKLKGSPEDNEQKQLFVEQHKHYLDEIIEQISEFSKRVILADANLDKVLSAYNKHRDKPIREQAENIIHLFTLTNLGAPAAFKYFDTTIDRKRYTSTKEVLDATLIHQSITGLYETRIDLSQLGGDGGGSSGSSGSSGSSGSSGGTLGDQGSRGSDPLPEPRVTLTVEGIPTEFLVNTGAEHSVLTKPMGKMGSKRTVVAGATGSKVYPWTTKRLLKIGQKQVTHSFLVIPECPAPLLGRDLLTKLKAQIQFSTEGPQVTWEDRPAMCLVLNLEEEYRLHEKPVPPSIDPSWLQLFPMVWAEKAGMGLANQVPPVVVELKSDASPVAVRQYPMSKEAREGIRPHIQRFLDLGILVPCQSPWNTPLLPVKKPGTNDYRPVQDLREVNKRVQDIHPTVPNPYNLLSSLPPSHTWYSVLDLKDAFFCLKLHPNSQPLFAFEWRDPEKGNTGQLTWTRLPQGFKNSPTLFNEALHRDLASFRALNPQVVMLQYVDDLLVAAPTYRDCKEGTRRLLQELSKLGYRVSAKKAQLCREEVTYLGYLLKGGKRWLTPARKATVMKIPTPTTPRQVREFLGKAGFCRLFIPGFASLAAPLYPLTRPKVPFTWTEAHQEAFGRIKEALLSAPALALPDLTKPFALYVDEKEGVARGVLTQTLGPWRRPVAYLSKKLDPVASGWPTCLKAIAAVALLLKDADKLTLGQNVLVIAPHNLESIVRQPPDRWMTNARMTHYQSLLLNERVSFAPPAILNPATLLPVESDDTPIHICSEILAEETGTRPDLRDQPLPGVPAWYTDGSSFIMDGRRQAGAAIVDNKRTVWASNLPEGTSAQKAELIALTQALRLAEGKSINIYTDSRYAFATAHVHGAIYKQRGWLTSAGKDIKNKEEILALLEAIHLPKRVAIIHCPGHQRGTDPVATGNRKADEAAKQAAQSTRILTETTKNAGKRTADGSEFEKRTADGSEFESPKKKAKVE

SEQ ID NO: 1814 - protein, 2216 aa, synthetic construct
  source 1..2216: note = Description of Artificial Sequence: Synthetic polypeptide
MPAAKRVKLDGGDKKYSIGLDIGTNSVGWAVITDEYKVPSKKFKVLGNTDRHSIKKNLIGALLFDSGETAEATRLKRTARRRYTRRKNRICYLQEIFSNEMAKVDDSFFHRLEESFLVEEDKKHERHPIFGNIVDEVAYHEKYPTIYHLRKKLVDSTDKADLRLIYLALAHMIKFRGHFLIEGDLNPDNSDVDKLFIQLVQTYNQLFEENPINASGVDAKAILSARLSKSRRLENLIAQLPGEKKNGLFGNLIALSLGLTPNFKSNFDLAEDAKLQLSKDTYDDDLDNLLAQIGDQYADLFLAAKNLSDAILLSDILRVNTEITKAPLSASMIKRYDEHHQDLTLLKALVRQQLPEKYKEIFFDQSKNGYAGYIDGGASQEEFYKFIKPILEKMDGTEELLVKLNREDLLRKQRTFDNGSIPHQIHLGELHAILRRQEDFYPFLKDNREKIEKILTFRIPYYVGPLARGNSRFAWMTRKSEETITPWNFEEVVDKGASAQSFIERMTNFDKNLPNEKVLPKHSLLYEYFTVYNELTKVKYVTEGMRKPAFLSGEQKKAIVDLLFKTNRKVTVKQLKEDYFKKIECFDSVEISGVEDRFNASLGTYHDLLKIIKDKDFLDNEENEDILEDIVLTLTLFEDREMIEERLKTYAHLFDDKVMKQLKRRRYTGWGRLSRKLINGIRDKQSGKTILDFLKSDGFANRNFMQLIHDDSLTFKEDIQKAQVSGQGDSLHEHIANLAGSPAIKKGILQTVKVVDELVKVMGRHKPENIVIEMARENQTTQKGQKNSRERMKRIEEGIKELGSQILKEHPVENTQLQNEKLYLYYLQNGRDMYVDQELDINRLSDYDVDHIVPQSFLKDDSIDNKVLTRSDKARGKSDNVPSEEVVKKMKNYWRQLLNAKLITQRKFDNLTKAERGGLSELDKAGFIKRQLVETRQITKHVAQILDSRMNTKYDENDKLIREVKVITLKSKLVSDFRKDFQFYKVREINNYHHAHDAYLNAVVGTALIKKYPKLESEFVYGDYKVYDVRKMIAKSEQEIGKATAKYFFYSNIMNFFKTEITLANGEIRKRPLIETNGETGEIVWDKGRDFATVRKVLSMPQVNIVKKTEVQTGGFSKESILPKRNSDKLIARKKDWDPKKYGGFDSPTVAYSVLVVAKVEKGKSKKLKSVKELLGITIMERSSFEKNPIDFLEAKGYKEVKKDLIIKLPKYSLFELENGRKRMLASAGELQKGNELALPSKYVNFLYLASHYEKLKGSPEDNEQKQLFVEQHKHYLDEIIEQISEFSKRVILADANLDKVLSAYNKHRDKPIREQAENIIHLFTLTNLGAPAAFKYFDTTIDRKRYTSTKEVLDATLIHQSITGLYETRIDLSQLGGDGGGSSGSSGSSGGTLGDQGSRGSDPLPEPRVTLTVEGIPTEFLVNTGAEHSVLTKPMGKMGSKRTVVAGATGSKVYPWTTKRLLKIGQKQVTHSFLVIPECPAPLLGRDLLTKLKAQIQFSTEGPQVTWEDRPAMCLVLNLEEEYRLHEKPVPPSIDPSWLQLFPMVWAEKAGMGLANQVPPVVVELKSDASPVAVRQYPMSKEAREGIRPHIQRFLDLGILVPCQSPWNTPLLPVKKPGTNDYRPVQDLREVNKRVQDIHPTVPNPYNLLSSLPPSHTWYSVLDLKDAFFCLKLHPNSQPLFAFEWRDPEKGNTGQLTWTRLPQGFKNSPTLFNEALHRDLASFRALNPQVVMLQYVDDLLVAAPTYRDCKEGTRRLLQELSKLGYRVSAKKAQLCREEVTYLGYLLKGGKRWLTPARKATVMKIPTPTTPRQVREFLGKAGFCRLFIPGFASLAAPLYPLTRPKVPFTWTEAHQEAFGRIKEALLSAPALALPDLTKPFALYVDEKEGVARGVLTQTLGPWRRPVAYLSKKLDPVASGWPTCLKAIAAVALLLKDADKLTLGQNVLVIAPHNLESIVRQPPDRWMTNARMTHYQSLLLNERVSFAPPAILNPATLLPVESDDTPIHICSEILAEETGTRPDLRDQPLPGVPAWYTDGSSFIMDGRRQAGAAIVDNKRTVWASNLPEGTSAQKAELIALTQALRLAEGKSINIYTDSRYAFATAHVHGAIYKQRGWLTSAGKDIKNKEEILALLEAIHLPKRVAIIHCPGHQRGTDPVATGNRKADEAAKQAAQSTRILTETTKNAGKRTADGSEFEKRTADGSEFESPKKKAKVE

SEQ ID NO: 1815 - protein, 2213 aa, synthetic construct
  source 1..2213: note = Description of Artificial Sequence: Synthetic polypeptide
MPAAKRVKLDGGDKKYSIGLDIGTNSVGWAVITDEYKVPSKKFKVLGNTDRHSIKKNLIGALLFDSGETAEATRLKRTARRRYTRRKNRICYLQEIFSNEMAKVDDSFFHRLEESFLVEEDKKHERHPIFGNIVDEVAYHEKYPTIYHLRKKLVDSTDKADLRLIYLALAHMIKFRGHFLIEGDLNPDNSDVDKLFIQLVQTYNQLFEENPINASGVDAKAILSARLSKSRRLENLIAQLPGEKKNGLFGNLIALSLGLTPNFKSNFDLAEDAKLQLSKDTYDDDLDNLLAQIGDQYADLFLAAKNLSDAILLSDILRVNTEITKAPLSASMIKRYDEHHQDLTLLKALVRQQLPEKYKEIFFDQSKNGYAGYIDGGASQEEFYKFIKPILEKMDGTEELLVKLNREDLLRKQRTFDNGSIPHQIHLGELHAILRRQEDFYPFLKDNREKIEKILTFRIPYYVGPLARGNSRFAWMTRKSEETITPWNFEEVVDKGASAQSFIERMTNFDKNLPNEKVLPKHSLLYEYFTVYNELTKVKYVTEGMRKPAFLSGEQKKAIVDLLFKTNRKVTVKQLKEDYFKKIECFDSVEISGVEDRFNASLGTYHDLLKIIKDKDFLDNEENEDILEDIVLTLTLFEDREMIEERLKTYAHLFDDKVMKQLKRRRYTGWGRLSRKLINGIRDKQSGKTILDFLKSDGFANRNFMQLIHDDSLTFKEDIQKAQVSGQGDSLHEHIANLAGSPAIKKGILQTVKVVDELVKVMGRHKPENIVIEMARENQTTQKGQKNSRERMKRIEEGIKELGSQILKEHPVENTQLQNEKLYLYYLQNGRDMYVDQELDINRLSDYDVDHIVPQSFLKDDSIDNKVLTRSDKARGKSDNVPSEEVVKKMKNYWRQLLNAKLITQRKFDNLTKAERGGLSELDKAGFIKRQLVETRQITKHVAQILDSRMNTKYDENDKLIREVKVITLKSKLVSDFRKDFQFYKVREINNYHHAHDAYLNAVVGTALIKKYPKLESEFVYGDYKVYDVRKMIAKSEQEIGKATAKYFFYSNIMNFFKTEITLANGEIRKRPLIETNGETGEIVWDKGRDFATVRKVLSMPQVNIVKKTEVQTGGFSKESILPKRNSDKLIARKKDWDPKKYGGFDSPTVAYSVLVVAKVEKGKSKKLKSVKELLGITIMERSSFEKNPIDFLEAKGYKEVKKDLIIKLPKYSLFELENGRKRMLASAGELQKGNELALPSKYVNFLYLASHYEKLKGSPEDNEQKQLFVEQHKHYLDEIIEQISEFSKRVILADANLDKVLSAYNKHRDKPIREQAENIIHLFTLTNLGAPAAFKYFDTTIDRKRYTSTKEVLDATLIHQSITGLYETRIDLSQLGGDGGGSSPAPGGTLGDQGSRGSDPLPEPRVTLTVEGIPTEFLVNTGAEHSVLTKPMGKMGSKRTVVAGATGSKVYPWTTKRLLKIGQKQVTHSFLVIPECPAPLLGRDLLTKLKAQIQFSTEGPQVTWEDRPAMCLVLNLEEEYRLHEKPVPPSIDPSWLQLFPMVWAEKAGMGLANQVPPVVVELKSDASPVAVRQYPMSKEAREGIRPHIQRFLDLGILVPCQSPWNTPLLPVKKPGTNDYRPVQDLREVNKRVQDIHPTVPNPYNLLSSLPPSHTWYSVLDLKDAFFCLKLHPNSQPLFAFEWRDPEKGNTGQLTWTRLPQGFKNSPTLFNEALHRDLASFRALNPQVVMLQYVDDLLVAAPTYRDCKEGTRRLLQELSKLGYRVSAKKAQLCREEVTYLGYLLKGGKRWLTPARKATVMKIPTPTTPRQVREFLGKAGFCRLFIPGFASLAAPLYPLTRPKVPFTWTEAHQEAFGRIKEALLSAPALALPDLTKPFALYVDEKEGVARGVLTQTLGPWRRPVAYLSKKLDPVASGWPTCLKAIAAVALLLKDADKLTLGQNVLVIAPHNLESIVRQPPDRWMTNARMTHYQSLLLNERVSFAPPAILNPATLLPVESDDTPIHICSEILAEETGTRPDLRDQPLPGVPAWYTDGSSFIMDGRRQAGAAIVDNKRTVWASNLPEGTSAQKAELIALTQALRLAEGKSINIYTDSRYAFATAHVHGAIYKQRGWLTSAGKDIKNKEEILALLEAIHLPKRVAIIHCPGHQRGTDPVATGNRKADEAAKQAAQSTRILTETTKNAGKRTADGSEFEKRTADGSEFESPKKKAKVE

SEQ ID NO: 1816 - protein, 2218 aa, synthetic construct
  source 1..2218: note = Description of Artificial Sequence: Synthetic polypeptide
MPAAKRVKLDGGDKKYSIGLDIGTNSVGWAVITDEYKVPSKKFKVLGNTDRHSIKKNLIGALLFDSGETAEATRLKRTARRRYTRRKNRICYLQEIFSNEMAKVDDSFFHRLEESFLVEEDKKHERHPIFGNIVDEVAYHEKYPTIYHLRKKLVDSTDKADLRLIYLALAHMIKFRGHFLIEGDLNPDNSDVDKLFIQLVQTYNQLFEENPINASGVDAKAILSARLSKSRRLENLIAQLPGEKKNGLFGNLIALSLGLTPNFKSNFDLAEDAKLQLSKDTYDDDLDNLLAQIGDQYADLFLAAKNLSDAILLSDILRVNTEITKAPLSASMIKRYDEHHQDLTLLKALVRQQLPEKYKEIFFDQSKNGYAGYIDGGASQEEFYKFIKPILEKMDGTEELLVKLNREDLLRKQRTFDNGSIPHQIHLGELHAILRRQEDFYPFLKDNREKIEKILTFRIPYYVGPLARGNSRFAWMTRKSEETITPWNFEEVVDKGASAQSFIERMTNFDKNLPNEKVLPKHSLLYEYFTVYNELTKVKYVTEGMRKPAFLSGEQKKAIVDLLFKTNRKVTVKQLKEDYFKKIECFDSVEISGVEDRFNASLGTYHDLLKIIKDKDFLDNEENEDILEDIVLTLTLFEDREMIEERLKTYAHLFDDKVMKQLKRRRYTGWGRLSRKLINGIRDKQSGKTILDFLKSDGFANRNFMQLIHDDSLTFKEDIQKAQVSGQGDSLHEHIANLAGSPAIKKGILQTVKVVDELVKVMGRHKPENIVIEMARENQTTQKGQKNSRERMKRIEEGIKELGSQILKEHPVENTQLQNEKLYLYYLQNGRDMYVDQELDINRLSDYDVDHIVPQSFLKDDSIDNKVLTRSDKARGKSDNVPSEEVVKKMKNYWRQLLNAKLITQRKFDNLTKAERGGLSELDKAGFIKRQLVETRQITKHVAQILDSRMNTKYDENDKLIREVKVITLKSKLVSDFRKDFQFYKVREINNYHHAHDAYLNAVVGTALIKKYPKLESEFVYGDYKVYDVRKMIAKSEQEIGKATAKYFFYSNIMNFFKTEITLANGEIRKRPLIETNGETGEIVWDKGRDFATVRKVLSMPQVNIVKKTEVQTGGFSKESILPKRNSDKLIARKKDWDPKKYGGFDSPTVAYSVLVVAKVEKGKSKKLKSVKELLGITIMERSSFEKNPIDFLEAKGYKEVKKDLIIKLPKYSLFELENGRKRMLASAGELQKGNELALPSKYVNFLYLASHYEKLKGSPEDNEQKQLFVEQHKHYLDEIIEQISEFSKRVILADANLDKVLSAYNKHRDKPIREQAENIIHLFTLTNLGAPAAFKYFDTTIDRKRYTSTKEVLDATLIHQSITGLYETRIDLSQLGGDGGPAPEAAAKGSSGGTLGDQGSRGSDPLPEPRVTLTVEGIPTEFLVNTGAEHSVLTKPMGKMGSKRTVVAGATGSKVYPWTTKRLLKIGQKQVTHSFLVIPECPAPLLGRDLLTKLKAQIQFSTEGPQVTWEDRPAMCLVLNLEEEYRLHEKPVPPSIDPSWLQLFPMVWAEKAGMGLANQVPPVVVELKSDASPVAVRQYPMSKEAREGIRPHIQRFLDLGILVPCQSPWNTPLLPVKKPGTNDYRPVQDLREVNKRVQDIHPTVPNPYNLLSSLPPSHTWYSVLDLKDAFFCLKLHPNSQPLFAFEWRDPEKGNTGQLTWTRLPQGFKNSPTLFNEALHRDLASFRALNPQVVMLQYVDDLLVAAPTYRDCKEGTRRLLQELSKLGYRVSAKKAQLCREEVTYLGYLLKGGKRWLTPARKATVMKIPTPTTPRQVREFLGKAGFCRLFIPGFASLAAPLYPLTRPKVPFTWTEAHQEAFGRIKEALLSAPALALPDLTKPFALYVDEKEGVARGVLTQTLGPWRRPVAYLSKKLDPVASGWPTCLKAIAAVALLLKDADKLTLGQNVLVIAPHNLESIVRQPPDRWMTNARMTHYQSLLLNERVSFAPPAILNPATLLPVESDDTPIHICSEILAEETGTRPDLRDQPLPGVPAWYTDGSSFIMDGRRQAGAAIVDNKRTVWASNLPEGTSAQKAELIALTQALRLAEGKSINIYTDSRYAFATAHVHGAIYKQRGWLTSAGKDIKNKEEILALLEAIHLPKRVAIIHCPGHQRGTDPVATGNRKADEAAKQAAQSTRILTETTKNAGKRTADGSEFEKRTADGSEFESPKKKAKVE

SEQ ID NO: 1817 - protein, 2218 aa, synthetic construct
  source 1..2218: note = Description of Artificial Sequence: Synthetic polypeptide
MPAAKRVKLDGGDKKYSIGLDIGTNSVGWAVITDEYKVPSKKFKVLGNTDRHSIKKNLIGALLFDSGETAEATRLKRTARRRYTRRKNRICYLQEIFSNEMAKVDDSFFHRLEESFLVEEDKKHERHPIFGNIVDEVAYHEKYPTIYHLRKKLVDSTDKADLRLIYLALAHMIKFRGHFLIEGDLNPDNSDVDKLFIQLVQTYNQLFEENPINASGVDAKAILSARLSKSRRLENLIAQLPGEKKNGLFGNLIALSLGLTPNFKSNFDLAEDAKLQLSKDTYDDDLDNLLAQIGDQYADLFLAAKNLSDAILLSDILRVNTEITKAPLSASMIKRYDEHHQDLTLLKALVRQQLPEKYKEIFFDQSKNGYAGYIDGGASQEEFYKFIKPILEKMDGTEELLVKLNREDLLRKQRTFDNGSIPHQIHLGELHAILRRQEDFYPFLKDNREKIEKILTFRIPYYVGPLARGNSRFAWMTRKSEETITPWNFEEVVDKGASAQSFIERMTNFDKNLPNEKVLPKHSLLYEYFTVYNELTKVKYVTEGMRKPAFLSGEQKKAIVDLLFKTNRKVTVKQLKEDYFKKIECFDSVEISGVEDRFNASLGTYHDLLKIIKDKDFLDNEENEDILEDIVLTLTLFEDREMIEERLKTYAHLFDDKVMKQLKRRRYTGWGRLSRKLINGIRDKQSGKTILDFLKSDGFANRNFMQLIHDDSLTFKEDIQKAQVSGQGDSLHEHIANLAGSPAIKKGILQTVKVVDELVKVMGRHKPENIVIEMARENQTTQKGQKNSRERMKRIEEGIKELGSQILKEHPVENTQLQNEKLYLYYLQNGRDMYVDQELDINRLSDYDVDHIVPQSFLKDDSIDNKVLTRSDKARGKSDNVPSEEVVKKMKNYWRQLLNAKLITQRKFDNLTKAERGGLSELDKAGFIKRQLVETRQITKHVAQILDSRMNTKYDENDKLIREVKVITLKSKLVSDFRKDFQFYKVREINNYHHAHDAYLNAVVGTALIKKYPKLESEFVYGDYKVYDVRKMIAKSEQEIGKATAKYFFYSNIMNFFKTEITLANGEIRKRPLIETNGETGEIVWDKGRDFATVRKVLSMPQVNIVKKTEVQTGGFSKESILPKRNSDKLIARKKDWDPKKYGGFDSPTVAYSVLVVAKVEKGKSKKLKSVKELLGITIMERSSFEKNPIDFLEAKGYKEVKKDLIIKLPKYSLFELENGRKRMLASAGELQKGNELALPSKYVNFLYLASHYEKLKGSPEDNEQKQLFVEQHKHYLDEIIEQISEFSKRVILADANLDKVLSAYNKHRDKPIREQAENIIHLFTLTNLGAPAAFKYFDTTIDRKRYTSTKEVLDATLIHQSITGLYETRIDLSQLGGDGGGSSGGGEAAAKGGTLGDQGSRGSDPLPEPRVTLTVEGIPTEFLVNTGAEHSVLTKPMGKMGSKRTVVAGATGSKVYPWTTKRLLKIGQKQVTHSFLVIPECPAPLLGRDLLTKLKAQIQFSTEGPQVTWEDRPAMCLVLNLEEEYRLHEKPVPPSIDPSWLQLFPMVWAEKAGMGLANQVPPVVVELKSDASPVAVRQYPMSKEAREGIRPHIQRFLDLGILVPCQSPWNTPLLPVKKPGTNDYRPVQDLREVNKRVQDIHPTVPNPYNLLSSLPPSHTWYSVLDLKDAFFCLKLHPNSQPLFAFEWRDPEKGNTGQLTWTRLPQGFKNSPTLFNEALHRDLASFRALNPQVVMLQYVDDLLVAAPTYRDCKEGTRRLLQELSKLGYRVSAKKAQLCREEVTYLGYLLKGGKRWLTPARKATVMKIPTPTTPRQVREFLGKAGFCRLFIPGFASLAAPLYPLTRPKVPFTWTEAHQEAFGRIKEALLSAPALALPDLTKPFALYVDEKEGVARGVLTQTLGPWRRPVAYLSKKLDPVASGWPTCLKAIAAVALLLKDADKLTLGQNVLVIAPHNLESIVRQPPDRWMTNARMTHYQSLLLNERVSFAPPAILNPATLLPVESDDTPIHICSEILAEETGTRPDLRDQPLPGVPAWYTDGSSFIMDGRRQAGAAIVDNKRTVWASNLPEGTSAQKAELIALTQALRLAEGKSINIYTDSRYAFATAHVHGAIYKQRGWLTSAGKDIKNKEEILALLEAIHLPKRVAIIHCPGHQRGTDPVATGNRKADEAAKQAAQSTRILTETTKNAGKRTADGSEFEKRTADGSEFESPKKKAKVE

SEQ ID NO: 1818 - protein, 2216 aa, synthetic construct
  source 1..2216: note = Description of Artificial Sequence: Synthetic polypeptide
MPAAKRVKLDGGDKKYSIGLDIGTNSVGWAVITDEYKVPSKKFKVLGNTDRHSIKKNLIGALLFDSGETAEATRLKRTARRRYTRRKNRICYLQEIFSNEMAKVDDSFFHRLEESFLVEEDKKHERHPIFGNIVDEVAYHEKYPTIYHLRKKLVDSTDKADLRLIYLALAHMIKFRGHFLIEGDLNPDNSDVDKLFIQLVQTYNQLFEENPINASGVDAKAILSARLSKSRRLENLIAQLPGEKKNGLFGNLIALSLGLTPNFKSNFDLAEDAKLQLSKDTYDDDLDNLLAQIGDQYADLFLAAKNLSDAILLSDILRVNTEITKAPLSASMIKRYDEHHQDLTLLKALVRQQLPEKYKEIFFDQSKNGYAGYIDGGASQEEFYKFIKPILEKMDGTEELLVKLNREDLLRKQRTFDNGSIPHQIHLGELHAILRRQEDFYPFLKDNREKIEKILTFRIPYYVGPLARGNSRFAWMTRKSEETITPWNFEEVVDKGASAQSFIERMTNFDKNLPNEKVLPKHSLLYEYFTVYNELTKVKYVTEGMRKPAFLSGEQKKAIVDLLFKTNRKVTVKQLKEDYFKKIECFDSVEISGVEDRFNASLGTYHDLLKIIKDKDFLDNEENEDILEDIVLTLTLFEDREMIEERLKTYAHLFDDKVMKQLKRRRYTGWGRLSRKLINGIRDKQSGKTILDFLKSDGFANRNFMQLIHDDSLTFKEDIQKAQVSGQGDSLHEHIANLAGSPAIKKGILQTVKVVDELVKVMGRHKPENIVIEMARENQTTQKGQKNSRERMKRIEEGIKELGSQILKEHPVENTQLQNEKLYLYYLQNGRDMYVDQELDINRLSDYDVDHIVPQSFLKDDSIDNKVLTRSDKARGKSDNVPSEEVVKKMKNYWRQLLNAKLITQRKFDNLTKAERGGLSELDKAGFIKRQLVETRQITKHVAQILDSRMNTKYDENDKLIREVKVITLKSKLVSDFRKDFQFYKVREINNYHHAHDAYLNAVVGTALIKKYPKLESEFVYGDYKVYDVRKMIAKSEQEIGKATAKYFFYSNIMNFFKTEITLANGEIRKRPLIETNGETGEIVWDKGRDFATVRKVLSMPQVNIVKKTEVQTGGFSKESILPKRNSDKLIARKKDWDPKKYGGFDSPTVAYSVLVVAKVEKGKSKKLKSVKELLGITIMERSSFEKNPIDFLEAKGYKEVKKDLIIKLPKYSLFELENGRKRMLASAGELQKGNELALPSKYVNFLYLASHYEKLKGSPEDNEQKQLFVEQHKHYLDEIIEQISEFSKRVILADANLDKVLSAYNKHRDKPIREQAENIIHLFTLTNLGAPAAFKYFDTTIDRKRYTSTKEVLDATLIHQSITGLYETRIDLSQLGGDGGGGGGSSPAPGGTLGDQGSRGSDPLPEPRVTLTVEGIPTEFLVNTGAEHSVLTKPMGKMGSKRTVVAGATGSKVYPWTTKRLLKIGQKQVTHSFLVIPECPAPLLGRDLLTKLKAQIQFSTEGPQVTWEDRPAMCLVLNLEEEYRLHEKPVPPSIDPSWLQLFPMVWAEKAGMGLANQVPPVVVELKSDASPVAVRQYPMSKEAREGIRPHIQRFLDLGILVPCQSPWNTPLLPVKKPGTNDYRPVQDLREVNKRVQDIHPTVPNPYNLLSSLPPSHTWYSVLDLKDAFFCLKLHPNSQPLFAFEWRDPEKGNTGQLTWTRLPQGFKNSPTLFNEALHRDLASFRALNPQVVMLQYVDDLLVAAPTYRDCKEGTRRLLQELSKLGYRVSAKKAQLCREEVTYLGYLLKGGKRWLTPARKATVMKIPTPTTPRQVREFLGKAGFCRLFIPGFASLAAPLYPLTRPKVPFTWTEAHQEAFGRIKEALLSAPALALPDLTKPFALYVDEKEGVARGVLTQTLGPWRRPVAYLSKKLDPVASGWPTCLKAIAAVALLLKDADKLTLGQNVLVIAPHNLESIVRQPPDRWMTNARMTHYQSLLLNERVSFAPPAILNPATLLPVESDDTPIHICSEILAEETGTRPDLRDQPLPGVPAWYTDGSSFIMDGRRQAGAAIVDNKRTVWASNLPEGTSAQKAELIALTQALRLAEGKSINIYTDSRYAFATAHVHGAIYKQRGWLTSAGKDIKNKEEILALLEAIHLPKRVAIIHCPGHQRGTDPVATGNRKADEAAKQAAQSTRILTETTKNAGKRTADGSEFEKRTADGSEFESPKKKAKVE

SEQ ID NO: 1819 - protein, 2216 aa, synthetic construct
  source 1..2216: note = Description of Artificial Sequence: Synthetic polypeptide
MPAAKRVKLDGGDKKYSIGLDIGTNSVGWAVITDEYKVPSKKFKVLGNTDRHSIKKNLIGALLFDSGETAEATRLKRTARRRYTRRKNRICYLQEIFSNEMAKVDDSFFHRLEESFLVEEDKKHERHPIFGNIVDEVAYHEKYPTIYHLRKKLVDSTDKADLRLIYLALAHMIKFRGHFLIEGDLNPDNSDVDKLFIQLVQTYNQLFEENPINASGVDAKAILSARLSKSRRLENLIAQLPGEKKNGLFGNLIALSLGLTPNFKSNFDLAEDAKLQLSKDTYDDDLDNLLAQIGDQYADLFLAAKNLSDAILLSDILRVNTEITKAPLSASMIKRYDEHHQDLTLLKALVRQQLPEKYKEIFFDQSKNGYAGYIDGGASQEEFYKFIKPILEKMDGTEELLVKLNREDLLRKQRTFDNGSIPHQIHLGELHAILRRQEDFYPFLKDNREKIEKILTFRIPYYVGPLARGNSRFAWMTRKSEETITPWNFEEVVDKGASAQSFIERMTNFDKNLPNEKVLPKHSLLYEYFTVYNELTKVKYVTEGMRKPAFLSGEQKKAIVDLLFKTNRKVTVKQLKEDYFKKIECFDSVEISGVEDRFNASLGTYHDLLKIIKDKDFLDNEENEDILEDIVLTLTLFEDREMIEERLKTYAHLFDDKVMKQLKRRRYTGWGRLSRKLINGIRDKQSGKTILDFLKSDGFANRNFMQLIHDDSLTFKEDIQKAQVSGQGDSLHEHIANLAGSPAIKKGILQTVKVVDELVKVMGRHKPENIVIEMARENQTTQKGQKNSRERMKRIEEGIKELGSQILKEHPVENTQLQNEKLYLYYLQNGRDMYVDQELDINRLSDYDVDHIVPQSFLKDDSIDNKVLTRSDKARGKSDNVPSEEVVKKMKNYWRQLLNAKLITQRKFDNLTKAERGGLSELDKAGFIKRQLVETRQITKHVAQILDSRMNTKYDENDKLIREVKVITLKSKLVSDFRKDFQFYKVREINNYHHAHDAYLNAVVGTALIKKYPKLESEFVYGDYKVYDVRKMIAKSEQEIGKATAKYFFYSNIMNFFKTEITLANGEIRKRPLIETNGETGEIVWDKGRDFATVRKVLSMPQVNIVKKTEVQTGGFSKESILPKRNSDKLIARKKDWDPKKYGGFDSPTVAYSVLVVAKVEKGKSKKLKSVKELLGITIMERSSFEKNPIDFLEAKGYKEVKKDLIIKLPKYSLFELENGRKRMLASAGELQKGNELALPSKYVNFLYLASHYEKLKGSPEDNEQKQLFVEQHKHYLDEIIEQISEFSKRVILADANLDKVLSAYNKHRDKPIREQAENIIHLFTLTNLGAPAAFKYFDTTIDRKRYTSTKEVLDATLIHQSITGLYETRIDLSQLGGDGGGGSGGGGSSGGTLGDQGSRGSDPLPEPRVTLTVEGIPTEFLVNTGAEHSVLTKPMGKMGSKRTVVAGATGSKVYPWTTKRLLKIGQKQVTHSFLVIPECPAPLLGRDLLTKLKAQIQFSTEGPQVTWEDRPAMCLVLNLEEEYRLHEKPVPPSIDPSWLQLFPMVWAEKAGMGLANQVPPVVVELKSDASPVAVRQYPMSKEAREGIRPHIQRFLDLGILVPCQSPWNTPLLPVKKPGTNDYRPVQDLREVNKRVQDIHPTVPNPYNLLSSLPPSHTWYSVLDLKDAFFCLKLHPNSQPLFAFEWRDPEKGNTGQLTWTRLPQGFKNSPTLFNEALHRDLASFRALNPQVVMLQYVDDLLVAAPTYRDCKEGTRRLLQELSKLGYRVSAKKAQLCREEVTYLGYLLKGGKRWLTPARKATVMKIPTPTTPRQVREFLGKAGFCRLFIPGFASLAAPLYPLTRPKVPFTWTEAHQEAFGRIKEALLSAPALALPDLTKPFALYVDEKEGVARGVLTQTLGPWRRPVAYLSKKLDPVASGWPTCLKAIAAVALLLKDADKLTLGQNVLVIAPHNLESIVRQPPDRWMTNARMTHYQSLLLNERVSFAPPAILNPATLLPVESDDTPIHICSEILAEETGTRPDLRDQPLPGVPAWYTDGSSFIMDGRRQAGAAIVDNKRTVWASNLPEGTSAQKAELIALTQALRLAEGKSINIYTDSRYAFATAHVHGAIYKQRGWLTSAGKDIKNKEEILALLEAIHLPKRVAIIHCPGHQRGTDPVATGNRKADEAAKQAAQSTRILTETTKNAGKRTADGSEFEKRTADGSEFESPKKKAKVE

SEQ ID NO: 1820 - protein, 2215 aa, synthetic construct
  source 1..2215: note = Description of Artificial Sequence: Synthetic polypeptide
MPAAKRVKLDGGDKKYSIGLDIGTNSVGWAVITDEYKVPSKKFKVLGNTDRHSIKKNLIGALLFDSGETAEATRLKRTARRRYTRRKNRICYLQEIFSNEMAKVDDSFFHRLEESFLVEEDKKHERHPIFGNIVDEVAYHEKYPTIYHLRKKLVDSTDKADLRLIYLALAHMIKFRGHFLIEGDLNPDNSDVDKLFIQLVQTYNQLFEENPINASGVDAKAILSARLSKSRRLENLIAQLPGEKKNGLFGNLIALSLGLTPNFKSNFDLAEDAKLQLSKDTYDDDLDNLLAQIGDQYADLFLAAKNLSDAILLSDILRVNTEITKAPLSASMIKRYDEHHQDLTLLKALVRQQLPEKYKEIFFDQSKNGYAGYIDGGASQEEFYKFIKPILEKMDGTEELLVKLNREDLLRKQRTFDNGSIPHQIHLGELHAILRRQEDFYPFLKDNREKIEKILTFRIPYYVGPLARGNSRFAWMTRKSEETITPWNFEEVVDKGASAQSFIERMTNFDKNLPNEKVLPKHSLLYEYFTVYNELTKVKYVTEGMRKPAFLSGEQKKAIVDLLFKTNRKVTVKQLKEDYFKKIECFDSVEISGVEDRFNASLGTYHDLLKIIKDKDFLDNEENEDILEDIVLTLTLFEDREMIEERLKTYAHLFDDKVMKQLKRRRYTGWGRLSRKLINGIRDKQSGKTILDFLKSDGFANRNFMQLIHDDSLTFKEDIQKAQVSGQGDSLHEHIANLAGSPAIKKGILQTVKVVDELVKVMGRHKPENIVIEMARENQTTQKGQKNSRERMKRIEEGIKELGSQILKEHPVENTQLQNEKLYLYYLQNGRDMYVDQELDINRLSDYDVDHIVPQSFLKDDSIDNKVLTRSDKARGKSDNVPSEEVVKKMKNYWRQLLNAKLITQRKFDNLTKAERGGLSELDKAGFIKRQLVETRQITKHVAQILDSRMNTKYDENDKLIREVKVITLKSKLVSDFRKDFQFYKVREINNYHHAHDAYLNAVVGTALIKKYPKLESEFVYGDYKVYDVRKMIAKSEQEIGKATAKYFFYSNIMNFFKTEITLANGEIRKRPLIETNGETGEIVWDKGRDFATVRKVLSMPQVNIVKKTEVQTGGFSKESILPKRNSDKLIARKKDWDPKKYGGFDSPTVAYSVLVVAKVEKGKSKKLKSVKELLGITIMERSSFEKNPIDFLEAKGYKEVKKDLIIKLPKYSLFELENGRKRMLASAGELQKGNELALPSKYVNFLYLASHYEKLKGSPEDNEQKQLFVEQHKHYLDEIIEQISEFSKRVILADANLDKVLSAYNKHRDKPIREQAENIIHLFTLTNLGAPAAFKYFDTTIDRKRYTSTKEVLDATLIHQSITGLYETRIDLSQLGGDGGEAAAKGGGGGTLGDQGSRGSDPLPEPRVTLTVEGIPTEFLVNTGAEHSVLTKPMGKMGSKRTVVAGATGSKVYPWTTKRLLKIGQKQVTHSFLVIPECPAPLLGRDLLTKLKAQIQFSTEGPQVTWEDRPAMCLVLNLEEEYRLHEKPVPPSIDPSWLQLFPMVWAEKAGMGLANQVPPVVVELKSDASPVAVRQYPMSKEAREGIRPHIQRFLDLGILVPCQSPWNTPLLPVKKPGTNDYRPVQDLREVNKRVQDIHPTVPNPYNLLSSLPPSHTWYSVLDLKDAFFCLKLHPNSQPLFAFEWRDPEKGNTGQLTWTRLPQGFKNSPTLFNEALHRDLASFRALNPQVVMLQYVDDLLVAAPTYRDCKEGTRRLLQELSKLGYRVSAKKAQLCREEVTYLGYLLKGGKRWLTPARKATVMKIPTPTTPRQVREFLGKAGFCRLFIPGFASLAAPLYPLTRPKVPFTWTEAHQEAFGRIKEALLSAPALALPDLTKPFALYVDEKEGVARGVLTQTLGPWRRPVAYLSKKLDPVASGWPTCLKAIAAVALLLKDADKLTLGQNVLVIAPHNLESIVRQPPDRWMTNARMTHYQSLLLNERVSFAPPAILNPATLLPVESDDTPIHICSEILAEETGTRPDLRDQPLPGVPAWYTDGSSFIMDGRRQAGAAIVDNKRTVWASNLPEGTSAQKAELIALTQALRLAEGKSINIYTDSRYAFATAHVHGAIYKQRGWLTSAGKDIKNKEEILALLEAIHLPKRVAIIHCPGHQRGTDPVATGNRKADEAAKQAAQSTRILTETTKNAGKRTADGSEFEKRTADGSEFESPKKKAKVE

SEQ ID NO: 1821 - protein, 2215 aa, synthetic construct
  source 1..2215: note = Description of Artificial Sequence: Synthetic polypeptide
MPAAKRVKLDGGDKKYSIGLDIGTNSVGWAVITDEYKVPSKKFKVLGNTDRHSIKKNLIGALLFDSGETAEATRLKRTARRRYTRRKNRICYLQEIFSNEMAKVDDSFFHRLEESFLVEEDKKHERHPIFGNIVDEVAYHEKYPTIYHLRKKLVDSTDKADLRLIYLALAHMIKFRGHFLIEGDLNPDNSDVDKLFIQLVQTYNQLFEENPINASGVDAKAILSARLSKSRRLENLIAQLPGEKKNGLFGNLIALSLGLTPNFKSNFDLAEDAKLQLSKDTYDDDLDNLLAQIGDQYADLFLAAKNLSDAILLSDILRVNTEITKAPLSASMIKRYDEHHQDLTLLKALVRQQLPEKYKEIFFDQSKNGYAGYIDGGASQEEFYKFIKPILEKMDGTEELLVKLNREDLLRKQRTFDNGSIPHQIHLGELHAILRRQEDFYPFLKDNREKIEKILTFRIPYYVGPLARGNSRFAWMTRKSEETITPWNFEEVVDKGASAQSFIERMTNFDKNLPNEKVLPKHSLLYEYFTVYNELTKVKYVTEGMRKPAFLSGEQKKAIVDLLFKTNRKVTVKQLKEDYFKKIECFDSVEISGVEDRFNASLGTYHDLLKIIKDKDFLDNEENEDILEDIVLTLTLFEDREMIEERLKTYAHLFDDKVMKQLKRRRYTGWGRLSRKLINGIRDKQSGKTILDFLKSDGFANRNFMQLIHDDSLTFKEDIQKAQVSGQGDSLHEHIANLAGSPAIKKGILQTVKVVDELVKVMGRHKPENIVIEMARENQTTQKGQKNSRERMKRIEEGIKELGSQILKEHPVENTQLQNEKLYLYYLQNGRDMYVDQELDINRLSDYDVDHIVPQSFLKDDSIDNKVLTRSDKARGKSDNVPSEEVVKKMKNYWRQLLNAKLITQRKFDNLTKAERGGLSELDKAGFIKRQLVETRQITKHVAQILDSRMNTKYDENDKLIREVKVITLKSKLVSDFRKDFQFYKVREINNYHHAHDAYLNAVVGTALIKKYPKLESEFVYGDYKVYDVRKMIAKSEQEIGKATAKYFFYSNIMNFFKTEITLANGEIRKRPLIETNGETGEIVWDKGRDFATVRKVLSMPQVNIVKKTEVQTGGFSKESILPKRNSDKLIARKKDWDPKKYGGFDSPTVAYSVLVVAKVEKGKSKKLKSVKELLGITIMERSSFEKNPIDFLEAKGYKEVKKDLIIKLPKYSLFELENGRKRMLASAGELQKGNELALPSKYVNFLYLASHYEKLKGSPEDNEQKQLFVEQHKHYLDEIIEQISEFSKRVILADANLDKVLSAYNKHRDKPIREQAENIIHLFTLTNLGAPAAFKYFDTTIDRKRYTSTKEVLDATLIHQSITGLYETRIDLSQLGGDGGEAAAKGGSGGTLGDQGSRGSDPLPEPRVTLTVEGIPTEFLVNTGAEHSVLTKPMGKMGSKRTVVAGATGSKVYPWTTKRLLKIGQKQVTHSFLVIPECPAPLLGRDLLTKLKAQIQFSTEGPQVTWEDRPAMCLVLNLEEEYRLHEKPVPPSIDPSWLQLFPMVWAEKAGMGLANQVPPVVVELKSDASPVAVRQYPMSKEAREGIRPHIQRFLDLGILVPCQSPWNTPLLPVKKPGTNDYRPVQDLREVNKRVQDIHPTVPNPYNLLSSLPPSHTWYSVLDLKDAFFCLKLHPNSQPLFAFEWRDPEKGNTGQLTWTRLPQGFKNSPTLFNEALHRDLASFRALNPQVVMLQYVDDLLVAAPTYRDCKEGTRRLLQELSKLGYRVSAKKAQLCREEVTYLGYLLKGGKRWLTPARKATVMKIPTPTTPRQVREFLGKAGFCRLFIPGFASLAAPLYPLTRPKVPFTWTEAHQEAFGRIKEALLSAPALALPDLTKPFALYVDEKEGVARGVLTQTLGPWRRPVAYLSKKLDPVASGWPTCLKAIAAVALLLKDADKLTLGQNVLVIAPHNLESIVRQPPDRWMTNARMTHYQSLLLNERVSFAPPAILNPATLLPVESDDTPIHICSEILAEETGTRPDLRDQPLPGVPAWYTDGSSFIMDGRRQAGAAIVDNKRTVWASNLPEGTSAQKAELIALTQALRLAEGKSINIYTDSRYAFATAHVHGAIYKQRGWLTSAGKDIKNKEEILALLEAIHLPKRVAIIHCPGHQRGTDPVATGNRKADEAAKQAAQSTRILTETTKNAGKRTADGSEFEKRTADGSEFESPKKKAKVE

SEQ ID NO: 1822 - protein, 2218 aa, synthetic construct
  source 1..2218: note = Description of Artificial Sequence: Synthetic polypeptide
MPAAKRVKLDGGDKKYSIGLDIGTNSVGWAVITDEYKVPSKKFKVLGNTDRHSIKKNLIGALLFDSGETAEATRLKRTARRRYTRRKNRICYLQEIFSNEMAKVDDSFFHRLEESFLVEEDKKHERHPIFGNIVDEVAYHEKYPTIYHLRKKLVDSTDKADLRLIYLALAHMIKFRGHFLIEGDLNPDNSDVDKLFIQLVQTYNQLFEENPINASGVDAKAILSARLSKSRRLENLIAQLPGEKKNGLFGNLIALSLGLTPNFKSNFDLAEDAKLQLSKDTYDDDLDNLLAQIGDQYADLFLAAKNLSDAILLSDILRVNTEITKAPLSASMIKRYDEHHQDLTLLKALVRQQLPEKYKEIFFDQSKNGYAGYIDGGASQEEFYKFIKPILEKMDGTEELLVKLNREDLLRKQRTFDNGSIPHQIHLGELHAILRRQEDFYPFLKDNREKIEKILTFRIPYYVGPLARGNSRFAWMTRKSEETITPWNFEEVVDKGASAQSFIERMTNFDKNLPNEKVLPKHSLLYEYFTVYNELTKVKYVTEGMRKPAFLSGEQKKAIVDLLFKTNRKVTVKQLKEDYFKKIECFDSVEISGVEDRFNASLGTYHDLLKIIKDKDFLDNEENEDILEDIVLTLTLFEDREMIEERLKTYAHLFDDKVMKQLKRRRYTGWGRLSRKLINGIRDKQSGKTILDFLKSDGFANRNFMQLIHDDSLTFKEDIQKAQVSGQGDSLHEHIANLAGSPAIKKGILQTVKVVDELVKVMGRHKPENIVIEMARENQTTQKGQKNSRERMKRIEEGIKELGSQILKEHPVENTQLQNEKLYLYYLQNGRDMYVDQELDINRLSDYDVDHIVPQSFLKDDSIDNKVLTRSDKARGKSDNVPSEEVVKKMKNYWRQLLNAKLITQRKFDNLTKAERGGLSELDKAGFIKRQLVETRQITKHVAQILDSRMNTKYDENDKLIREVKVITLKSKLVSDFRKDFQFYKVREINNYHHAHDAYLNAVVGTALIKKYPKLESEFVYGDYKVYDVRKMIAKSEQEIGKATAKYFFYSNIMNFFKTEITLANGEIRKRPLIETNGETGEIVWDKGRDFATVRKVLSMPQVNIVKKTEVQTGGFSKESILPKRNSDKLIARKKDWDPKKYGGFDSPTVAYSVLVVAKVEKGKSKKLKSVKELLGITIMERSSFEKNPIDFLEAKGYKEVKKDLIIKLPKYSLFELENGRKRMLASAGELQKGNELALPSKYVNFLYLASHYEKLKGSPEDNEQKQLFVEQHKHYLDEIIEQISEFSKRVILADANLDKVLSAYNKHRDKPIREQAENIIHLFTLTNLGAPAAFKYFDTTIDRKRYTSTKEVLDATLIHQSITGLYETRIDLSQLGGDGGEAAAKPAPGSSGGTLGDQGSRGSDPLPEPRVTLTVEGIPTEFLVNTGAEHSVLTKPMGKMGSKRTVVAGATGSKVYPWTTKRLLKIGQKQVTHSFLVIPECPAPLLGRDLLTKLKAQIQFSTEGPQVTWEDRPAMCLVLNLEEEYRLHEKPVPPSIDPSWLQLFPMVWAEKAGMGLANQVPPVVVELKSDASPVAVRQYPMSKEAREGIRPHIQRFLDLGILVPCQSPWNTPLLPVKKPGTNDYRPVQDLREVNKRVQDIHPTVPNPYNLLSSLPPSHTWYSVLDLKDAFFCLKLHPNSQPLFAFEWRDPEKGNTGQLTWTRLPQGFKNSPTLFNEALHRDLASFRALNPQVVMLQYVDDLLVAAPTYRDCKEGTRRLLQELSKLGYRVSAKKAQLCREEVTYLGYLLKGGKRWLTPARKATVMKIPTPTTPRQVREFLGKAGFCRLFIPGFASLAAPLYPLTRPKVPFTWTEAHQEAFGRIKEALLSAPALALPDLTKPFALYVDEKEGVARGVLTQTLGPWRRPVAYLSKKLDPVASGWPTCLKAIAAVALLLKDADKLTLGQNVLVIAPHNLESIVRQPPDRWMTNARMTHYQSLLLNERVSFAPPAILNPATLLPVESDDTPIHICSEILAEETGTRPDLRDQPLPGVPAWYTDGSSFIMDGRRQAGAAIVDNKRTVWASNLPEGTSAQKAELIALTQALRLAEGKSINIYTDSRYAFATAHVHGAIYKQRGWLTSAGKDIKNKEEILALLEAIHLPKRVAIIHCPGHQRGTDPVATGNRKADEAAKQAAQSTRILTETTKNAGKRTADGSEFEKRTADGSEFESPKKKAKVE

SEQ ID NO: 1823 - protein, 2218 aa, synthetic construct
  source 1..2218: note = Description of Artificial Sequence: Synthetic polypeptide
MPAAKRVKLDGGDKKYSIGLDIGTNSVGWAVITDEYKVPSKKFKVLGNTDRHSIKKNLIGALLFDSGETAEATRLKRTARRRYTRRKNRICYLQEIFSNEMAKVDDSFFHRLEESFLVEEDKKHERHPIFGNIVDEVAYHEKYPTIYHLRKKLVDSTDKADLRLIYLALAHMIKFRGHFLIEGDLNPDNSDVDKLFIQLVQTYNQLFEENPINASGVDAKAILSARLSKSRRLENLIAQLPGEKKNGLFGNLIALSLGLTPNFKSNFDLAEDAKLQLSKDTYDDDLDNLLAQIGDQYADLFLAAKNLSDAILLSDILRVNTEITKAPLSASMIKRYDEHHQDLTLLKALVRQQLPEKYKEIFFDQSKNGYAGYIDGGASQEEFYKFIKPILEKMDGTEELLVKLNREDLLRKQRTFDNGSIPHQIHLGELHAILRRQEDFYPFLKDNREKIEKILTFRIPYYVGPLARGNSRFAWMTRKSEETITPWNFEEVVDKGASAQSFIERMTNFDKNLPNEKVLPKHSLLYEYFTVYNELTKVKYVTEGMRKPAFLSGEQKKAIVDLLFKTNRKVTVKQLKEDYFKKIECFDSVEISGVEDRFNASLGTYHDLLKIIKDKDFLDNEENEDILEDIVLTLTLFEDREMIEERLKTYAHLFDDKVMKQLKRRRYTGWGRLSRKLINGIRDKQSGKTILDFLKSDGFANRNFMQLIHDDSLTFKEDIQKAQVSGQGDSLHEHIANLAGSPAIKKGILQTVKVVDELVKVMGRHKPENIVIEMARENQTTQKGQKNSRERMKRIEEGIKELGSQILKEHPVENTQLQNEKLYLYYLQNGRDMYVDQELDINRLSDYDVDHIVPQSFLKDDSIDNKVLTRSDKARGKSDNVPSEEVVKKMKNYWRQLLNAKLITQRKFDNLTKAERGGLSELDKAGFIKRQLVETRQITKHVAQILDSRMNTKYDENDKLIREVKVITLKSKLVSDFRKDFQFYKVREINNYHHAHDAYLNAVVGTALIKKYPKLESEFVYGDYKVYDVRKMIAKSEQEIGKATAKYFFYSNIMNFFKTEITLANGEIRKRPLIETNGETGEIVWDKGRDFATVRKVLSMPQVNIVKKTEVQTGGFSKESILPKRNSDKLIARKKDWDPKKYGGFDSPTVAYSVLVVAKVEKGKSKKLKSVKELLGITIMERSSFEKNPIDFLEAKGYKEVKKDLIIKLPKYSLFELENGRKRMLASAGELQKGNELALPSKYVNFLYLASHYEKLKGSPEDNEQKQLFVEQHKHYLDEIIEQISEFSKRVILADANLDKVLSAYNKHRDKPIREQAENIIHLFTLTNLGAPAAFKYFDTTIDRKRYTSTKEVLDATLIHQSITGLYETRIDLSQLGGDGGGGGGSSEAAAKGGTLGDQGSRGSDPLPEPRVTLTVEGIPTEFLVNTGAEHSVLTKPMGKMGSKRTVVAGATGSKVYPWTTKRLLKIGQKQVTHSFLVIPECPAPLLGRDLLTKLKAQIQFSTEGPQVTWEDRPAMCLVLNLEEEYRLHEKPVPPSIDPSWLQLFPMVWAEKAGMGLANQVPPVVVELKSDASPVAVRQYPMSKEAREGIRPHIQRFLDLGILVPCQSPWNTPLLPVKKPGTNDYRPVQDLREVNKRVQDIHPTVPNPYNLLSSLPPSHTWYSVLDLKDAFFCLKLHPNSQPLFAFEWRDPEKGNTGQLTWTRLPQGFKNSPTLFNEALHRDLASFRALNPQVVMLQYVDDLLVAAPTYRDCKEGTRRLLQELSKLGYRVSAKKAQLCREEVTYLGYLLKGGKRWLTPARKATVMKIPTPTTPRQVREFLGKAGFCRLFIPGFASLAAPLYPLTRPKVPFTWTEAHQEAFGRIKEALLSAPALALPDLTKPFALYVDEKEGVARGVLTQTLGPWRRPVAYLSKKLDPVASGWPTCLKAIAAVALLLKDADKLTLGQNVLVIAPHNLESIVRQPPDRWMTNARMTHYQSLLLNERVSFAPPAILNPATLLPVESDDTPIHICSEILAEETGTRPDLRDQPLPGVPAWYTDGSSFIMDGRRQAGAAIVDNKRTVWASNLPEGTSAQKAELIALTQALRLAEGKSINIYTDSRYAFATAHVHGAIYKQRGWLTSAGKDIKNKEEILALLEAIHLPKRVAIIHCPGHQRGTDPVATGNRKADEAAKQAAQSTRILTETTKNAGKRTADGSEFEKRTADGSEFESPKKKAKVE

SEQ ID NO: 1824 - protein, 2216 aa, synthetic construct
  source 1..2216: note = Description of Artificial Sequence: Synthetic polypeptide
MPAAKRVKLDGGDKKYSIGLDIGTNSVGWAVITDEYKVPSKKFKVLGNTDRHSIKKNLIGALLFDSGETAEATRLKRTARRRYTRRKNRICYLQEIFSNEMAKVDDSFFHRLEESFLVEEDKKHERHPIFGNIVDEVAYHEKYPTIYHLRKKLVDSTDKADLRLIYLALAHMIKFRGHFLIEGDLNPDNSDVDKLFIQLVQTYNQLFEENPINASGVDAKAILSARLSKSRRLENLIAQLPGEKKNGLFGNLIALSLGLTPNFKSNFDLAEDAKLQLSKDTYDDDLDNLLAQIGDQYADLFLAAKNLSDAILLSDILRVNTEITKAPLSASMIKRYDEHHQDLTLLKALVRQQLPEKYKEIFFDQSKNGYAGYIDGGASQEEFYKFIKPILEKMDGTEELLVKLNREDLLRKQRTFDNGSIPHQIHLGELHAILRRQEDFYPFLKDNREKIEKILTFRIPYYVGPLARGNSRFAWMTRKSEETITPWNFEEVVDKGASAQSFIERMTNFDKNLPNEKVLPKHSLLYEYFTVYNELTKVKYVTEGMRKPAFLSGEQKKAIVDLLFKTNRKVTVKQLKEDYFKKIECFDSVEISGVEDRFNASLGTYHDLLKIIKDKDFLDNEENEDILEDIVLTLTLFEDREMIEERLKTYAHLFDDKVMKQLKRRRYTGWGRLSRKLINGIRDKQSGKTILDFLKSDGFANRNFMQLIHDDSLTFKEDIQKAQVSGQGDSLHEHIANLAGSPAIKKGILQTVKVVDELVKVMGRHKPENIVIEMARENQTTQKGQKNSRERMKRIEEGIKELGSQILKEHPVENTQLQNEKLYLYYLQNGRDMYVDQELDINRLSDYDVDHIVPQSFLKDDSIDNKVLTRSDKARGKSDNVPSEEVVKKMKNYWRQLLNAKLITQRKFDNLTKAERGGLSELDKAGFIKRQLVETRQITKHVAQILDSRMNTKYDENDKLIREVKVITLKSKLVSDFRKDFQFYKVREINNYHHAHDAYLNAVVGTALIKKYPKLESEFVYGDYKVYDVRKMIAKSEQEIGKATAKYFFYSNIMNFFKTEITLANGEIRKRPLIETNGETGEIVWDKGRDFATVRKVLSMPQVNIVKKTEVQTGGFSKESILPKRNSDKLIARKKDWDPKKYGGFDSPTVAYSVLVVAKVEKGKSKKLKSVKELLGITIMERSSFEKNPIDFLEAKGYKEVKKDLIIKLPKYSLFELENGRKRMLASAGELQKGNELALPSKYVNFLYLASHYEKLKGSPEDNEQKQLFVEQHKHYLDEIIEQISEFSKRVILADANLDKVLSAYNKHRDKPIREQAENIIHLFTLTNLGAPAAFKYFDTTIDRKRYTSTKEVLDATLIHQSITGLYETRIDLSQLGGDGGPAPAPAPAPGGTLGDQGSRGSDPLPEPRVTLTVEGIPTEFLVNTGAEHSVLTKPMGKMGSKRTVVAGATGSKVYPWTTKRLLKIGQKQVTHSFLVIPECPAPLLGRDLLTKLKAQIQFSTEGPQVTWEDRPAMCLVLNLEEEYRLHEKPVPPSIDPSWLQLFPMVWAEKAGMGLANQVPPVVVELKSDASPVAVRQYPMSKEAREGIRPHIQRFLDLGILVPCQSPWNTPLLPVKKPGTNDYRPVQDLREVNKRVQDIHPTVPNPYNLLSSLPPSHTWYSVLDLKDAFFCLKLHPNSQPLFAFEWRDPEKGNTGQLTWTRLPQGFKNSPTLFNEALHRDLASFRALNPQVVMLQYVDDLLVAAPTYRDCKEGTRRLLQELSKLGYRVSAKKAQLCREEVTYLGYLLKGGKRWLTPARKATVMKIPTPTTPRQVREFLGKAGFCRLFIPGFASLAAPLYPLTRPKVPFTWTEAHQEAFGRIKEALLSAPALALPDLTKPFALYVDEKEGVARGVLTQTLGPWRRPVAYLSKKLDPVASGWPTCLKAIAAVALLLKDADKLTLGQNVLVIAPHNLESIVRQPPDRWMTNARMTHYQSLLLNERVSFAPPAILNPATLLPVESDDTPIHICSEILAEETGTRPDLRDQPLPGVPAWYTDGSSFIMDGRRQAGAAIVDNKRTVWASNLPEGTSAQKAELIALTQALRLAEGKSINIYTDSRYAFATAHVHGAIYKQRGWLTSAGKDIKNKEEILALLEAIHLPKRVAIIHCPGHQRGTDPVATGNRKADEAAKQAAQSTRILTETTKNAGKRTADGSEFEKRTADGSEFESPKKKAKVE

SEQ ID NO: 1825 - protein, 2215 aa, synthetic construct
  source 1..2215: note = Description of Artificial Sequence: Synthetic polypeptide
MPAAKRVKLDGGDKKYSIGLDIGTNSVGWAVITDEYKVPSKKFKVLGNTDRHSIKKNLIGALLFDSGETAEATRLKRTARRRYTRRKNRICYLQEIFSNEMAKVDDSFFHRLEESFLVEEDKKHERHPIFGNIVDEVAYHEKYPTIYHLRKKLVDSTDKADLRLIYLALAHMIKFRGHFLIEGDLNPDNSDVDKLFIQLVQTYNQLFEENPINASGVDAKAILSARLSKSRRLENLIAQLPGEKKNGLFGNLIALSLGLTPNFKSNFDLAEDAKLQLSKDTYDDDLDNLLAQIGDQYADLFLAAKNLSDAILLSDILRVNTEITKAPLSASMIKRYDEHHQDLTLLKALVRQQLPEKYKEIFFDQSKNGYAGYIDGGASQEEFYKFIKPILEKMDGTEELLVKLNREDLLRKQRTFDNGSIPHQIHLGELHAILRRQEDFYPFLKDNREKIEKILTFRIPYYVGPLARGNSRFAWMTRKSEETITPWNFEEVVDKGASAQSFIERMTNFDKNLPNEKVLPKHSLLYEYFTVYNELTKVKYVTEGMRKPAFLSGEQKKAIVDLLFKTNRKVTVKQLKEDYFKKIECFDSVEISGVEDRFNASLGTYHDLLKIIKDKDFLDNEENEDILEDIVLTLTLFEDREMIEERLKTYAHLFDDKVMKQLKRRRYTGWGRLSRKLINGIRDKQSGKTILDFLKSDGFANRNFMQLIHDDSLTFKEDIQKAQVSGQGDSLHEHIANLAGSPAIKKGILQTVKVVDELVKVMGRHKPENIVIEMARENQTTQKGQKNSRERMKRIEEGIKELGSQILKEHPVENTQLQNEKLYLYYLQNGRDMYVDQELDINRLSDYDVDHIVPQSFLKDDSIDNKVLTRSDKARGKSDNVPSEEVVKKMKNYWRQLLNAKLITQRKFDNLTKAERGGLSELDKAGFIKRQLVETRQITKHVAQILDSRMNTKYDENDKLIREVKVITLKSKLVSDFRKDFQFYKVREINNYHHAHDAYLNAVVGTALIKKYPKLESEFVYGDYKVYDVRKMIAKSEQEIGKATAKYFFYSNIMNFFKTEITLANGEIRKRPLIETNGETGEIVWDKGRDFATVRKVLSMPQVNIVKKTEVQTGGFSKESILPKRNSDKLIARKKDWDPKKYGGFDSPTVAYSVLVVAKVEKGKSKKLKSVKELLGITIMERSSFEKNPIDFLEAKGYKEVKKDLIIKLPKYSLFELENGRKRMLASAGELQKGNELALPSKYVNFLYLASHYEKLKGSPEDNEQKQLFVEQHKHYLDEIIEQISEFSKRVILADANLDKVLSAYNKHRDKPIREQAENIIHLFTLTNLGAPAAFKYFDTTIDRKRYTSTKEVLDATLIHQSITGLYETRIDLSQLGGDGGGGSEAAAKGGTLGDQGSRGSDPLPEPRVTLTVEGIPTEFLVNTGAEHSVLTKPMGKMGSKRTVVAGATGSKVYPWTTKRLLKIGQKQVTHSFLVIPECPAPLLGRDLLTKLKAQIQFSTEGPQVTWEDRPAMCLVLNLEEEYRLHEKPVPPSIDPSWLQLFPMVWAEKAGMGLANQVPPVVVELKSDASPVAVRQYPMSKEAREGIRPHIQRFLDLGILVPCQSPWNTPLLPVKKPGTNDYRPVQDLREVNKRVQDIHPTVPNPYNLLSSLPPSHTWYSVLDLKDAFFCLKLHPNSQPLFAFEWRDPEKGNTGQLTWTRLPQGFKNSPTLFNEALHRDLASFRALNPQVVMLQYVDDLLVAAPTYRDCKEGTRRLLQELSKLGYRVSAKKAQLCREEVTYLGYLLKGGKRWLTPARKATVMKIPTPTTPRQVREFLGKAGFCRLFIPGFASLAAPLYPLTRPKVPFTWTEAHQEAFGRIKEALLSAPALALPDLTKPFALYVDEKEGVARGVLTQTLGPWRRPVAYLSKKLDPVASGWPTCLKAIAAVALLLKDADKLTLGQNVLVIAPHNLESIVRQPPDRWMTNARMTHYQSLLLNERVSFAPPAILNPATLLPVESDDTPIHICSEILAEETGTRPDLRDQPLPGVPAWYTDGSSFIMDGRRQAGAAIVDNKRTVWASNLPEGTSAQKAELIALTQALRLAEGKSINIYTDSRYAFATAHVHGAIYKQRGWLTSAGKDIKNKEEILALLEAIHLPKRVAIIHCPGHQRGTDPVATGNRKADEAAKQAAQSTRILTETTKNAGKRTADGSEFEKRTADGSEFESPKKKAKVE

SEQ ID NO: 1826 - protein, 2216 aa, synthetic construct
  source 1..2216: note = Description of Artificial Sequence: Synthetic polypeptide
MPAAKRVKLDGGDKKYSIGLDIGTNSVGWAVITDEYKVPSKKFKVLGNTDRHSIKKNLIGALLFDSGETAEATRLKRTARRRYTRRKNRICYLQEIFSNEMAKVDDSFFHRLEESFLVEEDKKHERHPIFGNIVDEVAYHEKYPTIYHLRKKLVDSTDKADLRLIYLALAHMIKFRGHFLIEGDLNPDNSDVDKLFIQLVQTYNQLFEENPINASGVDAKAILSARLSKSRRLENLIAQLPGEKKNGLFGNLIALSLGLTPNFKSNFDLAEDAKLQLSKDTYDDDLDNLLAQIGDQYADLFLAAKNLSDAILLSDILRVNTEITKAPLSASMIKRYDEHHQDLTLLKALVRQQLPEKYKEIFFDQSKNGYAGYIDGGASQEEFYKFIKPILEKMDGTEELLVKLNREDLLRKQRTFDNGSIPHQIHLGELHAILRRQEDFYPFLKDNREKIEKILTFRIPYYVGPLARGNSRFAWMTRKSEETITPWNFEEVVDKGASAQSFIERMTNFDKNLPNEKVLPKHSLLYEYFTVYNELTKVKYVTEGMRKPAFLSGEQKKAIVDLLFKTNRKVTVKQLKEDYFKKIECFDSVEISGVEDRFNASLGTYHDLLKIIKDKDFLDNEENEDILEDIVLTLTLFEDREMIEERLKTYAHLFDDKVMKQLKRRRYTGWGRLSRKLINGIRDKQSGKTILDFLKSDGFANRNFMQLIHDDSLTFKEDIQKAQVSGQGDSLHEHIANLAGSPAIKKGILQTVKVVDELVKVMGRHKPENIVIEMARENQTTQKGQKNSRERMKRIEEGIKELGSQILKEHPVENTQLQNEKLYLYYLQNGRDMYVDQELDINRLSDYDVDHIVPQSFLKDDSIDNKVLTRSDKARGKSDNVPSEEVVKKMKNYWRQLLNAKLITQRKFDNLTKAERGGLSELDKAGFIKRQLVETRQITKHVAQILDSRMNTKYDENDKLIREVKVITLKSKLVSDFRKDFQFYKVREINNYHHAHDAYLNAVVGTALIKKYPKLESEFVYGDYKVYDVRKMIAKSEQEIGKATAKYFFYSNIMNFFKTEITLANGEIRKRPLIETNGETGEIVWDKGRDFATVRKVLSMPQVNIVKKTEVQTGGFSKESILPKRNSDKLIARKKDWDPKKYGGFDSPTVAYSVLVVAKVEKGKSKKLKSVKELLGITIMERSSFEKNPIDFLEAKGYKEVKKDLIIKLPKYSLFELENGRKRMLASAGELQKGNELALPSKYVNFLYLASHYEKLKGSPEDNEQKQLFVEQHKHYLDEIIEQISEFSKRVILADANLDKVLSAYNKHRDKPIREQAENIIHLFTLTNLGAPAAFKYFDTTIDRKRYTSTKEVLDATLIHQSITGLYETRIDLSQLGGDGGGGGPAPGGSGGTLGDQGSRGSDPLPEPRVTLTVEGIPTEFLVNTGAEHSVLTKPMGKMGSKRTVVAGATGSKVYPWTTKRLLKIGQKQVTHSFLVIPECPAPLLGRDLLTKLKAQIQFSTEGPQVTWEDRPAMCLVLNLEEEYRLHEKPVPPSIDPSWLQLFPMVWAEKAGMGLANQVPPVVVELKSDASPVAVRQYPMSKEAREGIRPHIQRFLDLGILVPCQSPWNTPLLPVKKPGTNDYRPVQDLREVNKRVQDIHPTVPNPYNLLSSLPPSHTWYSVLDLKDAFFCLKLHPNSQPLFAFEWRDPEKGNTGQLTWTRLPQGFKNSPTLFNEALHRDLASFRALNPQVVMLQYVDDLLVAAPTYRDCKEGTRRLLQELSKLGYRVSAKKAQLCREEVTYLGYLLKGGKRWLTPARKATVMKIPTPTTPRQVREFLGKAGFCRLFIPGFASLAAPLYPLTRPKVPFTWTEAHQEAFGRIKEALLSAPALALPDLTKPFALYVDEKEGVARGVLTQTLGPWRRPVAYLSKKLDPVASGWPTCLKAIAAVALLLKDADKLTLGQNVLVIAPHNLESIVRQPPDRWMTNARMTHYQSLLLNERVSFAPPAILNPATLLPVESDDTPIHICSEILAEETGTRPDLRDQPLPGVPAWYTDGSSFIMDGRRQAGAAIVDNKRTVWASNLPEGTSAQKAELIALTQALRLAEGKSINIYTDSRYAFATAHVHGAIYKQRGWLTSAGKDIKNKEEILALLEAIHLPKRVAIIHCPGHQRGTDPVATGNRKADEAAKQAAQSTRILTETTKNAGKRTADGSEFEKRTADGSEFESPKKKAKVE

SEQ ID NO: 1827 - protein, 2216 aa, synthetic construct
  source 1..2216: note = Description of Artificial Sequence: Synthetic polypeptide
MPAAKRVKLDGGDKKYSIGLDIGTNSVGWAVITDEYKVPSKKFKVLGNTDRHSIKKNLIGALLFDSGETAEATRLKRTARRRYTRRKNRICYLQEIFSNEMAKVDDSFFHRLEESFLVEEDKKHERHPIFGNIVDEVAYHEKYPTIYHLRKKLVDSTDKADLRLIYLALAHMIKFRGHFLIEGDLNPDNSDVDKLFIQLVQTYNQLFEENPINASGVDAKAILSARLSKSRRLENLIAQLPGEKKNGLFGNLIALSLGLTPNFKSNFDLAEDAKLQLSKDTYDDDLDNLLAQIGDQYADLFLAAKNLSDAILLSDILRVNTEITKAPLSASMIKRYDEHHQDLTLLKALVRQQLPEKYKEIFFDQSKNGYAGYIDGGASQEEFYKFIKPILEKMDGTEELLVKLNREDLLRKQRTFDNGSIPHQIHLGELHAILRRQEDFYPFLKDNREKIEKILTFRIPYYVGPLARGNSRFAWMTRKSEETITPWNFEEVVDKGASAQSFIERMTNFDKNLPNEKVLPKHSLLYEYFTVYNELTKVKYVTEGMRKPAFLSGEQKKAIVDLLFKTNRKVTVKQLKEDYFKKIECFDSVEISGVEDRFNASLGTYHDLLKIIKDKDFLDNEENEDILEDIVLTLTLFEDREMIEERLKTYAHLFDDKVMKQLKRRRYTGWGRLSRKLINGIRDKQSGKTILDFLKSDGFANRNFMQLIHDDSLTFKEDIQKAQVSGQGDSLHEHIANLAGSPAIKKGILQTVKVVDELVKVMGRHKPENIVIEMARENQTTQKGQKNSRERMKRIEEGIKELGSQILKEHPVENTQLQNEKLYLYYLQNGRDMYVDQELDINRLSDYDVDHIVPQSFLKDDSIDNKVLTRSDKARGKSDNVPSEEVVKKMKNYWRQLLNAKLITQRKFDNLTKAERGGLSELDKAGFIKRQLVETRQITKHVAQILDSRMNTKYDENDKLIREVKVITLKSKLVSDFRKDFQFYKVREINNYHHAHDAYLNAVVGTALIKKYPKLESEFVYGDYKVYDVRKMIAKSEQEIGKATAKYFFYSNIMNFFKTEITLANGEIRKRPLIETNGETGEIVWDKGRDFATVRKVLSMPQVNIVKKTEVQTGGFSKESILPKRNSDKLIARKKDWDPKKYGGFDSPTVAYSVLVVAKVEKGKSKKLKSVKELLGITIMERSSFEKNPIDFLEAKGYKEVKKDLIIKLPKYSLFELENGRKRMLASAGELQKGNELALPSKYVNFLYLASHYEKLKGSPEDNEQKQLFVEQHKHYLDEIIEQISEFSKRVILADANLDKVLSAYNKHRDKPIREQAENIIHLFTLTNLGAPAAFKYFDTTIDRKRYTSTKEVLDATLIHQSITGLYETRIDLSQLGGDGGPAPGGSGSSGGTLGDQGSRGSDPLPEPRVTLTVEGIPTEFLVNTGAEHSVLTKPMGKMGSKRTVVAGATGSKVYPWTTKRLLKIGQKQVTHSFLVIPECPAPLLGRDLLTKLKAQIQFSTEGPQVTWEDRPAMCLVLNLEEEYRLHEKPVPPSIDPSWLQLFPMVWAEKAGMGLANQVPPVVVELKSDASPVAVRQYPMSKEAREGIRPHIQRFLDLGILVPCQSPWNTPLLPVKKPGTNDYRPVQDLREVNKRVQDIHPTVPNPYNLLSSLPPSHTWYSVLDLKDAFFCLKLHPNSQPLFAFEWRDPEKGNTGQLTWTRLPQGFKNSPTLFNEALHRDLASFRALNPQVVMLQYVDDLLVAAPTYRDCKEGTRRLLQELSKLGYRVSAKKAQLCREEVTYLGYLLKGGKRWLTPARKATVMKIPTPTTPRQVREFLGKAGFCRLFIPGFASLAAPLYPLTRPKVPFTWTEAHQEAFGRIKEALLSAPALALPDLTKPFALYVDEKEGVARGVLTQTLGPWRRPVAYLSKKLDPVASGWPTCLKAIAAVALLLKDADKLTLGQNVLVIAPHNLESIVRQPPDRWMTNARMTHYQSLLLNERVSFAPPAILNPATLLPVESDDTPIHICSEILAEETGTRPDLRDQPLPGVPAWYTDGSSFIMDGRRQAGAAIVDNKRTVWASNLPEGTSAQKAELIALTQALRLAEGKSINIYTDSRYAFATAHVHGAIYKQRGWLTSAGKDIKNKEEILALLEAIHLPKRVAIIHCPGHQRGTDPVATGNRKADEAAKQAAQSTRILTETTKNAGKRTADGSEFEKRTADGSEFESPKKKAKVE

SEQ ID NO: 1828 - protein, 2212 aa, synthetic construct
  source 1..2212: note = Description of Artificial Sequence: Synthetic polypeptide
MPAAKRVKLDGGDKKYSIGLDIGTNSVGWAVITDEYKVPSKKFKVLGNTDRHSIKKNLIGALLFDSGETAEATRLKRTARRRYTRRKNRICYLQEIFSNEMAKVDDSFFHRLEESFLVEEDKKHERHPIFGNIVDEVAYHEKYPTIYHLRKKLVDSTDKADLRLIYLALAHMIKFRGHFLIEGDLNPDNSDVDKLFIQLVQTYNQLFEENPINASGVDAKAILSARLSKSRRLENLIAQLPGEKKNGLFGNLIALSLGLTPNFKSNFDLAEDAKLQLSKDTYDDDLDNLLAQIGDQYADLFLAAKNLSDAILLSDILRVNTEITKAPLSASMIKRYDEHHQDLTLLKALVRQQLPEKYKEIFFDQSKNGYAGYIDGGASQEEFYKFIKPILEKMDGTEELLVKLNREDLLRKQRTFDNGSIPHQIHLGELHAILRRQEDFYPFLKDNREKIEKILTFRIPYYVGPLARGNSRFAWMTRKSEETITPWNFEEVVDKGASAQSFIERMTNFDKNLPNEKVLPKHSLLYEYFTVYNELTKVKYVTEGMRKPAFLSGEQKKAIVDLLFKTNRKVTVKQLKEDYFKKIECFDSVEISGVEDRFNASLGTYHDLLKIIKDKDFLDNEENEDILEDIVLTLTLFEDREMIEERLKTYAHLFDDKVMKQLKRRRYTGWGRLSRKLINGIRDKQSGKTILDFLKSDGFANRNFMQLIHDDSLTFKEDIQKAQVSGQGDSLHEHIANLAGSPAIKKGILQTVKVVDELVKVMGRHKPENIVIEMARENQTTQKGQKNSRERMKRIEEGIKELGSQILKEHPVENTQLQNEKLYLYYLQNGRDMYVDQELDINRLSDYDVDHIVPQSFLKDDSIDNKVLTRSDKARGKSDNVPSEEVVKKMKNYWRQLLNAKLITQRKFDNLTKAERGGLSELDKAGFIKRQLVETRQITKHVAQILDSRMNTKYDENDKLIREVKVITLKSKLVSDFRKDFQFYKVREINNYHHAHDAYLNAVVGTALIKKYPKLESEFVYGDYKVYDVRKMIAKSEQEIGKATAKYFFYSNIMNFFKTEITLANGEIRKRPLIETNGETGEIVWDKGRDFATVRKVLSMPQVNIVKKTEVQTGGFSKESILPKRNSDKLIARKKDWDPKKYGGFDSPTVAYSVLVVAKVEKGKSKKLKSVKELLGITIMERSSFEKNPIDFLEAKGYKEVKKDLIIKLPKYSLFELENGRKRMLASAGELQKGNELALPSKYVNFLYLASHYEKLKGSPEDNEQKQLFVEQHKHYLDEIIEQISEFSKRVILADANLDKVLSAYNKHRDKPIREQAENIIHLFTLTNLGAPAAFKYFDTTIDRKRYTSTKEVLDATLIHQSITGLYETRIDLSQLGGDGGGGGGGGGTLGDQGSRGSDPLPEPRVTLTVEGIPTEFLVNTGAEHSVLTKPMGKMGSKRTVVAGATGSKVYPWTTKRLLKIGQKQVTHSFLVIPECPAPLLGRDLLTKLKAQIQFSTEGPQVTWEDRPAMCLVLNLEEEYRLHEKPVPPSIDPSWLQLFPMVWAEKAGMGLANQVPPVVVELKSDASPVAVRQYPMSKEAREGIRPHIQRFLDLGILVPCQSPWNTPLLPVKKPGTNDYRPVQDLREVNKRVQDIHPTVPNPYNLLSSLPPSHTWYSVLDLKDAFFCLKLHPNSQPLFAFEWRDPEKGNTGQLTWTRLPQGFKNSPTLFNEALHRDLASFRALNPQVVMLQYVDDLLVAAPTYRDCKEGTRRLLQELSKLGYRVSAKKAQLCREEVTYLGYLLKGGKRWLTPARKATVMKIPTPTTPRQVREFLGKAGFCRLFIPGFASLAAPLYPLTRPKVPFTWTEAHQEAFGRIKEALLSAPALALPDLTKPFALYVDEKEGVARGVLTQTLGPWRRPVAYLSKKLDPVASGWPTCLKAIAAVALLLKDADKLTLGQNVLVIAPHNLESIVRQPPDRWMTNARMTHYQSLLLNERVSFAPPAILNPATLLPVESDDTPIHICSEILAEETGTRPDLRDQPLPGVPAWYTDGSSFIMDGRRQAGAAIVDNKRTVWASNLPEGTSAQKAELIALTQALRLAEGKSINIYTDSRYAFATAHVHGAIYKQRGWLTSAGKDIKNKEEILALLEAIHLPKRVAIIHCPGHQRGTDPVATGNRKADEAAKQAAQSTRILTETTKNAGKRTADGSEFEKRTADGSEFESPKKKAKVE

SEQ ID NO: 1829 - protein, 2218 aa, synthetic construct
  source 1..2218: note = Description of Artificial Sequence: Synthetic polypeptide
MPAAKRVKLDGGDKKYSIGLDIGTNSVGWAVITDEYKVPSKKFKVLGNTDRHSIKKNLIGALLFDSGETAEATRLKRTARRRYTRRKNRICYLQEIFSNEMAKVDDSFFHRLEESFLVEEDKKHERHPIFGNIVDEVAYHEKYPTIYHLRKKLVDSTDKADLRLIYLALAHMIKFRGHFLIEGDLNPDNSDVDKLFIQLVQTYNQLFEENPINASGVDAKAILSARLSKSRRLENLIAQLPGEKKNGLFGNLIALSLGLTPNFKSNFDLAEDAKLQLSKDTYDDDLDNLLAQIGDQYADLFLAAKNLSDAILLSDILRVNTEITKAPLSASMIKRYDEHHQDLTLLKALVRQQLPEKYKEIFFDQSKNGYAGYIDGGASQEEFYKFIKPILEKMDGTEELLVKLNREDLLRKQRTFDNGSIPHQIHLGELHAILRRQEDFYPFLKDNREKIEKILTFRIPYYVGPLARGNSRFAWMTRKSEETITPWNFEEVVDKGASAQSFIERMTNFDKNLPNEKVLPKHSLLYEYFTVYNELTKVKYVTEGMRKPAFLSGEQKKAIVDLLFKTNRKVTVKQLKEDYFKKIECFDSVEISGVEDRFNASLGTYHDLLKIIKDKDFLDNEENEDILEDIVLTLTLFEDREMIEERLKTYAHLFDDKVMKQLKRRRYTGWGRLSRKLINGIRDKQSGKTILDFLKSDGFANRNFMQLIHDDSLTFKEDIQKAQVSGQGDSLHEHIANLAGSPAIKKGILQTVKVVDELVKVMGRHKPENIVIEMARENQTTQKGQKNSRERMKRIEEGIKELGSQILKEHPVENTQLQNEKLYLYYLQNGRDMYVDQELDINRLSDYDVDHIVPQSFLKDDSIDNKVLTRSDKARGKSDNVPSEEVVKKMKNYWRQLLNAKLITQRKFDNLTKAERGGLSELDKAGFIKRQLVETRQITKHVAQILDSRMNTKYDENDKLIREVKVITLKSKLVSDFRKDFQFYKVREINNYHHAHDAYLNAVVGTALIKKYPKLESEFVYGDYKVYDVRKMIAKSEQEIGKATAKYFFYSNIMNFFKTEITLANGEIRKRPLIETNGETGEIVWDKGRDFATVRKVLSMPQVNIVKKTEVQTGGFSKESILPKRNSDKLIARKKDWDPKKYGGFDSPTVAYSVLVVAKVEKGKSKKLKSVKELLGITIMERSSFEKNPIDFLEAKGYKEVKKDLIIKLPKYSLFELENGRKRMLASAGELQKGNELALPSKYVNFLYLASHYEKLKGSPEDNEQKQLFVEQHKHYLDEIIEQISEFSKRVILADANLDKVLSAYNKHRDKPIREQAENIIHLFTLTNLGAPAAFKYFDTTIDRKRYTSTKEVLDATLIHQSITGLYETRIDLSQLGGDGGGGSEAAAKGGGGGTLGDQGSRGSDPLPEPRVTLTVEGIPTEFLVNTGAEHSVLTKPMGKMGSKRTVVAGATGSKVYPWTTKRLLKIGQKQVTHSFLVIPECPAPLLGRDLLTKLKAQIQFSTEGPQVTWEDRPAMCLVLNLEEEYRLHEKPVPPSIDPSWLQLFPMVWAEKAGMGLANQVPPVVVELKSDASPVAVRQYPMSKEAREGIRPHIQRFLDLGILVPCQSPWNTPLLPVKKPGTNDYRPVQDLREVNKRVQDIHPTVPNPYNLLSSLPPSHTWYSVLDLKDAFFCLKLHPNSQPLFAFEWRDPEKGNTGQLTWTRLPQGFKNSPTLFNEALHRDLASFRALNPQVVMLQYVDDLLVAAPTYRDCKEGTRRLLQELSKLGYRVSAKKAQLCREEVTYLGYLLKGGKRWLTPARKATVMKIPTPTTPRQVREFLGKAGFCRLFIPGFASLAAPLYPLTRPKVPFTWTEAHQEAFGRIKEALLSAPALALPDLTKPFALYVDEKEGVARGVLTQTLGPWRRPVAYLSKKLDPVASGWPTCLKAIAAVALLLKDADKLTLGQNVLVIAPHNLESIVRQPPDRWMTNARMTHYQSLLLNERVSFAPPAILNPATLLPVESDDTPIHICSEILAEETGTRPDLRDQPLPGVPAWYTDGSSFIMDGRRQAGAAIVDNKRTVWASNLPEGTSAQKAELIALTQALRLAEGKSINIYTDSRYAFATAHVHGAIYKQRGWLTSAGKDIKNKEEILALLEAIHLPKRVAIIHCPGHQRGTDPVATGNRKADEAAKQAAQSTRILTETTKNAGKRTADGSEFEKRTADGSEFESPKKKAKVE

SEQ ID NO: 1830 - protein, 2216 aa, synthetic construct
  source 1..2216: note = Description of Artificial Sequence: Synthetic polypeptide
MPAAKRVKLDGGDKKYSIGLDIGTNSVGWAVITDEYKVPSKKFKVLGNTDRHSIKKNLIGALLFDSGETAEATRLKRTARRRYTRRKNRICYLQEIFSNEMAKVDDSFFHRLEESFLVEEDKKHERHPIFGNIVDEVAYHEKYPTIYHLRKKLVDSTDKADLRLIYLALAHMIKFRGHFLIEGDLNPDNSDVDKLFIQLVQTYNQLFEENPINASGVDAKAILSARLSKSRRLENLIAQLPGEKKNGLFGNLIALSLGLTPNFKSNFDLAEDAKLQLSKDTYDDDLDNLLAQIGDQYADLFLAAKNLSDAILLSDILRVNTEITKAPLSASMIKRYDEHHQDLTLLKALVRQQLPEKYKEIFFDQSKNGYAGYIDGGASQEEFYKFIKPILEKMDGTEELLVKLNREDLLRKQRTFDNGSIPHQIHLGELHAILRRQEDFYPFLKDNREKIEKILTFRIPYYVGPLARGNSRFAWMTRKSEETITPWNFEEVVDKGASAQSFIERMTNFDKNLPNEKVLPKHSLLYEYFTVYNELTKVKYVTEGMRKPAFLSGEQKKAIVDLLFKTNRKVTVKQLKEDYFKKIECFDSVEISGVEDRFNASLGTYHDLLKIIKDKDFLDNEENEDILEDIVLTLTLFEDREMIEERLKTYAHLFDDKVMKQLKRRRYTGWGRLSRKLINGIRDKQSGKTILDFLKSDGFANRNFMQLIHDDSLTFKEDIQKAQVSGQGDSLHEHIANLAGSPAIKKGILQTVKVVDELVKVMGRHKPENIVIEMARENQTTQKGQKNSRERMKRIEEGIKELGSQILKEHPVENTQLQNEKLYLYYLQNGRDMYVDQELDINRLSDYDVDHIVPQSFLKDDSIDNKVLTRSDKARGKSDNVPSEEVVKKMKNYWRQLLNAKLITQRKFDNLTKAERGGLSELDKAGFIKRQLVETRQITKHVAQILDSRMNTKYDENDKLIREVKVITLKSKLVSDFRKDFQFYKVREINNYHHAHDAYLNAVVGTALIKKYPKLESEFVYGDYKVYDVRKMIAKSEQEIGKATAKYFFYSNIMNFFKTEITLANGEIRKRPLIETNGETGEIVWDKGRDFATVRKVLSMPQVNIVKKTEVQTGGFSKESILPKRNSDKLIARKKDWDPKKYGGFDSPTVAYSVLVVAKVEKGKSKKLKSVKELLGITIMERSSFEKNPIDFLEAKGYKEVKKDLIIKLPKYSLFELENGRKRMLASAGELQKGNELALPSKYVNFLYLASHYEKLKGSPEDNEQKQLFVEQHKHYLDEIIEQISEFSKRVILADANLDKVLSAYNKHRDKPIREQAENIIHLFTLTNLGAPAAFKYFDTTIDRKRYTSTKEVLDATLIHQSITGLYETRIDLSQLGGDGGGSSGGSPAPGGTLGDQGSRGSDPLPEPRVTLTVEGIPTEFLVNTGAEHSVLTKPMGKMGSKRTVVAGATGSKVYPWTTKRLLKIGQKQVTHSFLVIPECPAPLLGRDLLTKLKAQIQFSTEGPQVTWEDRPAMCLVLNLEEEYRLHEKPVPPSIDPSWLQLFPMVWAEKAGMGLANQVPPVVVELKSDASPVAVRQYPMSKEAREGIRPHIQRFLDLGILVPCQSPWNTPLLPVKKPGTNDYRPVQDLREVNKRVQDIHPTVPNPYNLLSSLPPSHTWYSVLDLKDAFFCLKLHPNSQPLFAFEWRDPEKGNTGQLTWTRLPQGFKNSPTLFNEALHRDLASFRALNPQVVMLQYVDDLLVAAPTYRDCKEGTRRLLQELSKLGYRVSAKKAQLCREEVTYLGYLLKGGKRWLTPARKATVMKIPTPTTPRQVREFLGKAGFCRLFIPGFASLAAPLYPLTRPKVPFTWTEAHQEAFGRIKEALLSAPALALPDLTKPFALYVDEKEGVARGVLTQTLGPWRRPVAYLSKKLDPVASGWPTCLKAIAAVALLLKDADKLTLGQNVLVIAPHNLESIVRQPPDRWMTNARMTHYQSLLLNERVSFAPPAILNPATLLPVESDDTPIHICSEILAEETGTRPDLRDQPLPGVPAWYTDGSSFIMDGRRQAGAAIVDNKRTVWASNLPEGTSAQKAELIALTQALRLAEGKSINIYTDSRYAFATAHVHGAIYKQRGWLTSAGKDIKNKEEILALLEAIHLPKRVAIIHCPGHQRGTDPVATGNRKADEAAKQAAQSTRILTETTKNAGKRTADGSEFEKRTADGSEFESPKKKAKVE

SEQ ID NO: 1831 - protein, 2213 aa, synthetic construct
  source 1..2213: note = Description of Artificial Sequence: Synthetic polypeptide
MPAAKRVKLDGGDKKYSIGLDIGTNSVGWAVITDEYKVPSKKFKVLGNTDRHSIKKNLIGALLFDSGETAEATRLKRTARRRYTRRKNRICYLQEIFSNEMAKVDDSFFHRLEESFLVEEDKKHERHPIFGNIVDEVAYHEKYPTIYHLRKKLVDSTDKADLRLIYLALAHMIKFRGHFLIEGDLNPDNSDVDKLFIQLVQTYNQLFEENPINASGVDAKAILSARLSKSRRLENLIAQLPGEKKNGLFGNLIALSLGLTPNFKSNFDLAEDAKLQLSKDTYDDDLDNLLAQIGDQYADLFLAAKNLSDAILLSDILRVNTEITKAPLSASMIKRYDEHHQDLTLLKALVRQQLPEKYKEIFFDQSKNGYAGYIDGGASQEEFYKFIKPILEKMDGTEELLVKLNREDLLRKQRTFDNGSIPHQIHLGELHAILRRQEDFYPFLKDNREKIEKILTFRIPYYVGPLARGNSRFAWMTRKSEETITPWNFEEVVDKGASAQSFIERMTNFDKNLPNEKVLPKHSLLYEYFTVYNELTKVKYVTEGMRKPAFLSGEQKKAIVDLLFKTNRKVTVKQLKEDYFKKIECFDSVEISGVEDRFNASLGTYHDLLKIIKDKDFLDNEENEDILEDIVLTLTLFEDREMIEERLKTYAHLFDDKVMKQLKRRRYTGWGRLSRKLINGIRDKQSGKTILDFLKSDGFANRNFMQLIHDDSLTFKEDIQKAQVSGQGDSLHEHIANLAGSPAIKKGILQTVKVVDELVKVMGRHKPENIVIEMARENQTTQKGQKNSRERMKRIEEGIKELGSQILKEHPVENTQLQNEKLYLYYLQNGRDMYVDQELDINRLSDYDVDHIVPQSFLKDDSIDNKVLTRSDKARGKSDNVPSEEVVKKMKNYWRQLLNAKLITQRKFDNLTKAERGGLSELDKAGFIKRQLVETRQITKHVAQILDSRMNTKYDENDKLIREVKVITLKSKLVSDFRKDFQFYKVREINNYHHAHDAYLNAVVGTALIKKYPKLESEFVYGDYKVYDVRKMIAKSEQEIGKATAKYFFYSNIMNFFKTEITLANGEIRKRPLIETNGETGEIVWDKGRDFATVRKVLSMPQVNIVKKTEVQTGGFSKESILPKRNSDKLIARKKDWDPKKYGGFDSPTVAYSVLVVAKVEKGKSKKLKSVKELLGITIMERSSFEKNPIDFLEAKGYKEVKKDLIIKLPKYSLFELENGRKRMLASAGELQKGNELALPSKYVNFLYLASHYEKLKGSPEDNEQKQLFVEQHKHYLDEIIEQISEFSKRVILADANLDKVLSAYNKHRDKPIREQAENIIHLFTLTNLGAPAAFKYFDTTIDRKRYTSTKEVLDATLIHQSITGLYETRIDLSQLGGDGGGSSGSSGGTLGDQGSRGSDPLPEPRVTLTVEGIPTEFLVNTGAEHSVLTKPMGKMGSKRTVVAGATGSKVYPWTTKRLLKIGQKQVTHSFLVIPECPAPLLGRDLLTKLKAQIQFSTEGPQVTWEDRPAMCLVLNLEEEYRLHEKPVPPSIDPSWLQLFPMVWAEKAGMGLANQVPPVVVELKSDASPVAVRQYPMSKEAREGIRPHIQRFLDLGILVPCQSPWNTPLLPVKKPGTNDYRPVQDLREVNKRVQDIHPTVPNPYNLLSSLPPSHTWYSVLDLKDAFFCLKLHPNSQPLFAFEWRDPEKGNTGQLTWTRLPQGFKNSPTLFNEALHRDLASFRALNPQVVMLQYVDDLLVAAPTYRDCKEGTRRLLQELSKLGYRVSAKKAQLCREEVTYLGYLLKGGKRWLTPARKATVMKIPTPTTPRQVREFLGKAGFCRLFIPGFASLAAPLYPLTRPKVPFTWTEAHQEAFGRIKEALLSAPALALPDLTKPFALYVDEKEGVARGVLTQTLGPWRRPVAYLSKKLDPVASGWPTCLKAIAAVALLLKDADKLTLGQNVLVIAPHNLESIVRQPPDRWMTNARMTHYQSLLLNERVSFAPPAILNPATLLPVESDDTPIHICSEILAEETGTRPDLRDQPLPGVPAWYTDGSSFIMDGRRQAGAAIVDNKRTVWASNLPEGTSAQKAELIALTQALRLAEGKSINIYTDSRYAFATAHVHGAIYKQRGWLTSAGKDIKNKEEILALLEAIHLPKRVAIIHCPGHQRGTDPVATGNRKADEAAKQAAQSTRILTETTKNAGKRTADGSEFEKRTADGSEFESPKKKAKVE

SEQ ID NO: 1832 - protein, 2216 aa, synthetic construct
  source 1..2216: note = Description of Artificial Sequence: Synthetic polypeptide
MPAAKRVKLDGGDKKYSIGLDIGTNSVGWAVITDEYKVPSKKFKVLGNTDRHSIKKNLIGALLFDSGETAEATRLKRTARRRYTRRKNRICYLQEIFSNEMAKVDDSFFHRLEESFLVEEDKKHERHPIFGNIVDEVAYHEKYPTIYHLRKKLVDSTDKADLRLIYLALAHMIKFRGHFLIEGDLNPDNSDVDKLFIQLVQTYNQLFEENPINASGVDAKAILSARLSKSRRLENLIAQLPGEKKNGLFGNLIALSLGLTPNFKSNFDLAEDAKLQLSKDTYDDDLDNLLAQIGDQYADLFLAAKNLSDAILLSDILRVNTEITKAPLSASMIKRYDEHHQDLTLLKALVRQQLPEKYKEIFFDQSKNGYAGYIDGGASQEEFYKFIKPILEKMDGTEELLVKLNREDLLRKQRTFDNGSIPHQIHLGELHAILRRQEDFYPFLKDNREKIEKILTFRIPYYVGPLARGNSRFAWMTRKSEETITPWNFEEVVDKGASAQSFIERMTNFDKNLPNEKVLPKHSLLYEYFTVYNELTKVKYVTEGMRKPAFLSGEQKKAIVDLLFKTNRKVTVKQLKEDYFKKIECFDSVEISGVEDRFNASLGTYHDLLKIIKDKDFLDNEENEDILEDIVLTLTLFEDREMIEERLKTYAHLFDDKVMKQLKRRRYTGWGRLSRKLINGIRDKQSGKTILDFLKSDGFANRNFMQLIHDDSLTFKEDIQKAQVSGQGDSLHEHIANLAGSPAIKKGILQTVKVVDELVKVMGRHKPENIVIEMARENQTTQKGQKNSRERMKRIEEGIKELGSQILKEHPVENTQLQNEKLYLYYLQNGRDMYVDQELDINRLSDYDVDHIVPQSFLKDDSIDNKVLTRSDKARGKSDNVPSEEVVKKMKNYWRQLLNAKLITQRKFDNLTKAERGGLSELDKAGFIKRQLVETRQITKHVAQILDSRMNTKYDENDKLIREVKVITLKSKLVSDFRKDFQFYKVREINNYHHAHDAYLNAVVGTALIKKYPKLESEFVYGDYKVYDVRKMIAKSEQEIGKATAKYFFYSNIMNFFKTEITLANGEIRKRPLIETNGETGEIVWDKGRDFATVRKVLSMPQVNIVKKTEVQTGGFSKESILPKRNSDKLIARKKDWDPKKYGGFDSPTVAYSVLVVAKVEKGKSKKLKSVKELLGITIMERSSFEKNPIDFLEAKGYKEVKKDLIIKLPKYSLFELENGRKRMLASAGELQKGNELALPSKYVNFLYLASHYEKLKGSPEDNEQKQLFVEQHKHYLDEIIEQISEFSKRVILADANLDKVLSAYNKHRDKPIREQAENIIHLFTLTNLGAPAAFKYFDTTIDRKRYTSTKEVLDATLIHQSITGLYETRIDLSQLGGDGGGGSGGGPAPGGTLGDQGSRGSDPLPEPRVTLTVEGIPTEFLVNTGAEHSVLTKPMGKMGSKRTVVAGATGSKVYPWTTKRLLKIGQKQVTHSFLVIPECPAPLLGRDLLTKLKAQIQFSTEGPQVTWEDRPAMCLVLNLEEEYRLHEKPVPPSIDPSWLQLFPMVWAEKAGMGLANQVPPVVVELKSDASPVAVRQYPMSKEAREGIRPHIQRFLDLGILVPCQSPWNTPLLPVKKPGTNDYRPVQDLREVNKRVQDIHPTVPNPYNLLSSLPPSHTWYSVLDLKDAFFCLKLHPNSQPLFAFEWRDPEKGNTGQLTWTRLPQGFKNSPTLFNEALHRDLASFRALNPQVVMLQYVDDLLVAAPTYRDCKEGTRRLLQELSKLGYRVSAKKAQLCREEVTYLGYLLKGGKRWLTPARKATVMKIPTPTTPRQVREFLGKAGFCRLFIPGFASLAAPLYPLTRPKVPFTWTEAHQEAFGRIKEALLSAPALALPDLTKPFALYVDEKEGVARGVLTQTLGPWRRPVAYLSKKLDPVASGWPTCLKAIAAVALLLKDADKLTLGQNVLVIAPHNLESIVRQPPDRWMTNARMTHYQSLLLNERVSFAPPAILNPATLLPVESDDTPIHICSEILAEETGTRPDLRDQPLPGVPAWYTDGSSFIMDGRRQAGAAIVDNKRTVWASNLPEGTSAQKAELIALTQALRLAEGKSINIYTDSRYAFATAHVHGAIYKQRGWLTSAGKDIKNKEEILALLEAIHLPKRVAIIHCPGHQRGTDPVATGNRKADEAAKQAAQSTRILTETTKNAGKRTADGSEFEKRTADGSEFESPKKKAKVE

SEQ ID NO: 1833 - protein, 2218 aa, synthetic construct
  source 1..2218: note = Description of Artificial Sequence: Synthetic polypeptide
MPAAKRVKLDGGDKKYSIGLDIGTNSVGWAVITDEYKVPSKKFKVLGNTDRHSIKKNLIGALLFDSGETAEATRLKRTARRRYTRRKNRICYLQEIFSNEMAKVDDSFFHRLEESFLVEEDKKHERHPIFGNIVDEVAYHEKYPTIYHLRKKLVDSTDKADLRLIYLALAHMIKFRGHFLIEGDLNPDNSDVDKLFIQLVQTYNQLFEENPINASGVDAKAILSARLSKSRRLENLIAQLPGEKKNGLFGNLIALSLGLTPNFKSNFDLAEDAKLQLSKDTYDDDLDNLLAQIGDQYADLFLAAKNLSDAILLSDILRVNTEITKAPLSASMIKRYDEHHQDLTLLKALVRQQLPEKYKEIFFDQSKNGYAGYIDGGASQEEFYKFIKPILEKMDGTEELLVKLNREDLLRKQRTFDNGSIPHQIHLGELHAILRRQEDFYPFLKDNREKIEKILTFRIPYYVGPLARGNSRFAWMTRKSEETITPWNFEEVVDKGASAQSFIERMTNFDKNLPNEKVLPKHSLLYEYFTVYNELTKVKYVTEGMRKPAFLSGEQKKAIVDLLFKTNRKVTVKQLKEDYFKKIECFDSVEISGVEDRFNASLGTYHDLLKIIKDKDFLDNEENEDILEDIVLTLTLFEDREMIEERLKTYAHLFDDKVMKQLKRRRYTGWGRLSRKLINGIRDKQSGKTILDFLKSDGFANRNFMQLIHDDSLTFKEDIQKAQVSGQGDSLHEHIANLAGSPAIKKGILQTVKVVDELVKVMGRHKPENIVIEMARENQTTQKGQKNSRERMKRIEEGIKELGSQILKEHPVENTQLQNEKLYLYYLQNGRDMYVDQELDINRLSDYDVDHIVPQSFLKDDSIDNKVLTRSDKARGKSDNVPSEEVVKKMKNYWRQLLNAKLITQRKFDNLTKAERGGLSELDKAGFIKRQLVETRQITKHVAQILDSRMNTKYDENDKLIREVKVITLKSKLVSDFRKDFQFYKVREINNYHHAHDAYLNAVVGTALIKKYPKLESEFVYGDYKVYDVRKMIAKSEQEIGKATAKYFFYSNIMNFFKTEITLANGEIRKRPLIETNGETGEIVWDKGRDFATVRKVLSMPQVNIVKKTEVQTGGFSKESILPKRNSDKLIARKKDWDPKKYGGFDSPTVAYSVLVVAKVEKGKSKKLKSVKELLGITIMERSSFEKNPIDFLEAKGYKEVKKDLIIKLPKYSLFELENGRKRMLASAGELQKGNELALPSKYVNFLYLASHYEKLKGSPEDNEQKQLFVEQHKHYLDEIIEQISEFSKRVILADANLDKVLSAYNKHRDKPIREQAENIIHLFTLTNLGAPAAFKYFDTTIDRKRYTSTKEVLDATLIHQSITGLYETRIDLSQLGGDGGEAAAKGGSPAPGGTLGDQGSRGSDPLPEPRVTLTVEGIPTEFLVNTGAEHSVLTKPMGKMGSKRTVVAGATGSKVYPWTTKRLLKIGQKQVTHSFLVIPECPAPLLGRDLLTKLKAQIQFSTEGPQVTWEDRPAMCLVLNLEEEYRLHEKPVPPSIDPSWLQLFPMVWAEKAGMGLANQVPPVVVELKSDASPVAVRQYPMSKEAREGIRPHIQRFLDLGILVPCQSPWNTPLLPVKKPGTNDYRPVQDLREVNKRVQDIHPTVPNPYNLLSSLPPSHTWYSVLDLKDAFFCLKLHPNSQPLFAFEWRDPEKGNTGQLTWTRLPQGFKNSPTLFNEALHRDLASFRALNPQVVMLQYVDDLLVAAPTYRDCKEGTRRLLQELSKLGYRVSAKKAQLCREEVTYLGYLLKGGKRWLTPARKATVMKIPTPTTPRQVREFLGKAGFCRLFIPGFASLAAPLYPLTRPKVPFTWTEAHQEAFGRIKEALLSAPALALPDLTKPFALYVDEKEGVARGVLTQTLGPWRRPVAYLSKKLDPVASGWPTCLKAIAAVALLLKDADKLTLGQNVLVIAPHNLESIVRQPPDRWMTNARMTHYQSLLLNERVSFAPPAILNPATLLPVESDDTPIHICSEILAEETGTRPDLRDQPLPGVPAWYTDGSSFIMDGRRQAGAAIVDNKRTVWASNLPEGTSAQKAELIALTQALRLAEGKSINIYTDSRYAFATAHVHGAIYKQRGWLTSAGKDIKNKEEILALLEAIHLPKRVAIIHCPGHQRGTDPVATGNRKADEAAKQAAQSTRILTETTKNAGKRTADGSEFEKRTADGSEFESPKKKAKVE

SEQ ID NO: 1834 - protein, 2216 aa, synthetic construct
  source 1..2216: note = Description of Artificial Sequence: Synthetic polypeptide
MPAAKRVKLDGGDKKYSIGLDIGTNSVGWAVITDEYKVPSKKFKVLGNTDRHSIKKNLIGALLFDSGETAEATRLKRTARRRYTRRKNRICYLQEIFSNEMAKVDDSFFHRLEESFLVEEDKKHERHPIFGNIVDEVAYHEKYPTIYHLRKKLVDSTDKADLRLIYLALAHMIKFRGHFLIEGDLNPDNSDVDKLFIQLVQTYNQLFEENPINASGVDAKAILSARLSKSRRLENLIAQLPGEKKNGLFGNLIALSLGLTPNFKSNFDLAEDAKLQLSKDTYDDDLDNLLAQIGDQYADLFLAAKNLSDAILLSDILRVNTEITKAPLSASMIKRYDEHHQDLTLLKALVRQQLPEKYKEIFFDQSKNGYAGYIDGGASQEEFYKFIKPILEKMDGTEELLVKLNREDLLRKQRTFDNGSIPHQIHLGELHAILRRQEDFYPFLKDNREKIEKILTFRIPYYVGPLARGNSRFAWMTRKSEETITPWNFEEVVDKGASAQSFIERMTNFDKNLPNEKVLPKHSLLYEYFTVYNELTKVKYVTEGMRKPAFLSGEQKKAIVDLLFKTNRKVTVKQLKEDYFKKIECFDSVEISGVEDRFNASLGTYHDLLKIIKDKDFLDNEENEDILEDIVLTLTLFEDREMIEERLKTYAHLFDDKVMKQLKRRRYTGWGRLSRKLINGIRDKQSGKTILDFLKSDGFANRNFMQLIHDDSLTFKEDIQKAQVSGQGDSLHEHIANLAGSPAIKKGILQTVKVVDELVKVMGRHKPENIVIEMARENQTTQKGQKNSRERMKRIEEGIKELGSQILKEHPVENTQLQNEKLYLYYLQNGRDMYVDQELDINRLSDYDVDHIVPQSFLKDDSIDNKVLTRSDKARGKSDNVPSEEVVKKMKNYWRQLLNAKLITQRKFDNLTKAERGGLSELDKAGFIKRQLVETRQITKHVAQILDSRMNTKYDENDKLIREVKVITLKSKLVSDFRKDFQFYKVREINNYHHAHDAYLNAVVGTALIKKYPKLESEFVYGDYKVYDVRKMIAKSEQEIGKATAKYFFYSNIMNFFKTEITLANGEIRKRPLIETNGETGEIVWDKGRDFATVRKVLSMPQVNIVKKTEVQTGGFSKESILPKRNSDKLIARKKDWDPKKYGGFDSPTVAYSVLVVAKVEKGKSKKLKSVKELLGITIMERSSFEKNPIDFLEAKGYKEVKKDLIIKLPKYSLFELENGRKRMLASAGELQKGNELALPSKYVNFLYLASHYEKLKGSPEDNEQKQLFVEQHKHYLDEIIEQISEFSKRVILADANLDKVLSAYNKHRDKPIREQAENIIHLFTLTNLGAPAAFKYFDTTIDRKRYTSTKEVLDATLIHQSITGLYETRIDLSQLGGDGGGGGGGSPAPGGTLGDQGSRGSDPLPEPRVTLTVEGIPTEFLVNTGAEHSVLTKPMGKMGSKRTVVAGATGSKVYPWTTKRLLKIGQKQVTHSFLVIPECPAPLLGRDLLTKLKAQIQFSTEGPQVTWEDRPAMCLVLNLEEEYRLHEKPVPPSIDPSWLQLFPMVWAEKAGMGLANQVPPVVVELKSDASPVAVRQYPMSKEAREGIRPHIQRFLDLGILVPCQSPWNTPLLPVKKPGTNDYRPVQDLREVNKRVQDIHPTVPNPYNLLSSLPPSHTWYSVLDLKDAFFCLKLHPNSQPLFAFEWRDPEKGNTGQLTWTRLPQGFKNSPTLFNEALHRDLASFRALNPQVVMLQYVDDLLVAAPTYRDCKEGTRRLLQELSKLGYRVSAKKAQLCREEVTYLGYLLKGGKRWLTPARKATVMKIPTPTTPRQVREFLGKAGFCRLFIPGFASLAAPLYPLTRPKVPFTWTEAHQEAFGRIKEALLSAPALALPDLTKPFALYVDEKEGVARGVLTQTLGPWRRPVAYLSKKLDPVASGWPTCLKAIAAVALLLKDADKLTLGQNVLVIAPHNLESIVRQPPDRWMTNARMTHYQSLLLNERVSFAPPAILNPATLLPVESDDTPIHICSEILAEETGTRPDLRDQPLPGVPAWYTDGSSFIMDGRRQAGAAIVDNKRTVWASNLPEGTSAQKAELIALTQALRLAEGKSINIYTDSRYAFATAHVHGAIYKQRGWLTSAGKDIKNKEEILALLEAIHLPKRVAIIHCPGHQRGTDPVATGNRKADEAAKQAAQSTRILTETTKNAGKRTADGSEFEKRTADGSEFESPKKKAKVE

SEQ ID NO: 1835 - protein, 2216 aa, synthetic construct
  source 1..2216: note = Description of Artificial Sequence: Synthetic polypeptide
MPAAKRVKLDGGDKKYSIGLDIGTNSVGWAVITDEYKVPSKKFKVLGNTDRHSIKKNLIGALLFDSGETAEATRLKRTARRRYTRRKNRICYLQEIFSNEMAKVDDSFFHRLEESFLVEEDKKHERHPIFGNIVDEVAYHEKYPTIYHLRKKLVDSTDKADLRLIYLALAHMIKFRGHFLIEGDLNPDNSDVDKLFIQLVQTYNQLFEENPINASGVDAKAILSARLSKSRRLENLIAQLPGEKKNGLFGNLIALSLGLTPNFKSNFDLAEDAKLQLSKDTYDDDLDNLLAQIGDQYADLFLAAKNLSDAILLSDILRVNTEITKAPLSASMIKRYDEHHQDLTLLKALVRQQLPEKYKEIFFDQSKNGYAGYIDGGASQEEFYKFIKPILEKMDGTEELLVKLNREDLLRKQRTFDNGSIPHQIHLGELHAILRRQEDFYPFLKDNREKIEKILTFRIPYYVGPLARGNSRFAWMTRKSEETITPWNFEEVVDKGASAQSFIERMTNFDKNLPNEKVLPKHSLLYEYFTVYNELTKVKYVTEGMRKPAFLSGEQKKAIVDLLFKTNRKVTVKQLKEDYFKKIECFDSVEISGVEDRFNASLGTYHDLLKIIKDKDFLDNEENEDILEDIVLTLTLFEDREMIEERLKTYAHLFDDKVMKQLKRRRYTGWGRLSRKLINGIRDKQSGKTILDFLKSDGFANRNFMQLIHDDSLTFKEDIQKAQVSGQGDSLHEHIANLAGSPAIKKGILQTVKVVDELVKVMGRHKPENIVIEMARENQTTQKGQKNSRERMKRIEEGIKELGSQILKEHPVENTQLQNEKLYLYYLQNGRDMYVDQELDINRLSDYDVDHIVPQSFLKDDSIDNKVLTRSDKARGKSDNVPSEEVVKKMKNYWRQLLNAKLITQRKFDNLTKAERGGLSELDKAGFIKRQLVETRQITKHVAQILDSRMNTKYDENDKLIREVKVITLKSKLVSDFRKDFQFYKVREINNYHHAHDAYLNAVVGTALIKKYPKLESEFVYGDYKVYDVRKMIAKSEQEIGKATAKYFFYSNIMNFFKTEITLANGEIRKRPLIETNGETGEIVWDKGRDFATVRKVLSMPQVNIVKKTEVQTGGFSKESILPKRNSDKLIARKKDWDPKKYGGFDSPTVAYSVLVVAKVEKGKSKKLKSVKELLGITIMERSSFEKNPIDFLEAKGYKEVKKDLIIKLPKYSLFELENGRKRMLASAGELQKGNELALPSKYVNFLYLASHYEKLKGSPEDNEQKQLFVEQHKHYLDEIIEQISEFSKRVILADANLDKVLSAYNKHRDKPIREQAENIIHLFTLTNLGAPAAFKYFDTTIDRKRYTSTKEVLDATLIHQSITGLYETRIDLSQLGGDGGPAPGGGGGSGGTLGDQGSRGSDPLPEPRVTLTVEGIPTEFLVNTGAEHSVLTKPMGKMGSKRTVVAGATGSKVYPWTTKRLLKIGQKQVTHSFLVIPECPAPLLGRDLLTKLKAQIQFSTEGPQVTWEDRPAMCLVLNLEEEYRLHEKPVPPSIDPSWLQLFPMVWAEKAGMGLANQVPPVVVELKSDASPVAVRQYPMSKEAREGIRPHIQRFLDLGILVPCQSPWNTPLLPVKKPGTNDYRPVQDLREVNKRVQDIHPTVPNPYNLLSSLPPSHTWYSVLDLKDAFFCLKLHPNSQPLFAFEWRDPEKGNTGQLTWTRLPQGFKNSPTLFNEALHRDLASFRALNPQVVMLQYVDDLLVAAPTYRDCKEGTRRLLQELSKLGYRVSAKKAQLCREEVTYLGYLLKGGKRWLTPARKATVMKIPTPTTPRQVREFLGKAGFCRLFIPGFASLAAPLYPLTRPKVPFTWTEAHQEAFGRIKEALLSAPALALPDLTKPFALYVDEKEGVARGVLTQTLGPWRRPVAYLSKKLDPVASGWPTCLKAIAAVALLLKDADKLTLGQNVLVIAPHNLESIVRQPPDRWMTNARMTHYQSLLLNERVSFAPPAILNPATLLPVESDDTPIHICSEILAEETGTRPDLRDQPLPGVPAWYTDGSSFIMDGRRQAGAAIVDNKRTVWASNLPEGTSAQKAELIALTQALRLAEGKSINIYTDSRYAFATAHVHGAIYKQRGWLTSAGKDIKNKEEILALLEAIHLPKRVAIIHCPGHQRGTDPVATGNRKADEAAKQAAQSTRILTETTKNAGKRTADGSEFEKRTADGSEFESPKKKAKVE

SEQ ID NO: 1836 - protein, 2118 aa, synthetic construct
  source 1..2118: note = Description of Artificial Sequence: Synthetic polypeptide
MPAAKRVKLDGGDKKYSIGLDIGTNSVGWAVITDEYKVPSKKFKVLGNTDRHSIKKNLIGALLFDSGETAEATRLKRTARRRYTRRKNRICYLQEIFSNEMAKVDDSFFHRLEESFLVEEDKKHERHPIFGNIVDEVAYHEKYPTIYHLRKKLVDSTDKADLRLIYLALAHMIKFRGHFLIEGDLNPDNSDVDKLFIQLVQTYNQLFEENPINASGVDAKAILSARLSKSRRLENLIAQLPGEKKNGLFGNLIALSLGLTPNFKSNFDLAEDAKLQLSKDTYDDDLDNLLAQIGDQYADLFLAAKNLSDAILLSDILRVNTEITKAPLSASMIKRYDEHHQDLTLLKALVRQQLPEKYKEIFFDQSKNGYAGYIDGGASQEEFYKFIKPILEKMDGTEELLVKLNREDLLRKQRTFDNGSIPHQIHLGELHAILRRQEDFYPFLKDNREKIEKILTFRIPYYVGPLARGNSRFAWMTRKSEETITPWNFEEVVDKGASAQSFIERMTNFDKNLPNEKVLPKHSLLYEYFTVYNELTKVKYVTEGMRKPAFLSGEQKKAIVDLLFKTNRKVTVKQLKEDYFKKIECFDSVEISGVEDRFNASLGTYHDLLKIIKDKDFLDNEENEDILEDIVLTLTLFEDREMIEERLKTYAHLFDDKVMKQLKRRRYTGWGRLSRKLINGIRDKQSGKTILDFLKSDGFANRNFMQLIHDDSLTFKEDIQKAQVSGQGDSLHEHIANLAGSPAIKKGILQTVKVVDELVKVMGRHKPENIVIEMARENQTTQKGQKNSRERMKRIEEGIKELGSQILKEHPVENTQLQNEKLYLYYLQNGRDMYVDQELDINRLSDYDVDHIVPQSFLKDDSIDNKVLTRSDKARGKSDNVPSEEVVKKMKNYWRQLLNAKLITQRKFDNLTKAERGGLSELDKAGFIKRQLVETRQITKHVAQILDSRMNTKYDENDKLIREVKVITLKSKLVSDFRKDFQFYKVREINNYHHAHDAYLNAVVGTALIKKYPKLESEFVYGDYKVYDVRKMIAKSEQEIGKATAKYFFYSNIMNFFKTEITLANGEIRKRPLIETNGETGEIVWDKGRDFATVRKVLSMPQVNIVKKTEVQTGGFSKESILPKRNSDKLIARKKDWDPKKYGGFDSPTVAYSVLVVAKVEKGKSKKLKSVKELLGITIMERSSFEKNPIDFLEAKGYKEVKKDLIIKLPKYSLFELENGRKRMLASAGELQKGNELALPSKYVNFLYLASHYEKLKGSPEDNEQKQLFVEQHKHYLDEIIEQISEFSKRVILADANLDKVLSAYNKHRDKPIREQAENIIHLFTLTNLGAPAAFKYFDTTIDRKRYTSTKEVLDATLIHQSITGLYETRIDLSQLGGDGGSGGSSGGSSGSETPGTSESATPESSGGSSGGSSGGTLNLEDEYRLYETSAEPEVSPGSTWLSDFPQAWAETGGMGLAVRQAPLIIPLKATSTPVSIKQYPMSQEAKLGIKPHIQRLLDQGILVPCQSPWNTPLLPVKKPGTNDYRPVQDLREVNKRVEDIHPTVPNPYNLLSGLPPSHRWYTVLDLKDAFFCLRLHPTSQPLFAFEWRDPGMGISGQLTWTRLPQGFKNSPTLFDEALHRDLADFRIQHPDLILLQYVDDILLAATSELDCQQGTRALLLTLGNLGYRASAKKAQLCQKQVKYLGYLLKEGQRWLTEARKETVMGQPTPKTPRQLREFLGTAGFCRLWIPGFAEMAAPLYPLTKTGTLFNWGPDQQKAYQEIKQALLTAPALGLPDLTKPFELFVDEKQGYAKGVLTQKLGPWRRPVAYLSKKLDPVAAGWPPCLRMVAAIAVLRKDAGKLTMGQPLVILAPHAVEALVKQPPDRWLSNARMTHYQAMLLDTDRVQFGPVVALNPATLLPLPEEGAPHDCLEILAETHGTRPDLTDQPIPDADHTWYTDGSSFLQEGQRKAGAAVTTETEVIWARALPAGTSAQRAELIALTQALKMAEGKRLNVYTDSRYAFATAHIHGEIYRRRGLLTSEGREIKNKSEILALLKALFLPKRLSIIHCLGHQKGDSAEARGNRLADQAAREAAIKTPPDTSTLLAGKRTADGSEFEKRTADGSEFESPKKKAKVE

SEQ ID NO: 1837 - protein, 2105 aa, synthetic construct
  source 1..2105: note = Description of Artificial Sequence: Synthetic polypeptide
MPAAKRVKLDGGDKKYSIGLDIGTNSVGWAVITDEYKVPSKKFKVLGNTDRHSIKKNLIGALLFDSGETAEATRLKRTARRRYTRRKNRICYLQEIFSNEMAKVDDSFFHRLEESFLVEEDKKHERHPIFGNIVDEVAYHEKYPTIYHLRKKLVDSTDKADLRLIYLALAHMIKFRGHFLIEGDLNPDNSDVDKLFIQLVQTYNQLFEENPINASGVDAKAILSARLSKSRRLENLIAQLPGEKKNGLFGNLIALSLGLTPNFKSNFDLAEDAKLQLSKDTYDDDLDNLLAQIGDQYADLFLAAKNLSDAILLSDILRVNTEITKAPLSASMIKRYDEHHQDLTLLKALVRQQLPEKYKEIFFDQSKNGYAGYIDGGASQEEFYKFIKPILEKMDGTEELLVKLNREDLLRKQRTFDNGSIPHQIHLGELHAILRRQEDFYPFLKDNREKIEKILTFRIPYYVGPLARGNSRFAWMTRKSEETITPWNFEEVVDKGASAQSFIERMTNFDKNLPNEKVLPKHSLLYEYFTVYNELTKVKYVTEGMRKPAFLSGEQKKAIVDLLFKTNRKVTVKQLKEDYFKKIECFDSVEISGVEDRFNASLGTYHDLLKIIKDKDFLDNEENEDILEDIVLTLTLFEDREMIEERLKTYAHLFDDKVMKQLKRRRYTGWGRLSRKLINGIRDKQSGKTILDFLKSDGFANRNFMQLIHDDSLTFKEDIQKAQVSGQGDSLHEHIANLAGSPAIKKGILQTVKVVDELVKVMGRHKPENIVIEMARENQTTQKGQKNSRERMKRIEEGIKELGSQILKEHPVENTQLQNEKLYLYYLQNGRDMYVDQELDINRLSDYDVDHIVPQSFLKDDSIDNKVLTRSDKARGKSDNVPSEEVVKKMKNYWRQLLNAKLITQRKFDNLTKAERGGLSELDKAGFIKRQLVETRQITKHVAQILDSRMNTKYDENDKLIREVKVITLKSKLVSDFRKDFQFYKVREINNYHHAHDAYLNAVVGTALIKKYPKLESEFVYGDYKVYDVRKMIAKSEQEIGKATAKYFFYSNIMNFFKTEITLANGEIRKRPLIETNGETGEIVWDKGRDFATVRKVLSMPQVNIVKKTEVQTGGFSKESILPKRNSDKLIARKKDWDPKKYGGFDSPTVAYSVLVVAKVEKGKSKKLKSVKELLGITIMERSSFEKNPIDFLEAKGYKEVKKDLIIKLPKYSLFELENGRKRMLASAGELQKGNELALPSKYVNFLYLASHYEKLKGSPEDNEQKQLFVEQHKHYLDEIIEQISEFSKRVILADANLDKVLSAYNKHRDKPIREQAENIIHLFTLTNLGAPAAFKYFDTTIDRKRYTSTKEVLDATLIHQSITGLYETRIDLSQLGGDGGEAAAKEAAAKEAAAKEAAAKGGTLNLEDEYRLYETSAEPEVSPGSTWLSDFPQAWAETGGMGLAVRQAPLIIPLKATSTPVSIKQYPMSQEAKLGIKPHIQRLLDQGILVPCQSPWNTPLLPVKKPGTNDYRPVQDLREVNKRVEDIHPTVPNPYNLLSGLPPSHRWYTVLDLKDAFFCLRLHPTSQPLFAFEWRDPGMGISGQLTWTRLPQGFKNSPTLFDEALHRDLADFRIQHPDLILLQYVDDILLAATSELDCQQGTRALLLTLGNLGYRASAKKAQLCQKQVKYLGYLLKEGQRWLTEARKETVMGQPTPKTPRQLREFLGTAGFCRLWIPGFAEMAAPLYPLTKTGTLFNWGPDQQKAYQEIKQALLTAPALGLPDLTKPFELFVDEKQGYAKGVLTQKLGPWRRPVAYLSKKLDPVAAGWPPCLRMVAAIAVLRKDAGKLTMGQPLVILAPHAVEALVKQPPDRWLSNARMTHYQAMLLDTDRVQFGPVVALNPATLLPLPEEGAPHDCLEILAETHGTRPDLTDQPIPDADHTWYTDGSSFLQEGQRKAGAAVTTETEVIWARALPAGTSAQRAELIALTQALKMAEGKRLNVYTDSRYAFATAHIHGEIYRRRGLLTSEGREIKNKSEILALLKALFLPKRLSIIHCLGHQKGDSAEARGNRLADQAAREAAIKTPPDTSTLLAGKRTADGSEFEKRTADGSEFESPKKKAKVE

SEQ ID NO: 1838 - protein, 2094 aa, synthetic construct
  source 1..2094: note = Description of Artificial Sequence: Synthetic polypeptide
MPAAKRVKLDGGDKKYSIGLDIGTNSVGWAVITDEYKVPSKKFKVLGNTDRHSIKKNLIGALLFDSGETAEATRLKRTARRRYTRRKNRICYLQEIFSNEMAKVDDSFFHRLEESFLVEEDKKHERHPIFGNIVDEVAYHEKYPTIYHLRKKLVDSTDKADLRLIYLALAHMIKFRGHFLIEGDLNPDNSDVDKLFIQLVQTYNQLFEENPINASGVDAKAILSARLSKSRRLENLIAQLPGEKKNGLFGNLIALSLGLTPNFKSNFDLAEDAKLQLSKDTYDDDLDNLLAQIGDQYADLFLAAKNLSDAILLSDILRVNTEITKAPLSASMIKRYDEHHQDLTLLKALVRQQLPEKYKEIFFDQSKNGYAGYIDGGASQEEFYKFIKPILEKMDGTEELLVKLNREDLLRKQRTFDNGSIPHQIHLGELHAILRRQEDFYPFLKDNREKIEKILTFRIPYYVGPLARGNSRFAWMTRKSEETITPWNFEEVVDKGASAQSFIERMTNFDKNLPNEKVLPKHSLLYEYFTVYNELTKVKYVTEGMRKPAFLSGEQKKAIVDLLFKTNRKVTVKQLKEDYFKKIECFDSVEISGVEDRFNASLGTYHDLLKIIKDKDFLDNEENEDILEDIVLTLTLFEDREMIEERLKTYAHLFDDKVMKQLKRRRYTGWGRLSRKLINGIRDKQSGKTILDFLKSDGFANRNFMQLIHDDSLTFKEDIQKAQVSGQGDSLHEHIANLAGSPAIKKGILQTVKVVDELVKVMGRHKPENIVIEMARENQTTQKGQKNSRERMKRIEEGIKELGSQILKEHPVENTQLQNEKLYLYYLQNGRDMYVDQELDINRLSDYDVDHIVPQSFLKDDSIDNKVLTRSDKARGKSDNVPSEEVVKKMKNYWRQLLNAKLITQRKFDNLTKAERGGLSELDKAGFIKRQLVETRQITKHVAQILDSRMNTKYDENDKLIREVKVITLKSKLVSDFRKDFQFYKVREINNYHHAHDAYLNAVVGTALIKKYPKLESEFVYGDYKVYDVRKMIAKSEQEIGKATAKYFFYSNIMNFFKTEITLANGEIRKRPLIETNGETGEIVWDKGRDFATVRKVLSMPQVNIVKKTEVQTGGFSKESILPKRNSDKLIARKKDWDPKKYGGFDSPTVAYSVLVVAKVEKGKSKKLKSVKELLGITIMERSSFEKNPIDFLEAKGYKEVKKDLIIKLPKYSLFELENGRKRMLASAGELQKGNELALPSKYVNFLYLASHYEKLKGSPEDNEQKQLFVEQHKHYLDEIIEQISEFSKRVILADANLDKVLSAYNKHRDKPIREQAENIIHLFTLTNLGAPAAFKYFDTTIDRKRYTSTKEVLDATLIHQSITGLYETRIDLSQLGGDGGGSSGGGPAPGGTLNLEDEYRLYETSAEPEVSPGSTWLSDFPQAWAETGGMGLAVRQAPLIIPLKATSTPVSIKQYPMSQEAKLGIKPHIQRLLDQGILVPCQSPWNTPLLPVKKPGTNDYRPVQDLREVNKRVEDIHPTVPNPYNLLSGLPPSHRWYTVLDLKDAFFCLRLHPTSQPLFAFEWRDPGMGISGQLTWTRLPQGFKNSPTLFDEALHRDLADFRIQHPDLILLQYVDDILLAATSELDCQQGTRALLLTLGNLGYRASAKKAQLCQKQVKYLGYLLKEGQRWLTEARKETVMGQPTPKTPRQLREFLGTAGFCRLWIPGFAEMAAPLYPLTKTGTLFNWGPDQQKAYQEIKQALLTAPALGLPDLTKPFELFVDEKQGYAKGVLTQKLGPWRRPVAYLSKKLDPVAAGWPPCLRMVAAIAVLRKDAGKLTMGQPLVILAPHAVEALVKQPPDRWLSNARMTHYQAMLLDTDRVQFGPVVALNPATLLPLPEEGAPHDCLEILAETHGTRPDLTDQPIPDADHTWYTDGSSFLQEGQRKAGAAVTTETEVIWARALPAGTSAQRAELIALTQALKMAEGKRLNVYTDSRYAFATAHIHGEIYRRRGLLTSEGREIKNKSEILALLKALFLPKRLSIIHCLGHQKGDSAEARGNRLADQAAREAAIKTPPDTSTLLAGKRTADGSEFEKRTADGSEFESPKKKAKVE

SEQ ID NO: 1839 - protein, 2096 aa, synthetic construct
  source 1..2096: note = Description of Artificial Sequence: Synthetic polypeptide
MPAAKRVKLDGGDKKYSIGLDIGTNSVGWAVITDEYKVPSKKFKVLGNTDRHSIKKNLIGALLFDSGETAEATRLKRTARRRYTRRKNRICYLQEIFSNEMAKVDDSFFHRLEESFLVEEDKKHERHPIFGNIVDEVAYHEKYPTIYHLRKKLVDSTDKADLRLIYLALAHMIKFRGHFLIEGDLNPDNSDVDKLFIQLVQTYNQLFEENPINASGVDAKAILSARLSKSRRLENLIAQLPGEKKNGLFGNLIALSLGLTPNFKSNFDLAEDAKLQLSKDTYDDDLDNLLAQIGDQYADLFLAAKNLSDAILLSDILRVNTEITKAPLSASMIKRYDEHHQDLTLLKALVRQQLPEKYKEIFFDQSKNGYAGYIDGGASQEEFYKFIKPILEKMDGTEELLVKLNREDLLRKQRTFDNGSIPHQIHLGELHAILRRQEDFYPFLKDNREKIEKILTFRIPYYVGPLARGNSRFAWMTRKSEETITPWNFEEVVDKGASAQSFIERMTNFDKNLPNEKVLPKHSLLYEYFTVYNELTKVKYVTEGMRKPAFLSGEQKKAIVDLLFKTNRKVTVKQLKEDYFKKIECFDSVEISGVEDRFNASLGTYHDLLKIIKDKDFLDNEENEDILEDIVLTLTLFEDREMIEERLKTYAHLFDDKVMKQLKRRRYTGWGRLSRKLINGIRDKQSGKTILDFLKSDGFANRNFMQLIHDDSLTFKEDIQKAQVSGQGDSLHEHIANLAGSPAIKKGILQTVKVVDELVKVMGRHKPENIVIEMARENQTTQKGQKNSRERMKRIEEGIKELGSQILKEHPVENTQLQNEKLYLYYLQNGRDMYVDQELDINRLSDYDVDHIVPQSFLKDDSIDNKVLTRSDKARGKSDNVPSEEVVKKMKNYWRQLLNAKLITQRKFDNLTKAERGGLSELDKAGFIKRQLVETRQITKHVAQILDSRMNTKYDENDKLIREVKVITLKSKLVSDFRKDFQFYKVREINNYHHAHDAYLNAVVGTALIKKYPKLESEFVYGDYKVYDVRKMIAKSEQEIGKATAKYFFYSNIMNFFKTEITLANGEIRKRPLIETNGETGEIVWDKGRDFATVRKVLSMPQVNIVKKTEVQTGGFSKESILPKRNSDKLIARKKDWDPKKYGGFDSPTVAYSVLVVAKVEKGKSKKLKSVKELLGITIMERSSFEKNPIDFLEAKGYKEVKKDLIIKLPKYSLFELENGRKRMLASAGELQKGNELALPSKYVNFLYLASHYEKLKGSPEDNEQKQLFVEQHKHYLDEIIEQISEFSKRVILADANLDKVLSAYNKHRDKPIREQAENIIHLFTLTNLGAPAAFKYFDTTIDRKRYTSTKEVLDATLIHQSITGLYETRIDLSQLGGDGGEAAAKGGGPAPGGTLNLEDEYRLYETSAEPEVSPGSTWLSDFPQAWAETGGMGLAVRQAPLIIPLKATSTPVSIKQYPMSQEAKLGIKPHIQRLLDQGILVPCQSPWNTPLLPVKKPGTNDYRPVQDLREVNKRVEDIHPTVPNPYNLLSGLPPSHRWYTVLDLKDAFFCLRLHPTSQPLFAFEWRDPGMGISGQLTWTRLPQGFKNSPTLFDEALHRDLADFRIQHPDLILLQYVDDILLAATSELDCQQGTRALLLTLGNLGYRASAKKAQLCQKQVKYLGYLLKEGQRWLTEARKETVMGQPTPKTPRQLREFLGTAGFCRLWIPGFAEMAAPLYPLTKTGTLFNWGPDQQKAYQEIKQALLTAPALGLPDLTKPFELFVDEKQGYAKGVLTQKLGPWRRPVAYLSKKLDPVAAGWPPCLRMVAAIAVLRKDAGKLTMGQPLVILAPHAVEALVKQPPDRWLSNARMTHYQAMLLDTDRVQFGPVVALNPATLLPLPEEGAPHDCLEILAETHGTRPDLTDQPIPDADHTWYTDGSSFLQEGQRKAGAAVTTETEVIWARALPAGTSAQRAELIALTQALKMAEGKRLNVYTDSRYAFATAHIHGEIYRRRGLLTSEGREIKNKSEILALLKALFLPKRLSIIHCLGHQKGDSAEARGNRLADQAAREAAIKTPPDTSTLLAGKRTADGSEFEKRTADGSEFESPKKKAKVE

SEQ ID NO: 1840 - protein, 2096 aa, synthetic construct
  source 1..2096: note = Description of Artificial Sequence: Synthetic polypeptide
MPAAKRVKLDGGDKKYSIGLDIGTNSVGWAVITDEYKVPSKKFKVLGNTDRHSIKKNLIGALLFDSGETAEATRLKRTARRRYTRRKNRICYLQEIFSNEMAKVDDSFFHRLEESFLVEEDKKHERHPIFGNIVDEVAYHEKYPTIYHLRKKLVDSTDKADLRLIYLALAHMIKFRGHFLIEGDLNPDNSDVDKLFIQLVQTYNQLFEENPINASGVDAKAILSARLSKSRRLENLIAQLPGEKKNGLFGNLIALSLGLTPNFKSNFDLAEDAKLQLSKDTYDDDLDNLLAQIGDQYADLFLAAKNLSDAILLSDILRVNTEITKAPLSASMIKRYDEHHQDLTLLKALVRQQLPEKYKEIFFDQSKNGYAGYIDGGASQEEFYKFIKPILEKMDGTEELLVKLNREDLLRKQRTFDNGSIPHQIHLGELHAILRRQEDFYPFLKDNREKIEKILTFRIPYYVGPLARGNSRFAWMTRKSEETITPWNFEEVVDKGASAQSFIERMTNFDKNLPNEKVLPKHSLLYEYFTVYNELTKVKYVTEGMRKPAFLSGEQKKAIVDLLFKTNRKVTVKQLKEDYFKKIECFDSVEISGVEDRFNASLGTYHDLLKIIKDKDFLDNEENEDILEDIVLTLTLFEDREMIEERLKTYAHLFDDKVMKQLKRRRYTGWGRLSRKLINGIRDKQSGKTILDFLKSDGFANRNFMQLIHDDSLTFKEDIQKAQVSGQGDSLHEHIANLAGSPAIKKGILQTVKVVDELVKVMGRHKPENIVIEMARENQTTQKGQKNSRERMKRIEEGIKELGSQILKEHPVENTQLQNEKLYLYYLQNGRDMYVDQELDINRLSDYDVDHIVPQSFLKDDSIDNKVLTRSDKARGKSDNVPSEEVVKKMKNYWRQLLNAKLITQRKFDNLTKAERGGLSELDKAGFIKRQLVETRQITKHVAQILDSRMNTKYDENDKLIREVKVITLKSKLVSDFRKDFQFYKVREINNYHHAHDAYLNAVVGTALIKKYPKLESEFVYGDYKVYDVRKMIAKSEQEIGKATAKYFFYSNIMNFFKTEITLANGEIRKRPLIETNGETGEIVWDKGRDFATVRKVLSMPQVNIVKKTEVQTGGFSKESILPKRNSDKLIARKKDWDPKKYGGFDSPTVAYSVLVVAKVEKGKSKKLKSVKELLGITIMERSSFEKNPIDFLEAKGYKEVKKDLIIKLPKYSLFELENGRKRMLASAGELQKGNELALPSKYVNFLYLASHYEKLKGSPEDNEQKQLFVEQHKHYLDEIIEQISEFSKRVILADANLDKVLSAYNKHRDKPIREQAENIIHLFTLTNLGAPAAFKYFDTTIDRKRYTSTKEVLDATLIHQSITGLYETRIDLSQLGGDGGGGGPAPEAAAKGGTLNLEDEYRLYETSAEPEVSPGSTWLSDFPQAWAETGGMGLAVRQAPLIIPLKATSTPVSIKQYPMSQEAKLGIKPHIQRLLDQGILVPCQSPWNTPLLPVKKPGTNDYRPVQDLREVNKRVEDIHPTVPNPYNLLSGLPPSHRWYTVLDLKDAFFCLRLHPTSQPLFAFEWRDPGMGISGQLTWTRLPQGFKNSPTLFDEALHRDLADFRIQHPDLILLQYVDDILLAATSELDCQQGTRALLLTLGNLGYRASAKKAQLCQKQVKYLGYLLKEGQRWLTEARKETVMGQPTPKTPRQLREFLGTAGFCRLWIPGFAEMAAPLYPLTKTGTLFNWGPDQQKAYQEIKQALLTAPALGLPDLTKPFELFVDEKQGYAKGVLTQKLGPWRRPVAYLSKKLDPVAAGWPPCLRMVAAIAVLRKDAGKLTMGQPLVILAPHAVEALVKQPPDRWLSNARMTHYQAMLLDTDRVQFGPVVALNPATLLPLPEEGAPHDCLEILAETHGTRPDLTDQPIPDADHTWYTDGSSFLQEGQRKAGAAVTTETEVIWARALPAGTSAQRAELIALTQALKMAEGKRLNVYTDSRYAFATAHIHGEIYRRRGLLTSEGREIKNKSEILALLKALFLPKRLSIIHCLGHQKGDSAEARGNRLADQAAREAAIKTPPDTSTLLAGKRTADGSEFEKRTADGSEFESPKKKAKVE

SEQ ID NO: 1841 - protein, 2096 aa, synthetic construct
  source 1..2096: note = Description of Artificial Sequence: Synthetic polypeptide
MPAAKRVKLDGGDKKYSIGLDIGTNSVGWAVITDEYKVPSKKFKVLGNTDRHSIKKNLIGALLFDSGETAEATRLKRTARRRYTRRKNRICYLQEIFSNEMAKVDDSFFHRLEESFLVEEDKKHERHPIFGNIVDEVAYHEKYPTIYHLRKKLVDSTDKADLRLIYLALAHMIKFRGHFLIEGDLNPDNSDVDKLFIQLVQTYNQLFEENPINASGVDAKAILSARLSKSRRLENLIAQLPGEKKNGLFGNLIALSLGLTPNFKSNFDLAEDAKLQLSKDTYDDDLDNLLAQIGDQYADLFLAAKNLSDAILLSDILRVNTEITKAPLSASMIKRYDEHHQDLTLLKALVRQQLPEKYKEIFFDQSKNGYAGYIDGGASQEEFYKFIKPILEKMDGTEELLVKLNREDLLRKQRTFDNGSIPHQIHLGELHAILRRQEDFYPFLKDNREKIEKILTFRIPYYVGPLARGNSRFAWMTRKSEETITPWNFEEVVDKGASAQSFIERMTNFDKNLPNEKVLPKHSLLYEYFTVYNELTKVKYVTEGMRKPAFLSGEQKKAIVDLLFKTNRKVTVKQLKEDYFKKIECFDSVEISGVEDRFNASLGTYHDLLKIIKDKDFLDNEENEDILEDIVLTLTLFEDREMIEERLKTYAHLFDDKVMKQLKRRRYTGWGRLSRKLINGIRDKQSGKTILDFLKSDGFANRNFMQLIHDDSLTFKEDIQKAQVSGQGDSLHEHIANLAGSPAIKKGILQTVKVVDELVKVMGRHKPENIVIEMARENQTTQKGQKNSRERMKRIEEGIKELGSQILKEHPVENTQLQNEKLYLYYLQNGRDMYVDQELDINRLSDYDVDHIVPQSFLKDDSIDNKVLTRSDKARGKSDNVPSEEVVKKMKNYWRQLLNAKLITQRKFDNLTKAERGGLSELDKAGFIKRQLVETRQITKHVAQILDSRMNTKYDENDKLIREVKVITLKSKLVSDFRKDFQFYKVREINNYHHAHDAYLNAVVGTALIKKYPKLESEFVYGDYKVYDVRKMIAKSEQEIGKATAKYFFYSNIMNFFKTEITLANGEIRKRPLIETNGETGEIVWDKGRDFATVRKVLSMPQVNIVKKTEVQTGGFSKESILPKRNSDKLIARKKDWDPKKYGGFDSPTVAYSVLVVAKVEKGKSKKLKSVKELLGITIMERSSFEKNPIDFLEAKGYKEVKKDLIIKLPKYSLFELENGRKRMLASAGELQKGNELALPSKYVNFLYLASHYEKLKGSPEDNEQKQLFVEQHKHYLDEIIEQISEFSKRVILADANLDKVLSAYNKHRDKPIREQAENIIHLFTLTNLGAPAAFKYFDTTIDRKRYTSTKEVLDATLIHQSITGLYETRIDLSQLGGDGGEAAAKGGGGGSGGTLNLEDEYRLYETSAEPEVSPGSTWLSDFPQAWAETGGMGLAVRQAPLIIPLKATSTPVSIKQYPMSQEAKLGIKPHIQRLLDQGILVPCQSPWNTPLLPVKKPGTNDYRPVQDLREVNKRVEDIHPTVPNPYNLLSGLPPSHRWYTVLDLKDAFFCLRLHPTSQPLFAFEWRDPGMGISGQLTWTRLPQGFKNSPTLFDEALHRDLADFRIQHPDLILLQYVDDILLAATSELDCQQGTRALLLTLGNLGYRASAKKAQLCQKQVKYLGYLLKEGQRWLTEARKETVMGQPTPKTPRQLREFLGTAGFCRLWIPGFAEMAAPLYPLTKTGTLFNWGPDQQKAYQEIKQALLTAPALGLPDLTKPFELFVDEKQGYAKGVLTQKLGPWRRPVAYLSKKLDPVAAGWPPCLRMVAAIAVLRKDAGKLTMGQPLVILAPHAVEALVKQPPDRWLSNARMTHYQAMLLDTDRVQFGPVVALNPATLLPLPEEGAPHDCLEILAETHGTRPDLTDQPIPDADHTWYTDGSSFLQEGQRKAGAAVTTETEVIWARALPAGTSAQRAELIALTQALKMAEGKRLNVYTDSRYAFATAHIHGEIYRRRGLLTSEGREIKNKSEILALLKALFLPKRLSIIHCLGHQKGDSAEARGNRLADQAAREAAIKTPPDTSTLLAGKRTADGSEFEKRTADGSEFESPKKKAKVE

SEQ ID NO: 1842 - protein, 2096 aa, synthetic construct
  source 1..2096: note = Description of Artificial Sequence: Synthetic polypeptide
MPAAKRVKLDGGDKKYSIGLDIGTNSVGWAVITDEYKVPSKKFKVLGNTDRHSIKKNLIGALLFDSGETAEATRLKRTARRRYTRRKNRICYLQEIFSNEMAKVDDSFFHRLEESFLVEEDKKHERHPIFGNIVDEVAYHEKYPTIYHLRKKLVDSTDKADLRLIYLALAHMIKFRGHFLIEGDLNPDNSDVDKLFIQLVQTYNQLFEENPINASGVDAKAILSARLSKSRRLENLIAQLPGEKKNGLFGNLIALSLGLTPNFKSNFDLAEDAKLQLSKDTYDDDLDNLLAQIGDQYADLFLAAKNLSDAILLSDILRVNTEITKAPLSASMIKRYDEHHQDLTLLKALVRQQLPEKYKEIFFDQSKNGYAGYIDGGASQEEFYKFIKPILEKMDGTEELLVKLNREDLLRKQRTFDNGSIPHQIHLGELHAILRRQEDFYPFLKDNREKIEKILTFRIPYYVGPLARGNSRFAWMTRKSEETITPWNFEEVVDKGASAQSFIERMTNFDKNLPNEKVLPKHSLLYEYFTVYNELTKVKYVTEGMRKPAFLSGEQKKAIVDLLFKTNRKVTVKQLKEDYFKKIECFDSVEISGVEDRFNASLGTYHDLLKIIKDKDFLDNEENEDILEDIVLTLTLFEDREMIEERLKTYAHLFDDKVMKQLKRRRYTGWGRLSRKLINGIRDKQSGKTILDFLKSDGFANRNFMQLIHDDSLTFKEDIQKAQVSGQGDSLHEHIANLAGSPAIKKGILQTVKVVDELVKVMGRHKPENIVIEMARENQTTQKGQKNSRERMKRIEEGIKELGSQILKEHPVENTQLQNEKLYLYYLQNGRDMYVDQELDINRLSDYDVDHIVPQSFLKDDSIDNKVLTRSDKARGKSDNVPSEEVVKKMKNYWRQLLNAKLITQRKFDNLTKAERGGLSELDKAGFIKRQLVETRQITKHVAQILDSRMNTKYDENDKLIREVKVITLKSKLVSDFRKDFQFYKVREINNYHHAHDAYLNAVVGTALIKKYPKLESEFVYGDYKVYDVRKMIAKSEQEIGKATAKYFFYSNIMNFFKTEITLANGEIRKRPLIETNGETGEIVWDKGRDFATVRKVLSMPQVNIVKKTEVQTGGFSKESILPKRNSDKLIARKKDWDPKKYGGFDSPTVAYSVLVVAKVEKGKSKKLKSVKELLGITIMERSSFEKNPIDFLEAKGYKEVKKDLIIKLPKYSLFELENGRKRMLASAGELQKGNELALPSKYVNFLYLASHYEKLKGSPEDNEQKQLFVEQHKHYLDEIIEQISEFSKRVILADANLDKVLSAYNKHRDKPIREQAENIIHLFTLTNLGAPAAFKYFDTTIDRKRYTSTKEVLDATLIHQSITGLYETRIDLSQLGGDGGPAPEAAAKGSSGGTLNLEDEYRLYETSAEPEVSPGSTWLSDFPQAWAETGGMGLAVRQAPLIIPLKATSTPVSIKQYPMSQEAKLGIKPHIQRLLDQGILVPCQSPWNTPLLPVKKPGTNDYRPVQDLREVNKRVEDIHPTVPNPYNLLSGLPPSHRWYTVLDLKDAFFCLRLHPTSQPLFAFEWRDPGMGISGQLTWTRLPQGFKNSPTLFNEALHRDLADFRIQHPDLILLQYVDDILLAATSELDCQQGTRALLLTLGNLGYRASAKKAQLCQKQVKYLGYLLKEGQRWLTEARKETVMGQPTPKTPRQLREFLGTAGFCRLWIPGFAEMAAPLYPLTKPGTLFNWGPDQQKAYQEIKQALLTAPALGLPDLTKPFELFVDEKQGYAKGVLTQKLGPWRRPVAYLSKKLDPVAAGWPPCLRMVAAIAVLRKDAGKLTMGQPLVILAPHAVEALVKQPPDRWLSNARMTHYQAMLLDTDRVQFGPVVALNPATLLPLPEEGAPHDCLEILAETHGTRPDLTDQPIPDADHTWYTDGSSFLQEGQRKAGAAVTTETEVIWARALPAGTSAQRAELIALTQALKMAEGKRLNVYTDSRYAFATAHIHGEIYRRRGWLTSEGREIKNKSEILALLKALFLPKRLSIIHCLGHQKGDSAEARGNRLADQAAREAAIKTPPDTSTLLAGKRTADGSEFEKRTADGSEFESPKKKAKVE

SEQ ID NO: 1843 - protein, 2093 aa, synthetic construct
  source 1..2093: note = Description of Artificial Sequence: Synthetic polypeptide
MPAAKRVKLDGGDKKYSIGLDIGTNSVGWAVITDEYKVPSKKFKVLGNTDRHSIKKNLIGALLFDSGETAEATRLKRTARRRYTRRKNRICYLQEIFSNEMAKVDDSFFHRLEESFLVEEDKKHERHPIFGNIVDEVAYHEKYPTIYHLRKKLVDSTDKADLRLIYLALAHMIKFRGHFLIEGDLNPDNSDVDKLFIQLVQTYNQLFEENPINASGVDAKAILSARLSKSRRLENLIAQLPGEKKNGLFGNLIALSLGLTPNFKSNFDLAEDAKLQLSKDTYDDDLDNLLAQIGDQYADLFLAAKNLSDAILLSDILRVNTEITKAPLSASMIKRYDEHHQDLTLLKALVRQQLPEKYKEIFFDQSKNGYAGYIDGGASQEEFYKFIKPILEKMDGTEELLVKLNREDLLRKQRTFDNGSIPHQIHLGELHAILRRQEDFYPFLKDNREKIEKILTFRIPYYVGPLARGNSRFAWMTRKSEETITPWNFEEVVDKGASAQSFIERMTNFDKNLPNEKVLPKHSLLYEYFTVYNELTKVKYVTEGMRKPAFLSGEQKKAIVDLLFKTNRKVTVKQLKEDYFKKIECFDSVEISGVEDRFNASLGTYHDLLKIIKDKDFLDNEENEDILEDIVLTLTLFEDREMIEERLKTYAHLFDDKVMKQLKRRRYTGWGRLSRKLINGIRDKQSGKTILDFLKSDGFANRNFMQLIHDDSLTFKEDIQKAQVSGQGDSLHEHIANLAGSPAIKKGILQTVKVVDELVKVMGRHKPENIVIEMARENQTTQKGQKNSRERMKRIEEGIKELGSQILKEHPVENTQLQNEKLYLYYLQNGRDMYVDQELDINRLSDYDVDHIVPQSFLKDDSIDNKVLTRSDKARGKSDNVPSEEVVKKMKNYWRQLLNAKLITQRKFDNLTKAERGGLSELDKAGFIKRQLVETRQITKHVAQILDSRMNTKYDENDKLIREVKVITLKSKLVSDFRKDFQFYKVREINNYHHAHDAYLNAVVGTALIKKYPKLESEFVYGDYKVYDVRKMIAKSEQEIGKATAKYFFYSNIMNFFKTEITLANGEIRKRPLIETNGETGEIVWDKGRDFATVRKVLSMPQVNIVKKTEVQTGGFSKESILPKRNSDKLIARKKDWDPKKYGGFDSPTVAYSVLVVAKVEKGKSKKLKSVKELLGITIMERSSFEKNPIDFLEAKGYKEVKKDLIIKLPKYSLFELENGRKRMLASAGELQKGNELALPSKYVNFLYLASHYEKLKGSPEDNEQKQLFVEQHKHYLDEIIEQISEFSKRVILADANLDKVLSAYNKHRDKPIREQAENIIHLFTLTNLGAPAAFKYFDTTIDRKRYTSTKEVLDATLIHQSITGLYETRIDLSQLGGDGGPAPEAAAKGGTLNLEDEYRLYETSAEPEVSPGSTWLSDFPQAWAETGGMGLAVRQAPLIIPLKATSTPVSIKQYPMSQEAKLGIKPHIQRLLDQGILVPCQSPWNTPLLPVKKPGTNDYRPVQDLREVNKRVEDIHPTVPNPYNLLSGLPPSHRWYTVLDLKDAFFCLRLHPTSQPLFAFEWRDPGMGISGQLTWTRLPQGFKNSPTLFNEALHRDLADFRIQHPDLILLQYVDDILLAATSELDCQQGTRALLLTLGNLGYRASAKKAQLCQKQVKYLGYLLKEGQRWLTEARKETVMGQPTPKTPRQLREFLGTAGFCRLWIPGFAEMAAPLYPLTKPGTLFNWGPDQQKAYQEIKQALLTAPALGLPDLTKPFELFVDEKQGYAKGVLTQKLGPWRRPVAYLSKKLDPVAAGWPPCLRMVAAIAVLRKDAGKLTMGQPLVILAPHAVEALVKQPPDRWLSNARMTHYQAMLLDTDRVQFGPVVALNPATLLPLPEEGAPHDCLEILAETHGTRPDLTDQPIPDADHTWYTDGSSFLQEGQRKAGAAVTTETEVIWARALPAGTSAQRAELIALTQALKMAEGKRLNVYTDSRYAFATAHIHGEIYRRRGWLTSEGREIKNKSEILALLKALFLPKRLSIIHCLGHQKGDSAEARGNRLADQAAREAAIKTPPDTSTLLAGKRTADGSEFEKRTADGSEFESPKKKAKVE

SEQ ID NO: 1844 - protein, 2098 aa, synthetic construct
  source 1..2098: note = Description of Artificial Sequence: Synthetic polypeptide
MPAAKRVKLDGGDKKYSIGLDIGTNSVGWAVITDEYKVPSKKFKVLGNTDRHSIKKNLIGALLFDSGETAEATRLKRTARRRYTRRKNRICYLQEIFSNEMAKVDDSFFHRLEESFLVEEDKKHERHPIFGNIVDEVAYHEKYPTIYHLRKKLVDSTDKADLRLIYLALAHMIKFRGHFLIEGDLNPDNSDVDKLFIQLVQTYNQLFEENPINASGVDAKAILSARLSKSRRLENLIAQLPGEKKNGLFGNLIALSLGLTPNFKSNFDLAEDAKLQLSKDTYDDDLDNLLAQIGDQYADLFLAAKNLSDAILLSDILRVNTEITKAPLSASMIKRYDEHHQDLTLLKALVRQQLPEKYKEIFFDQSKNGYAGYIDGGASQEEFYKFIKPILEKMDGTEELLVKLNREDLLRKQRTFDNGSIPHQIHLGELHAILRRQEDFYPFLKDNREKIEKILTFRIPYYVGPLARGNSRFAWMTRKSEETITPWNFEEVVDKGASAQSFIERMTNFDKNLPNEKVLPKHSLLYEYFTVYNELTKVKYVTEGMRKPAFLSGEQKKAIVDLLFKTNRKVTVKQLKEDYFKKIECFDSVEISGVEDRFNASLGTYHDLLKIIKDKDFLDNEENEDILEDIVLTLTLFEDREMIEERLKTYAHLFDDKVMKQLKRRRYTGWGRLSRKLINGIRDKQSGKTILDFLKSDGFANRNFMQLIHDDSLTFKEDIQKAQVSGQGDSLHEHIANLAGSPAIKKGILQTVKVVDELVKVMGRHKPENIVIEMARENQTTQKGQKNSRERMKRIEEGIKELGSQILKEHPVENTQLQNEKLYLYYLQNGRDMYVDQELDINRLSDYDVDHIVPQSFLKDDSIDNKVLTRSDKARGKSDNVPSEEVVKKMKNYWRQLLNAKLITQRKFDNLTKAERGGLSELDKAGFIKRQLVETRQITKHVAQILDSRMNTKYDENDKLIREVKVITLKSKLVSDFRKDFQFYKVREINNYHHAHDAYLNAVVGTALIKKYPKLESEFVYGDYKVYDVRKMIAKSEQEIGKATAKYFFYSNIMNFFKTEITLANGEIRKRPLIETNGETGEIVWDKGRDFATVRKVLSMPQVNIVKKTEVQTGGFSKESILPKRNSDKLIARKKDWDPKKYGGFDSPTVAYSVLVVAKVEKGKSKKLKSVKELLGITIMERSSFEKNPIDFLEAKGYKEVKKDLIIKLPKYSLFELENGRKRMLASAGELQKGNELALPSKYVNFLYLASHYEKLKGSPEDNEQKQLFVEQHKHYLDEIIEQISEFSKRVILADANLDKVLSAYNKHRDKPIREQAENIIHLFTLTNLGAPAAFKYFDTTIDRKRYTSTKEVLDATLIHQSITGLYETRIDLSQLGGDGGPAPAPAPAPAPAPGGTLNLEDEYRLYETSAEPEVSPGSTWLSDFPQAWAETGGMGLAVRQAPLIIPLKATSTPVSIKQYPMSQEAKLGIKPHIQRLLDQGILVPCQSPWNTPLLPVKKPGTNDYRPVQDLREVNKRVEDIHPTVPNPYNLLSGLPPSHRWYTVLDLKDAFFCLRLHPTSQPLFAFEWRDPGMGISGQLTWTRLPQGFKNSPTLFNEALHRDLADFRIQHPDLILLQYVDDILLAATSELDCQQGTRALLLTLGNLGYRASAKKAQLCQKQVKYLGYLLKEGQRWLTEARKETVMGQPTPKTPRQLREFLGTAGFCRLWIPGFAEMAAPLYPLTKPGTLFNWGPDQQKAYQEIKQALLTAPALGLPDLTKPFELFVDEKQGYAKGVLTQKLGPWRRPVAYLSKKLDPVAAGWPPCLRMVAAIAVLRKDAGKLTMGQPLVILAPHAVEALVKQPPDRWLSNARMTHYQAMLLDTDRVQFGPVVALNPATLLPLPEEGAPHDCLEILAETHGTRPDLTDQPIPDADHTWYTDGSSFLQEGQRKAGAAVTTETEVIWARALPAGTSAQRAELIALTQALKMAEGKRLNVYTDSRYAFATAHIHGEIYRRRGWLTSEGREIKNKSEILALLKALFLPKRLSIIHCLGHQKGDSAEARGNRLADQAAREAAIKTPPDTSTLLAGKRTADGSEFEKRTADGSEFESPKKKAKVE

SEQ ID NO: 1845 - protein, 2096 aa, synthetic construct
  source 1..2096: note = Description of Artificial Sequence: Synthetic polypeptide
MPAAKRVKLDGGDKKYSIGLDIGTNSVGWAVITDEYKVPSKKFKVLGNTDRHSIKKNLIGALLFDSGETAEATRLKRTARRRYTRRKNRICYLQEIFSNEMAKVDDSFFHRLEESFLVEEDKKHERHPIFGNIVDEVAYHEKYPTIYHLRKKLVDSTDKADLRLIYLALAHMIKFRGHFLIEGDLNPDNSDVDKLFIQLVQTYNQLFEENPINASGVDAKAILSARLSKSRRLENLIAQLPGEKKNGLFGNLIALSLGLTPNFKSNFDLAEDAKLQLSKDTYDDDLDNLLAQIGDQYADLFLAAKNLSDAILLSDILRVNTEITKAPLSASMIKRYDEHHQDLTLLKALVRQQLPEKYKEIFFDQSKNGYAGYIDGGASQEEFYKFIKPILEKMDGTEELLVKLNREDLLRKQRTFDNGSIPHQIHLGELHAILRRQEDFYPFLKDNREKIEKILTFRIPYYVGPLARGNSRFAWMTRKSEETITPWNFEEVVDKGASAQSFIERMTNFDKNLPNEKVLPKHSLLYEYFTVYNELTKVKYVTEGMRKPAFLSGEQKKAIVDLLFKTNRKVTVKQLKEDYFKKIECFDSVEISGVEDRFNASLGTYHDLLKIIKDKDFLDNEENEDILEDIVLTLTLFEDREMIEERLKTYAHLFDDKVMKQLKRRRYTGWGRLSRKLINGIRDKQSGKTILDFLKSDGFANRNFMQLIHDDSLTFKEDIQKAQVSGQGDSLHEHIANLAGSPAIKKGILQTVKVVDELVKVMGRHKPENIVIEMARENQTTQKGQKNSRERMKRIEEGIKELGSQILKEHPVENTQLQNEKLYLYYLQNGRDMYVDQELDINRLSDYDVDHIVPQSFLKDDSIDNKVLTRSDKARGKSDNVPSEEVVKKMKNYWRQLLNAKLITQRKFDNLTKAERGGLSELDKAGFIKRQLVETRQITKHVAQILDSRMNTKYDENDKLIREVKVITLKSKLVSDFRKDFQFYKVREINNYHHAHDAYLNAVVGTALIKKYPKLESEFVYGDYKVYDVRKMIAKSEQEIGKATAKYFFYSNIMNFFKTEITLANGEIRKRPLIETNGETGEIVWDKGRDFATVRKVLSMPQVNIVKKTEVQTGGFSKESILPKRNSDKLIARKKDWDPKKYGGFDSPTVAYSVLVVAKVEKGKSKKLKSVKELLGITIMERSSFEKNPIDFLEAKGYKEVKKDLIIKLPKYSLFELENGRKRMLASAGELQKGNELALPSKYVNFLYLASHYEKLKGSPEDNEQKQLFVEQHKHYLDEIIEQISEFSKRVILADANLDKVLSAYNKHRDKPIREQAENIIHLFTLTNLGAPAAFKYFDTTIDRKRYTSTKEVLDATLIHQSITGLYETRIDLSQLGGDGGGSSGGGEAAAKGGTLNLEDEYRLYETSAEPEVSPGSTWLSDFPQAWAETGGMGLAVRQAPLIIPLKATSTPVSIKQYPMSQEAKLGIKPHIQRLLDQGILVPCQSPWNTPLLPVKKPGTNDYRPVQDLREVNKRVEDIHPTVPNPYNLLSGLPPSHRWYTVLDLKDAFFCLRLHPTSQPLFAFEWRDPGMGISGQLTWTRLPQGFKNSPTLFNEALHRDLADFRIQHPDLILLQYVDDILLAATSELDCQQGTRALLLTLGNLGYRASAKKAQLCQKQVKYLGYLLKEGQRWLTEARKETVMGQPTPKTPRQLREFLGTAGFCRLWIPGFAEMAAPLYPLTKPGTLFNWGPDQQKAYQEIKQALLTAPALGLPDLTKPFELFVDEKQGYAKGVLTQKLGPWRRPVAYLSKKLDPVAAGWPPCLRMVAAIAVLRKDAGKLTMGQPLVILAPHAVEALVKQPPDRWLSNARMTHYQAMLLDTDRVQFGPVVALNPATLLPLPEEGAPHDCLEILAETHGTRPDLTDQPIPDADHTWYTDGSSFLQEGQRKAGAAVTTETEVIWARALPAGTSAQRAELIALTQALKMAEGKRLNVYTDSRYAFATAHIHGEIYRRRGWLTSEGREIKNKSEILALLKALFLPKRLSIIHCLGHQKGDSAEARGNRLADQAAREAAIKTPPDTSTLLAGKRTADGSEFEKRTADGSEFESPKKKAKVE

SEQ ID NO: 1846 - protein, 2096 aa, synthetic construct
  source 1..2096: note = Description of Artificial Sequence: Synthetic polypeptide
MPAAKRVKLDGGDKKYSIGLDIGTNSVGWAVITDEYKVPSKKFKVLGNTDRHSIKKNLIGALLFDSGETAEATRLKRTARRRYTRRKNRICYLQEIFSNEMAKVDDSFFHRLEESFLVEEDKKHERHPIFGNIVDEVAYHEKYPTIYHLRKKLVDSTDKADLRLIYLALAHMIKFRGHFLIEGDLNPDNSDVDKLFIQLVQTYNQLFEENPINASGVDAKAILSARLSKSRRLENLIAQLPGEKKNGLFGNLIALSLGLTPNFKSNFDLAEDAKLQLSKDTYDDDLDNLLAQIGDQYADLFLAAKNLSDAILLSDILRVNTEITKAPLSASMIKRYDEHHQDLTLLKALVRQQLPEKYKEIFFDQSKNGYAGYIDGGASQEEFYKFIKPILEKMDGTEELLVKLNREDLLRKQRTFDNGSIPHQIHLGELHAILRRQEDFYPFLKDNREKIEKILTFRIPYYVGPLARGNSRFAWMTRKSEETITPWNFEEVVDKGASAQSFIERMTNFDKNLPNEKVLPKHSLLYEYFTVYNELTKVKYVTEGMRKPAFLSGEQKKAIVDLLFKTNRKVTVKQLKEDYFKKIECFDSVEISGVEDRFNASLGTYHDLLKIIKDKDFLDNEENEDILEDIVLTLTLFEDREMIEERLKTYAHLFDDKVMKQLKRRRYTGWGRLSRKLINGIRDKQSGKTILDFLKSDGFANRNFMQLIHDDSLTFKEDIQKAQVSGQGDSLHEHIANLAGSPAIKKGILQTVKVVDELVKVMGRHKPENIVIEMARENQTTQKGQKNSRERMKRIEEGIKELGSQILKEHPVENTQLQNEKLYLYYLQNGRDMYVDQELDINRLSDYDVDHIVPQSFLKDDSIDNKVLTRSDKARGKSDNVPSEEVVKKMKNYWRQLLNAKLITQRKFDNLTKAERGGLSELDKAGFIKRQLVETRQITKHVAQILDSRMNTKYDENDKLIREVKVITLKSKLVSDFRKDFQFYKVREINNYHHAHDAYLNAVVGTALIKKYPKLESEFVYGDYKVYDVRKMIAKSEQEIGKATAKYFFYSNIMNFFKTEITLANGEIRKRPLIETNGETGEIVWDKGRDFATVRKVLSMPQVNIVKKTEVQTGGFSKESILPKRNSDKLIARKKDWDPKKYGGFDSPTVAYSVLVVAKVEKGKSKKLKSVKELLGITIMERSSFEKNPIDFLEAKGYKEVKKDLIIKLPKYSLFELENGRKRMLASAGELQKGNELALPSKYVNFLYLASHYEKLKGSPEDNEQKQLFVEQHKHYLDEIIEQISEFSKRVILADANLDKVLSAYNKHRDKPIREQAENIIHLFTLTNLGAPAAFKYFDTTIDRKRYTSTKEVLDATLIHQSITGLYETRIDLSQLGGDGGEAAAKGGGGSSGGTLNLEDEYRLYETSAEPEVSPGSTWLSDFPQAWAETGGMGLAVRQAPLIIPLKATSTPVSIKQYPMSQEAKLGIKPHIQRLLDQGILVPCQSPWNTPLLPVKKPGTNDYRPVQDLREVNKRVEDIHPTVPNPYNLLSGLPPSHRWYTVLDLKDAFFCLRLHPTSQPLFAFEWRDPGMGISGQLTWTRLPQGFKNSPTLFNEALHRDLADFRIQHPDLILLQYVDDILLAATSELDCQQGTRALLLTLGNLGYRASAKKAQLCQKQVKYLGYLLKEGQRWLTEARKETVMGQPTPKTPRQLREFLGTAGFCRLWIPGFAEMAAPLYPLTKPGTLFNWGPDQQKAYQEIKQALLTAPALGLPDLTKPFELFVDEKQGYAKGVLTQKLGPWRRPVAYLSKKLDPVAAGWPPCLRMVAAIAVLRKDAGKLTMGQPLVILAPHAVEALVKQPPDRWLSNARMTHYQAMLLDTDRVQFGPVVALNPATLLPLPEEGAPHDCLEILAETHGTRPDLTDQPIPDADHTWYTDGSSFLQEGQRKAGAAVTTETEVIWARALPAGTSAQRAELIALTQALKMAEGKRLNVYTDSRYAFATAHIHGEIYRRRGWLTSEGREIKNKSEILALLKALFLPKRLSIIHCLGHQKGDSAEARGNRLADQAAREAAIKTPPDTSTLLAGKRTADGSEFEKRTADGSEFESPKKKAKVE

SEQ ID NO: 1847 - protein, 2095 aa, synthetic construct
  source 1..2095: note = Description of Artificial Sequence: Synthetic polypeptide
MPAAKRVKLDGGDKKYSIGLDIGTNSVGWAVITDEYKVPSKKFKVLGNTDRHSIKKNLIGALLFDSGETAEATRLKRTARRRYTRRKNRICYLQEIFSNEMAKVDDSFFHRLEESFLVEEDKKHERHPIFGNIVDEVAYHEKYPTIYHLRKKLVDSTDKADLRLIYLALAHMIKFRGHFLIEGDLNPDNSDVDKLFIQLVQTYNQLFEENPINASGVDAKAILSARLSKSRRLENLIAQLPGEKKNGLFGNLIALSLGLTPNFKSNFDLAEDAKLQLSKDTYDDDLDNLLAQIGDQYADLFLAAKNLSDAILLSDILRVNTEITKAPLSASMIKRYDEHHQDLTLLKALVRQQLPEKYKEIFFDQSKNGYAGYIDGGASQEEFYKFIKPILEKMDGTEELLVKLNREDLLRKQRTFDNGSIPHQIHLGELHAILRRQEDFYPFLKDNREKIEKILTFRIPYYVGPLARGNSRFAWMTRKSEETITPWNFEEVVDKGASAQSFIERMTNFDKNLPNEKVLPKHSLLYEYFTVYNELTKVKYVTEGMRKPAFLSGEQKKAIVDLLFKTNRKVTVKQLKEDYFKKIECFDSVEISGVEDRFNASLGTYHDLLKIIKDKDFLDNEENEDILEDIVLTLTLFEDREMIEERLKTYAHLFDDKVMKQLKRRRYTGWGRLSRKLINGIRDKQSGKTILDFLKSDGFANRNFMQLIHDDSLTFKEDIQKAQVSGQGDSLHEHIANLAGSPAIKKGILQTVKVVDELVKVMGRHKPENIVIEMARENQTTQKGQKNSRERMKRIEEGIKELGSQILKEHPVENTQLQNEKLYLYYLQNGRDMYVDQELDINRLSDYDVDHIVPQSFLKDDSIDNKVLTRSDKARGKSDNVPSEEVVKKMKNYWRQLLNAKLITQRKFDNLTKAERGGLSELDKAGFIKRQLVETRQITKHVAQILDSRMNTKYDENDKLIREVKVITLKSKLVSDFRKDFQFYKVREINNYHHAHDAYLNAVVGTALIKKYPKLESEFVYGDYKVYDVRKMIAKSEQEIGKATAKYFFYSNIMNFFKTEITLANGEIRKRPLIETNGETGEIVWDKGRDFATVRKVLSMPQVNIVKKTEVQTGGFSKESILPKRNSDKLIARKKDWDPKKYGGFDSPTVAYSVLVVAKVEKGKSKKLKSVKELLGITIMERSSFEKNPIDFLEAKGYKEVKKDLIIKLPKYSLFELENGRKRMLASAGELQKGNELALPSKYVNFLYLASHYEKLKGSPEDNEQKQLFVEQHKHYLDEIIEQISEFSKRVILADANLDKVLSAYNKHRDKPIREQAENIIHLFTLTNLGAPAAFKYFDTTIDRKRYTSTKEVLDATLIHQSITGLYETRIDLSQLGGDGGEAAAKEAAAKGGTLNLEDEYRLYETSAEPEVSPGSTWLSDFPQAWAETGGMGLAVRQAPLIIPLKATSTPVSIKQYPMSQEAKLGIKPHIQRLLDQGILVPCQSPWNTPLLPVKKPGTNDYRPVQDLREVNKRVEDIHPTVPNPYNLLSGLPPSHRWYTVLDLKDAFFCLRLHPTSQPLFAFEWRDPGMGISGQLTWTRLPQGFKNSPTLFNEALHRDLADFRIQHPDLILLQYVDDILLAATSELDCQQGTRALLLTLGNLGYRASAKKAQLCQKQVKYLGYLLKEGQRWLTEARKETVMGQPTPKTPRQLREFLGTAGFCRLWIPGFAEMAAPLYPLTKPGTLFNWGPDQQKAYQEIKQALLTAPALGLPDLTKPFELFVDEKQGYAKGVLTQKLGPWRRPVAYLSKKLDPVAAGWPPCLRMVAAIAVLRKDAGKLTMGQPLVILAPHAVEALVKQPPDRWLSNARMTHYQAMLLDTDRVQFGPVVALNPATLLPLPEEGAPHDCLEILAETHGTRPDLTDQPIPDADHTWYTDGSSFLQEGQRKAGAAVTTETEVIWARALPAGTSAQRAELIALTQALKMAEGKRLNVYTDSRYAFATAHIHGEIYRRRGWLTSEGREIKNKSEILALLKALFLPKRLSIIHCLGHQKGDSAEARGNRLADQAAREAAIKTPPDTSTLLAGKRTADGSEFEKRTADGSEFESPKKKAKVE

SEQ ID NO: 1848 - protein, 2091 aa, synthetic construct
  source 1..2091: note = Description of Artificial Sequence: Synthetic polypeptide
MPAAKRVKLDGGDKKYSIGLDIGTNSVGWAVITDEYKVPSKKFKVLGNTDRHSIKKNLIGALLFDSGETAEATRLKRTARRRYTRRKNRICYLQEIFSNEMAKVDDSFFHRLEESFLVEEDKKHERHPIFGNIVDEVAYHEKYPTIYHLRKKLVDSTDKADLRLIYLALAHMIKFRGHFLIEGDLNPDNSDVDKLFIQLVQTYNQLFEENPINASGVDAKAILSARLSKSRRLENLIAQLPGEKKNGLFGNLIALSLGLTPNFKSNFDLAEDAKLQLSKDTYDDDLDNLLAQIGDQYADLFLAAKNLSDAILLSDILRVNTEITKAPLSASMIKRYDEHHQDLTLLKALVRQQLPEKYKEIFFDQSKNGYAGYIDGGASQEEFYKFIKPILEKMDGTEELLVKLNREDLLRKQRTFDNGSIPHQIHLGELHAILRRQEDFYPFLKDNREKIEKILTFRIPYYVGPLARGNSRFAWMTRKSEETITPWNFEEVVDKGASAQSFIERMTNFDKNLPNEKVLPKHSLLYEYFTVYNELTKVKYVTEGMRKPAFLSGEQKKAIVDLLFKTNRKVTVKQLKEDYFKKIECFDSVEISGVEDRFNASLGTYHDLLKIIKDKDFLDNEENEDILEDIVLTLTLFEDREMIEERLKTYAHLFDDKVMKQLKRRRYTGWGRLSRKLINGIRDKQSGKTILDFLKSDGFANRNFMQLIHDDSLTFKEDIQKAQVSGQGDSLHEHIANLAGSPAIKKGILQTVKVVDELVKVMGRHKPENIVIEMARENQTTQKGQKNSRERMKRIEEGIKELGSQILKEHPVENTQLQNEKLYLYYLQNGRDMYVDQELDINRLSDYDVDHIVPQSFLKDDSIDNKVLTRSDKARGKSDNVPSEEVVKKMKNYWRQLLNAKLITQRKFDNLTKAERGGLSELDKAGFIKRQLVETRQITKHVAQILDSRMNTKYDENDKLIREVKVITLKSKLVSDFRKDFQFYKVREINNYHHAHDAYLNAVVGTALIKKYPKLESEFVYGDYKVYDVRKMIAKSEQEIGKATAKYFFYSNIMNFFKTEITLANGEIRKRPLIETNGETGEIVWDKGRDFATVRKVLSMPQVNIVKKTEVQTGGFSKESILPKRNSDKLIARKKDWDPKKYGGFDSPTVAYSVLVVAKVEKGKSKKLKSVKELLGITIMERSSFEKNPIDFLEAKGYKEVKKDLIIKLPKYSLFELENGRKRMLASAGELQKGNELALPSKYVNFLYLASHYEKLKGSPEDNEQKQLFVEQHKHYLDEIIEQISEFSKRVILADANLDKVLSAYNKHRDKPIREQAENIIHLFTLTNLGAPAAFKYFDTTIDRKRYTSTKEVLDATLIHQSITGLYETRIDLSQLGGDGGPAPGGGGGTLNLEDEYRLYETSAEPEVSPGSTWLSDFPQAWAETGGMGLAVRQAPLIIPLKATSTPVSIKQYPMSQEAKLGIKPHIQRLLDQGILVPCQSPWNTPLLPVKKPGTNDYRPVQDLREVNKRVEDIHPTVPNPYNLLSGLPPSHRWYTVLDLKDAFFCLRLHPTSQPLFAFEWRDPGMGISGQLTWTRLPQGFKNSPTLFNEALHRDLADFRIQHPDLILLQYVDDILLAATSELDCQQGTRALLLTLGNLGYRASAKKAQLCQKQVKYLGYLLKEGQRWLTEARKETVMGQPTPKTPRQLREFLGTAGFCRLWIPGFAEMAAPLYPLTKPGTLFNWGPDQQKAYQEIKQALLTAPALGLPDLTKPFELFVDEKQGYAKGVLTQKLGPWRRPVAYLSKKLDPVAAGWPPCLRMVAAIAVLRKDAGKLTMGQPLVILAPHAVEALVKQPPDRWLSNARMTHYQAMLLDTDRVQFGPVVALNPATLLPLPEEGAPHDCLEILAETHGTRPDLTDQPIPDADHTWYTDGSSFLQEGQRKAGAAVTTETEVIWARALPAGTSAQRAELIALTQALKMAEGKRLNVYTDSRYAFATAHIHGEIYRRRGWLTSEGREIKNKSEILALLKALFLPKRLSIIHCLGHQKGDSAEARGNRLADQAAREAAIKTPPDTSTLLAGKRTADGSEFEKRTADGSEFESPKKKAKVE

SEQ ID NO: 1849 - protein, 2097 aa, synthetic construct
  source 1..2097: note = Description of Artificial Sequence: Synthetic polypeptide
MPAAKRVKLDGGDKKYSIGLDIGTNSVGWAVITDEYKVPSKKFKVLGNTDRHSIKKNLIGALLFDSGETAEATRLKRTARRRYTRRKNRICYLQEIFSNEMAKVDDSFFHRLEESFLVEEDKKHERHPIFGNIVDEVAYHEKYPTIYHLRKKLVDSTDKADLRLIYLALAHMIKFRGHFLIEGDLNPDNSDVDKLFIQLVQTYNQLFEENPINASGVDAKAILSARLSKSRRLENLIAQLPGEKKNGLFGNLIALSLGLTPNFKSNFDLAEDAKLQLSKDTYDDDLDNLLAQIGDQYADLFLAAKNLSDAILLSDILRVNTEITKAPLSASMIKRYDEHHQDLTLLKALVRQQLPEKYKEIFFDQSKNGYAGYIDGGASQEEFYKFIKPILEKMDGTEELLVKLNREDLLRKQRTFDNGSIPHQIHLGELHAILRRQEDFYPFLKDNREKIEKILTFRIPYYVGPLARGNSRFAWMTRKSEETITPWNFEEVVDKGASAQSFIERMTNFDKNLPNEKVLPKHSLLYEYFTVYNELTKVKYVTEGMRKPAFLSGEQKKAIVDLLFKTNRKVTVKQLKEDYFKKIECFDSVEISGVEDRFNASLGTYHDLLKIIKDKDFLDNEENEDILEDIVLTLTLFEDREMIEERLKTYAHLFDDKVMKQLKRRRYTGWGRLSRKLINGIRDKQSGKTILDFLKSDGFANRNFMQLIHDDSLTFKEDIQKAQVSGQGDSLHEHIANLAGSPAIKKGILQTVKVVDELVKVMGRHKPENIVIEMARENQTTQKGQKNSRERMKRIEEGIKELGSQILKEHPVENTQLQNEKLYLYYLQNGRDMYVDQELDINRLSDYDVDHIVPQSFLKDDSIDNKVLTRSDKARGKSDNVPSEEVVKKMKNYWRQLLNAKLITQRKFDNLTKAERGGLSELDKAGFIKRQLVETRQITKHVAQILDSRMNTKYDENDKLIREVKVITLKSKLVSDFRKDFQFYKVREINNYHHAHDAYLNAVVGTALIKKYPKLESEFVYGDYKVYDVRKMIAKSEQEIGKATAKYFFYSNIMNFFKTEITLANGEIRKRPLIETNGETGEIVWDKGRDFATVRKVLSMPQVNIVKKTEVQTGGFSKESILPKRNSDKLIARKKDWDPKKYGGFDSPTVAYSVLVVAKVEKGKSKKLKSVKELLGITIMERSSFEKNPIDFLEAKGYKEVKKDLIIKLPKYSLFELENGRKRMLASAGELQKGNELALPSKYVNFLYLASHYEKLKGSPEDNEQKQLFVEQHKHYLDEIIEQISEFSKRVILADANLDKVLSAYNKHRDKPIREQAENIIHLFTLTNLGAPAAFKYFDTTIDRKRYTSTKEVLDATLIHQSITGLYETRIDLSQLGGDGGGGSGGSGGSGGSGGTLNLEDEYRLYETSAEPEVSPGSTWLSDFPQAWAETGGMGLAVRQAPLIIPLKATSTPVSIKQYPMSQEAKLGIKPHIQRLLDQGILVPCQSPWNTPLLPVKKPGTNDYRPVQDLREVNKRVEDIHPTVPNPYNLLSGLPPSHRWYTVLDLKDAFFCLRLHPTSQPLFAFEWRDPGMGISGQLTWTRLPQGFKNSPTLFNEALHRDLADFRIQHPDLILLQYVDDILLAATSELDCQQGTRALLLTLGNLGYRASAKKAQLCQKQVKYLGYLLKEGQRWLTEARKETVMGQPTPKTPRQLREFLGTAGFCRLWIPGFAEMAAPLYPLTKPGTLFNWGPDQQKAYQEIKQALLTAPALGLPDLTKPFELFVDEKQGYAKGVLTQKLGPWRRPVAYLSKKLDPVAAGWPPCLRMVAAIAVLRKDAGKLTMGQPLVILAPHAVEALVKQPPDRWLSNARMTHYQAMLLDTDRVQFGPVVALNPATLLPLPEEGAPHDCLEILAETHGTRPDLTDQPIPDADHTWYTDGSSFLQEGQRKAGAAVTTETEVIWARALPAGTSAQRAELIALTQALKMAEGKRLNVYTDSRYAFATAHIHGEIYRRRGWLTSEGREIKNKSEILALLKALFLPKRLSIIHCLGHQKGDSAEARGNRLADQAAREAAIKTPPDTSTLLAGKRTADGSEFEKRTADGSEFESPKKKAKVE

SEQ ID NO: 1850 - protein, 2096 aa, synthetic construct
  source 1..2096: note = Description of Artificial Sequence: Synthetic polypeptide
MPAAKRVKLDGGDKKYSIGLDIGTNSVGWAVITDEYKVPSKKFKVLGNTDRHSIKKNLIGALLFDSGETAEATRLKRTARRRYTRRKNRICYLQEIFSNEMAKVDDSFFHRLEESFLVEEDKKHERHPIFGNIVDEVAYHEKYPTIYHLRKKLVDSTDKADLRLIYLALAHMIKFRGHFLIEGDLNPDNSDVDKLFIQLVQTYNQLFEENPINASGVDAKAILSARLSKSRRLENLIAQLPGEKKNGLFGNLIALSLGLTPNFKSNFDLAEDAKLQLSKDTYDDDLDNLLAQIGDQYADLFLAAKNLSDAILLSDILRVNTEITKAPLSASMIKRYDEHHQDLTLLKALVRQQLPEKYKEIFFDQSKNGYAGYIDGGASQEEFYKFIKPILEKMDGTEELLVKLNREDLLRKQRTFDNGSIPHQIHLGELHAILRRQEDFYPFLKDNREKIEKILTFRIPYYVGPLARGNSRFAWMTRKSEETITPWNFEEVVDKGASAQSFIERMTNFDKNLPNEKVLPKHSLLYEYFTVYNELTKVKYVTEGMRKPAFLSGEQKKAIVDLLFKTNRKVTVKQLKEDYFKKIECFDSVEISGVEDRFNASLGTYHDLLKIIKDKDFLDNEENEDILEDIVLTLTLFEDREMIEERLKTYAHLFDDKVMKQLKRRRYTGWGRLSRKLINGIRDKQSGKTILDFLKSDGFANRNFMQLIHDDSLTFKEDIQKAQVSGQGDSLHEHIANLAGSPAIKKGILQTVKVVDELVKVMGRHKPENIVIEMARENQTTQKGQKNSRERMKRIEEGIKELGSQILKEHPVENTQLQNEKLYLYYLQNGRDMYVDQELDINRLSDYDVDHIVPQSFLKDDSIDNKVLTRSDKARGKSDNVPSEEVVKKMKNYWRQLLNAKLITQRKFDNLTKAERGGLSELDKAGFIKRQLVETRQITKHVAQILDSRMNTKYDENDKLIREVKVITLKSKLVSDFRKDFQFYKVREINNYHHAHDAYLNAVVGTALIKKYPKLESEFVYGDYKVYDVRKMIAKSEQEIGKATAKYFFYSNIMNFFKTEITLANGEIRKRPLIETNGETGEIVWDKGRDFATVRKVLSMPQVNIVKKTEVQTGGFSKESILPKRNSDKLIARKKDWDPKKYGGFDSPTVAYSVLVVAKVEKGKSKKLKSVKELLGITIMERSSFEKNPIDFLEAKGYKEVKKDLIIKLPKYSLFELENGRKRMLASAGELQKGNELALPSKYVNFLYLASHYEKLKGSPEDNEQKQLFVEQHKHYLDEIIEQISEFSKRVILADANLDKVLSAYNKHRDKPIREQAENIIHLFTLTNLGAPAAFKYFDTTIDRKRYTSTKEVLDATLIHQSITGLYETRIDLSQLGGDGGGSSEAAAKGGGGGTLNLEDEYRLYETSAEPEVSPGSTWLSDFPQAWAETGGMGLAVRQAPLIIPLKATSTPVSIKQYPMSQEAKLGIKPHIQRLLDQGILVPCQSPWNTPLLPVKKPGTNDYRPVQDLREVNKRVEDIHPTVPNPYNLLSGLPPSHRWYTVLDLKDAFFCLRLHPTSQPLFAFEWRDPGMGISGQLTWTRLPQGFKNSPTLFNEALHRDLADFRIQHPDLILLQYVDDILLAATSELDCQQGTRALLLTLGNLGYRASAKKAQLCQKQVKYLGYLLKEGQRWLTEARKETVMGQPTPKTPRQLREFLGTAGFCRLWIPGFAEMAAPLYPLTKPGTLFNWGPDQQKAYQEIKQALLTAPALGLPDLTKPFELFVDEKQGYAKGVLTQKLGPWRRPVAYLSKKLDPVAAGWPPCLRMVAAIAVLRKDAGKLTMGQPLVILAPHAVEALVKQPPDRWLSNARMTHYQAMLLDTDRVQFGPVVALNPATLLPLPEEGAPHDCLEILAETHGTRPDLTDQPIPDADHTWYTDGSSFLQEGQRKAGAAVTTETEVIWARALPAGTSAQRAELIALTQALKMAEGKRLNVYTDSRYAFATAHIHGEIYRRRGWLTSEGREIKNKSEILALLKALFLPKRLSIIHCLGHQKGDSAEARGNRLADQAAREAAIKTPPDTSTLLAGKRTADGSEFEKRTADGSEFESPKKKAKVE

SEQ ID NO: 1851 - protein, 2096 aa, synthetic construct
  source 1..2096: note = Description of Artificial Sequence: Synthetic polypeptide
MPAAKRVKLDGGDKKYSIGLDIGTNSVGWAVITDEYKVPSKKFKVLGNTDRHSIKKNLIGALLFDSGETAEATRLKRTARRRYTRRKNRICYLQEIFSNEMAKVDDSFFHRLEESFLVEEDKKHERHPIFGNIVDEVAYHEKYPTIYHLRKKLVDSTDKADLRLIYLALAHMIKFRGHFLIEGDLNPDNSDVDKLFIQLVQTYNQLFEENPINASGVDAKAILSARLSKSRRLENLIAQLPGEKKNGLFGNLIALSLGLTPNFKSNFDLAEDAKLQLSKDTYDDDLDNLLAQIGDQYADLFLAAKNLSDAILLSDILRVNTEITKAPLSASMIKRYDEHHQDLTLLKALVRQQLPEKYKEIFFDQSKNGYAGYIDGGASQEEFYKFIKPILEKMDGTEELLVKLNREDLLRKQRTFDNGSIPHQIHLGELHAILRRQEDFYPFLKDNREKIEKILTFRIPYYVGPLARGNSRFAWMTRKSEETITPWNFEEVVDKGASAQSFIERMTNFDKNLPNEKVLPKHSLLYEYFTVYNELTKVKYVTEGMRKPAFLSGEQKKAIVDLLFKTNRKVTVKQLKEDYFKKIECFDSVEISGVEDRFNASLGTYHDLLKIIKDKDFLDNEENEDILEDIVLTLTLFEDREMIEERLKTYAHLFDDKVMKQLKRRRYTGWGRLSRKLINGIRDKQSGKTILDFLKSDGFANRNFMQLIHDDSLTFKEDIQKAQVSGQGDSLHEHIANLAGSPAIKKGILQTVKVVDELVKVMGRHKPENIVIEMARENQTTQKGQKNSRERMKRIEEGIKELGSQILKEHPVENTQLQNEKLYLYYLQNGRDMYVDQELDINRLSDYDVDHIVPQSFLKDDSIDNKVLTRSDKARGKSDNVPSEEVVKKMKNYWRQLLNAKLITQRKFDNLTKAERGGLSELDKAGFIKRQLVETRQITKHVAQILDSRMNTKYDENDKLIREVKVITLKSKLVSDFRKDFQFYKVREINNYHHAHDAYLNAVVGTALIKKYPKLESEFVYGDYKVYDVRKMIAKSEQEIGKATAKYFFYSNIMNFFKTEITLANGEIRKRPLIETNGETGEIVWDKGRDFATVRKVLSMPQVNIVKKTEVQTGGFSKESILPKRNSDKLIARKKDWDPKKYGGFDSPTVAYSVLVVAKVEKGKSKKLKSVKELLGITIMERSSFEKNPIDFLEAKGYKEVKKDLIIKLPKYSLFELENGRKRMLASAGELQKGNELALPSKYVNFLYLASHYEKLKGSPEDNEQKQLFVEQHKHYLDEIIEQISEFSKRVILADANLDKVLSAYNKHRDKPIREQAENIIHLFTLTNLGAPAAFKYFDTTIDRKRYTSTKEVLDATLIHQSITGLYETRIDLSQLGGDGGEAAAKPAPGGSGGTLNLEDEYRLYETSAEPEVSPGSTWLSDFPQAWAETGGMGLAVRQAPLIIPLKATSTPVSIKQYPMSQEAKLGIKPHIQRLLDQGILVPCQSPWNTPLLPVKKPGTNDYRPVQDLREVNKRVEDIHPTVPNPYNLLSGLPPSHRWYTVLDLKDAFFCLRLHPTSQPLFAFEWRDPGMGISGQLTWTRLPQGFKNSPTLFNEALHRDLADFRIQHPDLILLQYVDDILLAATSELDCQQGTRALLLTLGNLGYRASAKKAQLCQKQVKYLGYLLKEGQRWLTEARKETVMGQPTPKTPRQLREFLGTAGFCRLWIPGFAEMAAPLYPLTKPGTLFNWGPDQQKAYQEIKQALLTAPALGLPDLTKPFELFVDEKQGYAKGVLTQKLGPWRRPVAYLSKKLDPVAAGWPPCLRMVAAIAVLRKDAGKLTMGQPLVILAPHAVEALVKQPPDRWLSNARMTHYQAMLLDTDRVQFGPVVALNPATLLPLPEEGAPHDCLEILAETHGTRPDLTDQPIPDADHTWYTDGSSFLQEGQRKAGAAVTTETEVIWARALPAGTSAQRAELIALTQALKMAEGKRLNVYTDSRYAFATAHIHGEIYRRRGWLTSEGREIKNKSEILALLKALFLPKRLSIIHCLGHQKGDSAEARGNRLADQAAREAAIKTPPDTSTLLAGKRTADGSEFEKRTADGSEFESPKKKAKVE

SEQ ID NO: 1852 - protein, 2094 aa, synthetic construct
  source 1..2094: note = Description of Artificial Sequence: Synthetic polypeptide
MPAAKRVKLDGGDKKYSIGLDIGTNSVGWAVITDEYKVPSKKFKVLGNTDRHSIKKNLIGALLFDSGETAEATRLKRTARRRYTRRKNRICYLQEIFSNEMAKVDDSFFHRLEESFLVEEDKKHERHPIFGNIVDEVAYHEKYPTIYHLRKKLVDSTDKADLRLIYLALAHMIKFRGHFLIEGDLNPDNSDVDKLFIQLVQTYNQLFEENPINASGVDAKAILSARLSKSRRLENLIAQLPGEKKNGLFGNLIALSLGLTPNFKSNFDLAEDAKLQLSKDTYDDDLDNLLAQIGDQYADLFLAAKNLSDAILLSDILRVNTEITKAPLSASMIKRYDEHHQDLTLLKALVRQQLPEKYKEIFFDQSKNGYAGYIDGGASQEEFYKFIKPILEKMDGTEELLVKLNREDLLRKQRTFDNGSIPHQIHLGELHAILRRQEDFYPFLKDNREKIEKILTFRIPYYVGPLARGNSRFAWMTRKSEETITPWNFEEVVDKGASAQSFIERMTNFDKNLPNEKVLPKHSLLYEYFTVYNELTKVKYVTEGMRKPAFLSGEQKKAIVDLLFKTNRKVTVKQLKEDYFKKIECFDSVEISGVEDRFNASLGTYHDLLKIIKDKDFLDNEENEDILEDIVLTLTLFEDREMIEERLKTYAHLFDDKVMKQLKRRRYTGWGRLSRKLINGIRDKQSGKTILDFLKSDGFANRNFMQLIHDDSLTFKEDIQKAQVSGQGDSLHEHIANLAGSPAIKKGILQTVKVVDELVKVMGRHKPENIVIEMARENQTTQKGQKNSRERMKRIEEGIKELGSQILKEHPVENTQLQNEKLYLYYLQNGRDMYVDQELDINRLSDYDVDHIVPQSFLKDDSIDNKVLTRSDKARGKSDNVPSEEVVKKMKNYWRQLLNAKLITQRKFDNLTKAERGGLSELDKAGFIKRQLVETRQITKHVAQILDSRMNTKYDENDKLIREVKVITLKSKLVSDFRKDFQFYKVREINNYHHAHDAYLNAVVGTALIKKYPKLESEFVYGDYKVYDVRKMIAKSEQEIGKATAKYFFYSNIMNFFKTEITLANGEIRKRPLIETNGETGEIVWDKGRDFATVRKVLSMPQVNIVKKTEVQTGGFSKESILPKRNSDKLIARKKDWDPKKYGGFDSPTVAYSVLVVAKVEKGKSKKLKSVKELLGITIMERSSFEKNPIDFLEAKGYKEVKKDLIIKLPKYSLFELENGRKRMLASAGELQKGNELALPSKYVNFLYLASHYEKLKGSPEDNEQKQLFVEQHKHYLDEIIEQISEFSKRVILADANLDKVLSAYNKHRDKPIREQAENIIHLFTLTNLGAPAAFKYFDTTIDRKRYTSTKEVLDATLIHQSITGLYETRIDLSQLGGDGGPAPAPAPAPGGTLNLEDEYRLYETSAEPEVSPGSTWLSDFPQAWAETGGMGLAVRQAPLIIPLKATSTPVSIKQYPMSQEAKLGIKPHIQRLLDQGILVPCQSPWNTPLLPVKKPGTNDYRPVQDLREVNKRVEDIHPTVPNPYNLLSGLPPSHRWYTVLDLKDAFFCLRLHPTSQPLFAFEWRDPGMGISGQLTWTRLPQGFKNSPTLFNEALHRDLADFRIQHPDLILLQYVDDILLAATSELDCQQGTRALLLTLGNLGYRASAKKAQLCQKQVKYLGYLLKEGQRWLTEARKETVMGQPTPKTPRQLREFLGTAGFCRLWIPGFAEMAAPLYPLTKPGTLFNWGPDQQKAYQEIKQALLTAPALGLPDLTKPFELFVDEKQGYAKGVLTQKLGPWRRPVAYLSKKLDPVAAGWPPCLRMVAAIAVLRKDAGKLTMGQPLVILAPHAVEALVKQPPDRWLSNARMTHYQAMLLDTDRVQFGPVVALNPATLLPLPEEGAPHDCLEILAETHGTRPDLTDQPIPDADHTWYTDGSSFLQEGQRKAGAAVTTETEVIWARALPAGTSAQRAELIALTQALKMAEGKRLNVYTDSRYAFATAHIHGEIYRRRGWLTSEGREIKNKSEILALLKALFLPKRLSIIHCLGHQKGDSAEARGNRLADQAAREAAIKTPPDTSTLLAGKRTADGSEFEKRTADGSEFESPKKKAKVE

SEQ ID NO: 1853 - protein, 2091 aa, synthetic construct
  source 1..2091: note = Description of Artificial Sequence: Synthetic polypeptide
MPAAKRVKLDGGDKKYSIGLDIGTNSVGWAVITDEYKVPSKKFKVLGNTDRHSIKKNLIGALLFDSGETAEATRLKRTARRRYTRRKNRICYLQEIFSNEMAKVDDSFFHRLEESFLVEEDKKHERHPIFGNIVDEVAYHEKYPTIYHLRKKLVDSTDKADLRLIYLALAHMIKFRGHFLIEGDLNPDNSDVDKLFIQLVQTYNQLFEENPINASGVDAKAILSARLSKSRRLENLIAQLPGEKKNGLFGNLIALSLGLTPNFKSNFDLAEDAKLQLSKDTYDDDLDNLLAQIGDQYADLFLAAKNLSDAILLSDILRVNTEITKAPLSASMIKRYDEHHQDLTLLKALVRQQLPEKYKEIFFDQSKNGYAGYIDGGASQEEFYKFIKPILEKMDGTEELLVKLNREDLLRKQRTFDNGSIPHQIHLGELHAILRRQEDFYPFLKDNREKIEKILTFRIPYYVGPLARGNSRFAWMTRKSEETITPWNFEEVVDKGASAQSFIERMTNFDKNLPNEKVLPKHSLLYEYFTVYNELTKVKYVTEGMRKPAFLSGEQKKAIVDLLFKTNRKVTVKQLKEDYFKKIECFDSVEISGVEDRFNASLGTYHDLLKIIKDKDFLDNEENEDILEDIVLTLTLFEDREMIEERLKTYAHLFDDKVMKQLKRRRYTGWGRLSRKLINGIRDKQSGKTILDFLKSDGFANRNFMQLIHDDSLTFKEDIQKAQVSGQGDSLHEHIANLAGSPAIKKGILQTVKVVDELVKVMGRHKPENIVIEMARENQTTQKGQKNSRERMKRIEEGIKELGSQILKEHPVENTQLQNEKLYLYYLQNGRDMYVDQELDINRLSDYDVDHIVPQSFLKDDSIDNKVLTRSDKARGKSDNVPSEEVVKKMKNYWRQLLNAKLITQRKFDNLTKAERGGLSELDKAGFIKRQLVETRQITKHVAQILDSRMNTKYDENDKLIREVKVITLKSKLVSDFRKDFQFYKVREINNYHHAHDAYLNAVVGTALIKKYPKLESEFVYGDYKVYDVRKMIAKSEQEIGKATAKYFFYSNIMNFFKTEITLANGEIRKRPLIETNGETGEIVWDKGRDFATVRKVLSMPQVNIVKKTEVQTGGFSKESILPKRNSDKLIARKKDWDPKKYGGFDSPTVAYSVLVVAKVEKGKSKKLKSVKELLGITIMERSSFEKNPIDFLEAKGYKEVKKDLIIKLPKYSLFELENGRKRMLASAGELQKGNELALPSKYVNFLYLASHYEKLKGSPEDNEQKQLFVEQHKHYLDEIIEQISEFSKRVILADANLDKVLSAYNKHRDKPIREQAENIIHLFTLTNLGAPAAFKYFDTTIDRKRYTSTKEVLDATLIHQSITGLYETRIDLSQLGGDGGGGGGSSGGTLNLEDEYRLYETSAEPEVSPGSTWLSDFPQAWAETGGMGLAVRQAPLIIPLKATSTPVSIKQYPMSQEAKLGIKPHIQRLLDQGILVPCQSPWNTPLLPVKKPGTNDYRPVQDLREVNKRVEDIHPTVPNPYNLLSGLPPSHRWYTVLDLKDAFFCLRLHPTSQPLFAFEWRDPGMGISGQLTWTRLPQGFKNSPTLFNEALHRDLADFRIQHPDLILLQYVDDILLAATSELDCQQGTRALLLTLGNLGYRASAKKAQLCQKQVKYLGYLLKEGQRWLTEARKETVMGQPTPKTPRQLREFLGTAGFCRLWIPGFAEMAAPLYPLTKPGTLFNWGPDQQKAYQEIKQALLTAPALGLPDLTKPFELFVDEKQGYAKGVLTQKLGPWRRPVAYLSKKLDPVAAGWPPCLRMVAAIAVLRKDAGKLTMGQPLVILAPHAVEALVKQPPDRWLSNARMTHYQAMLLDTDRVQFGPVVALNPATLLPLPEEGAPHDCLEILAETHGTRPDLTDQPIPDADHTWYTDGSSFLQEGQRKAGAAVTTETEVIWARALPAGTSAQRAELIALTQALKMAEGKRLNVYTDSRYAFATAHIHGEIYRRRGWLTSEGREIKNKSEILALLKALFLPKRLSIIHCLGHQKGDSAEARGNRLADQAAREAAIKTPPDTSTLLAGKRTADGSEFEKRTADGSEFESPKKKAKVE

SEQ ID NO: 1854 - protein, 2091 aa, synthetic construct
  source 1..2091: note = Description of Artificial Sequence: Synthetic polypeptide
MPAAKRVKLDGGDKKYSIGLDIGTNSVGWAVITDEYKVPSKKFKVLGNTDRHSIKKNLIGALLFDSGETAEATRLKRTARRRYTRRKNRICYLQEIFSNEMAKVDDSFFHRLEESFLVEEDKKHERHPIFGNIVDEVAYHEKYPTIYHLRKKLVDSTDKADLRLIYLALAHMIKFRGHFLIEGDLNPDNSDVDKLFIQLVQTYNQLFEENPINASGVDAKAILSARLSKSRRLENLIAQLPGEKKNGLFGNLIALSLGLTPNFKSNFDLAEDAKLQLSKDTYDDDLDNLLAQIGDQYADLFLAAKNLSDAILLSDILRVNTEITKAPLSASMIKRYDEHHQDLTLLKALVRQQLPEKYKEIFFDQSKNGYAGYIDGGASQEEFYKFIKPILEKMDGTEELLVKLNREDLLRKQRTFDNGSIPHQIHLGELHAILRRQEDFYPFLKDNREKIEKILTFRIPYYVGPLARGNSRFAWMTRKSEETITPWNFEEVVDKGASAQSFIERMTNFDKNLPNEKVLPKHSLLYEYFTVYNELTKVKYVTEGMRKPAFLSGEQKKAIVDLLFKTNRKVTVKQLKEDYFKKIECFDSVEISGVEDRFNASLGTYHDLLKIIKDKDFLDNEENEDILEDIVLTLTLFEDREMIEERLKTYAHLFDDKVMKQLKRRRYTGWGRLSRKLINGIRDKQSGKTILDFLKSDGFANRNFMQLIHDDSLTFKEDIQKAQVSGQGDSLHEHIANLAGSPAIKKGILQTVKVVDELVKVMGRHKPENIVIEMARENQTTQKGQKNSRERMKRIEEGIKELGSQILKEHPVENTQLQNEKLYLYYLQNGRDMYVDQELDINRLSDYDVDHIVPQSFLKDDSIDNKVLTRSDKARGKSDNVPSEEVVKKMKNYWRQLLNAKLITQRKFDNLTKAERGGLSELDKAGFIKRQLVETRQITKHVAQILDSRMNTKYDENDKLIREVKVITLKSKLVSDFRKDFQFYKVREINNYHHAHDAYLNAVVGTALIKKYPKLESEFVYGDYKVYDVRKMIAKSEQEIGKATAKYFFYSNIMNFFKTEITLANGEIRKRPLIETNGETGEIVWDKGRDFATVRKVLSMPQVNIVKKTEVQTGGFSKESILPKRNSDKLIARKKDWDPKKYGGFDSPTVAYSVLVVAKVEKGKSKKLKSVKELLGITIMERSSFEKNPIDFLEAKGYKEVKKDLIIKLPKYSLFELENGRKRMLASAGELQKGNELALPSKYVNFLYLASHYEKLKGSPEDNEQKQLFVEQHKHYLDEIIEQISEFSKRVILADANLDKVLSAYNKHRDKPIREQAENIIHLFTLTNLGAPAAFKYFDTTIDRKRYTSTKEVLDATLIHQSITGLYETRIDLSQLGGDGGGGGPAPGGTLNLEDEYRLYETSAEPEVSPGSTWLSDFPQAWAETGGMGLAVRQAPLIIPLKATSTPVSIKQYPMSQEAKLGIKPHIQRLLDQGILVPCQSPWNTPLLPVKKPGTNDYRPVQDLREVNKRVEDIHPTVPNPYNLLSGLPPSHRWYTVLDLKDAFFCLRLHPTSQPLFAFEWRDPGMGISGQLTWTRLPQGFKNSPTLFNEALHRDLADFRIQHPDLILLQYVDDILLAATSELDCQQGTRALLLTLGNLGYRASAKKAQLCQKQVKYLGYLLKEGQRWLTEARKETVMGQPTPKTPRQLREFLGTAGFCRLWIPGFAEMAAPLYPLTKPGTLFNWGPDQQKAYQEIKQALLTAPALGLPDLTKPFELFVDEKQGYAKGVLTQKLGPWRRPVAYLSKKLDPVAAGWPPCLRMVAAIAVLRKDAGKLTMGQPLVILAPHAVEALVKQPPDRWLSNARMTHYQAMLLDTDRVQFGPVVALNPATLLPLPEEGAPHDCLEILAETHGTRPDLTDQPIPDADHTWYTDGSSFLQEGQRKAGAAVTTETEVIWARALPAGTSAQRAELIALTQALKMAEGKRLNVYTDSRYAFATAHIHGEIYRRRGWLTSEGREIKNKSEILALLKALFLPKRLSIIHCLGHQKGDSAEARGNRLADQAAREAAIKTPPDTSTLLAGKRTADGSEFEKRTADGSEFESPKKKAKVE

SEQ ID NO: 1855 - protein, 2090 aa, synthetic construct
  source 1..2090: note = Description of Artificial Sequence: Synthetic polypeptide
MPAAKRVKLDGGDKKYSIGLDIGTNSVGWAVITDEYKVPSKKFKVLGNTDRHSIKKNLIGALLFDSGETAEATRLKRTARRRYTRRKNRICYLQEIFSNEMAKVDDSFFHRLEESFLVEEDKKHERHPIFGNIVDEVAYHEKYPTIYHLRKKLVDSTDKADLRLIYLALAHMIKFRGHFLIEGDLNPDNSDVDKLFIQLVQTYNQLFEENPINASGVDAKAILSARLSKSRRLENLIAQLPGEKKNGLFGNLIALSLGLTPNFKSNFDLAEDAKLQLSKDTYDDDLDNLLAQIGDQYADLFLAAKNLSDAILLSDILRVNTEITKAPLSASMIKRYDEHHQDLTLLKALVRQQLPEKYKEIFFDQSKNGYAGYIDGGASQEEFYKFIKPILEKMDGTEELLVKLNREDLLRKQRTFDNGSIPHQIHLGELHAILRRQEDFYPFLKDNREKIEKILTFRIPYYVGPLARGNSRFAWMTRKSEETITPWNFEEVVDKGASAQSFIERMTNFDKNLPNEKVLPKHSLLYEYFTVYNELTKVKYVTEGMRKPAFLSGEQKKAIVDLLFKTNRKVTVKQLKEDYFKKIECFDSVEISGVEDRFNASLGTYHDLLKIIKDKDFLDNEENEDILEDIVLTLTLFEDREMIEERLKTYAHLFDDKVMKQLKRRRYTGWGRLSRKLINGIRDKQSGKTILDFLKSDGFANRNFMQLIHDDSLTFKEDIQKAQVSGQGDSLHEHIANLAGSPAIKKGILQTVKVVDELVKVMGRHKPENIVIEMARENQTTQKGQKNSRERMKRIEEGIKELGSQILKEHPVENTQLQNEKLYLYYLQNGRDMYVDQELDINRLSDYDVDHIVPQSFLKDDSIDNKVLTRSDKARGKSDNVPSEEVVKKMKNYWRQLLNAKLITQRKFDNLTKAERGGLSELDKAGFIKRQLVETRQITKHVAQILDSRMNTKYDENDKLIREVKVITLKSKLVSDFRKDFQFYKVREINNYHHAHDAYLNAVVGTALIKKYPKLESEFVYGDYKVYDVRKMIAKSEQEIGKATAKYFFYSNIMNFFKTEITLANGEIRKRPLIETNGETGEIVWDKGRDFATVRKVLSMPQVNIVKKTEVQTGGFSKESILPKRNSDKLIARKKDWDPKKYGGFDSPTVAYSVLVVAKVEKGKSKKLKSVKELLGITIMERSSFEKNPIDFLEAKGYKEVKKDLIIKLPKYSLFELENGRKRMLASAGELQKGNELALPSKYVNFLYLASHYEKLKGSPEDNEQKQLFVEQHKHYLDEIIEQISEFSKRVILADANLDKVLSAYNKHRDKPIREQAENIIHLFTLTNLGAPAAFKYFDTTIDRKRYTSTKEVLDATLIHQSITGLYETRIDLSQLGGDGGPAPAPGGTLNLEDEYRLYETSAEPEVSPGSTWLSDFPQAWAETGGMGLAVRQAPLIIPLKATSTPVSIKQYPMSQEAKLGIKPHIQRLLDQGILVPCQSPWNTPLLPVKKPGTNDYRPVQDLREVNKRVEDIHPTVPNPYNLLSGLPPSHRWYTVLDLKDAFFCLRLHPTSQPLFAFEWRDPGMGISGQLTWTRLPQGFKNSPTLFNEALHRDLADFRIQHPDLILLQYVDDILLAATSELDCQQGTRALLLTLGNLGYRASAKKAQLCQKQVKYLGYLLKEGQRWLTEARKETVMGQPTPKTPRQLREFLGTAGFCRLWIPGFAEMAAPLYPLTKPGTLFNWGPDQQKAYQEIKQALLTAPALGLPDLTKPFELFVDEKQGYAKGVLTQKLGPWRRPVAYLSKKLDPVAAGWPPCLRMVAAIAVLRKDAGKLTMGQPLVILAPHAVEALVKQPPDRWLSNARMTHYQAMLLDTDRVQFGPVVALNPATLLPLPEEGAPHDCLEILAETHGTRPDLTDQPIPDADHTWYTDGSSFLQEGQRKAGAAVTTETEVIWARALPAGTSAQRAELIALTQALKMAEGKRLNVYTDSRYAFATAHIHGEIYRRRGWLTSEGREIKNKSEILALLKALFLPKRLSIIHCLGHQKGDSAEARGNRLADQAAREAAIKTPPDTSTLLAGKRTADGSEFEKRTADGSEFESPKKKAKVE

SEQ ID NO: 1856 - protein, 2096 aa, synthetic construct
  source 1..2096: note = Description of Artificial Sequence: Synthetic polypeptide
MPAAKRVKLDGGDKKYSIGLDIGTNSVGWAVITDEYKVPSKKFKVLGNTDRHSIKKNLIGALLFDSGETAEATRLKRTARRRYTRRKNRICYLQEIFSNEMAKVDDSFFHRLEESFLVEEDKKHERHPIFGNIVDEVAYHEKYPTIYHLRKKLVDSTDKADLRLIYLALAHMIKFRGHFLIEGDLNPDNSDVDKLFIQLVQTYNQLFEENPINASGVDAKAILSARLSKSRRLENLIAQLPGEKKNGLFGNLIALSLGLTPNFKSNFDLAEDAKLQLSKDTYDDDLDNLLAQIGDQYADLFLAAKNLSDAILLSDILRVNTEITKAPLSASMIKRYDEHHQDLTLLKALVRQQLPEKYKEIFFDQSKNGYAGYIDGGASQEEFYKFIKPILEKMDGTEELLVKLNREDLLRKQRTFDNGSIPHQIHLGELHAILRRQEDFYPFLKDNREKIEKILTFRIPYYVGPLARGNSRFAWMTRKSEETITPWNFEEVVDKGASAQSFIERMTNFDKNLPNEKVLPKHSLLYEYFTVYNELTKVKYVTEGMRKPAFLSGEQKKAIVDLLFKTNRKVTVKQLKEDYFKKIECFDSVEISGVEDRFNASLGTYHDLLKIIKDKDFLDNEENEDILEDIVLTLTLFEDREMIEERLKTYAHLFDDKVMKQLKRRRYTGWGRLSRKLINGIRDKQSGKTILDFLKSDGFANRNFMQLIHDDSLTFKEDIQKAQVSGQGDSLHEHIANLAGSPAIKKGILQTVKVVDELVKVMGRHKPENIVIEMARENQTTQKGQKNSRERMKRIEEGIKELGSQILKEHPVENTQLQNEKLYLYYLQNGRDMYVDQELDINRLSDYDVDHIVPQSFLKDDSIDNKVLTRSDKARGKSDNVPSEEVVKKMKNYWRQLLNAKLITQRKFDNLTKAERGGLSELDKAGFIKRQLVETRQITKHVAQILDSRMNTKYDENDKLIREVKVITLKSKLVSDFRKDFQFYKVREINNYHHAHDAYLNAVVGTALIKKYPKLESEFVYGDYKVYDVRKMIAKSEQEIGKATAKYFFYSNIMNFFKTEITLANGEIRKRPLIETNGETGEIVWDKGRDFATVRKVLSMPQVNIVKKTEVQTGGFSKESILPKRNSDKLIARKKDWDPKKYGGFDSPTVAYSVLVVAKVEKGKSKKLKSVKELLGITIMERSSFEKNPIDFLEAKGYKEVKKDLIIKLPKYSLFELENGRKRMLASAGELQKGNELALPSKYVNFLYLASHYEKLKGSPEDNEQKQLFVEQHKHYLDEIIEQISEFSKRVILADANLDKVLSAYNKHRDKPIREQAENIIHLFTLTNLGAPAAFKYFDTTIDRKRYTSTKEVLDATLIHQSITGLYETRIDLSQLGGDGGPAPGGGEAAAKGGTLNLEDEYRLYETSAEPEVSPGSTWLSDFPQAWAETGGMGLAVRQAPLIIPLKATSTPVSIKQYPMSQEAKLGIKPHIQRLLDQGILVPCQSPWNTPLLPVKKPGTNDYRPVQDLREVNKRVEDIHPTVPNPYNLLSGLPPSHRWYTVLDLKDAFFCLRLHPTSQPLFAFEWRDPGMGISGQLTWTRLPQGFKNSPTLFNEALHRDLADFRIQHPDLILLQYVDDILLAATSELDCQQGTRALLLTLGNLGYRASAKKAQLCQKQVKYLGYLLKEGQRWLTEARKETVMGQPTPKTPRQLREFLGKAGFCRLFIPGFAEMAAPLYPLTKPGTLFNWGPDQQKAYQEIKQALLTAPALGLPDLTKPFELFVDEKQGYAKGVLTQKLGPWRRPVAYLSKKLDPVAAGWPPCLRMVAAIAVLRKDAGKLTMGQPLVILAPHAVEALVKQPPDRWLSNARMTHYQAMLLDTDRVQFGPVVALNPATLLPLPEEGAPHDCLEILAETHGTRPDLTDQPIPDADHTWYTDGSSFLQEGQRKAGAAVTTETEVIWARALPAGTSAQRAELIALTQALKMAEGKRLNVYTDSRYAFATAHIHGEIYRRRGWLTSEGREIKNKSEILALLKALFLPKRLSIIHCLGHQKGDSAEARGNRLADQAAREAAIKTPPDTSTLLAGKRTADGSEFEKRTADGSEFESPKKKAKVE

SEQ ID NO: 1857 - protein, 2094 aa, synthetic construct
  source 1..2094: note = Description of Artificial Sequence: Synthetic polypeptide
MPAAKRVKLDGGDKKYSIGLDIGTNSVGWAVITDEYKVPSKKFKVLGNTDRHSIKKNLIGALLFDSGETAEATRLKRTARRRYTRRKNRICYLQEIFSNEMAKVDDSFFHRLEESFLVEEDKKHERHPIFGNIVDEVAYHEKYPTIYHLRKKLVDSTDKADLRLIYLALAHMIKFRGHFLIEGDLNPDNSDVDKLFIQLVQTYNQLFEENPINASGVDAKAILSARLSKSRRLENLIAQLPGEKKNGLFGNLIALSLGLTPNFKSNFDLAEDAKLQLSKDTYDDDLDNLLAQIGDQYADLFLAAKNLSDAILLSDILRVNTEITKAPLSASMIKRYDEHHQDLTLLKALVRQQLPEKYKEIFFDQSKNGYAGYIDGGASQEEFYKFIKPILEKMDGTEELLVKLNREDLLRKQRTFDNGSIPHQIHLGELHAILRRQEDFYPFLKDNREKIEKILTFRIPYYVGPLARGNSRFAWMTRKSEETITPWNFEEVVDKGASAQSFIERMTNFDKNLPNEKVLPKHSLLYEYFTVYNELTKVKYVTEGMRKPAFLSGEQKKAIVDLLFKTNRKVTVKQLKEDYFKKIECFDSVEISGVEDRFNASLGTYHDLLKIIKDKDFLDNEENEDILEDIVLTLTLFEDREMIEERLKTYAHLFDDKVMKQLKRRRYTGWGRLSRKLINGIRDKQSGKTILDFLKSDGFANRNFMQLIHDDSLTFKEDIQKAQVSGQGDSLHEHIANLAGSPAIKKGILQTVKVVDELVKVMGRHKPENIVIEMARENQTTQKGQKNSRERMKRIEEGIKELGSQILKEHPVENTQLQNEKLYLYYLQNGRDMYVDQELDINRLSDYDVDHIVPQSFLKDDSIDNKVLTRSDKARGKSDNVPSEEVVKKMKNYWRQLLNAKLITQRKFDNLTKAERGGLSELDKAGFIKRQLVETRQITKHVAQILDSRMNTKYDENDKLIREVKVITLKSKLVSDFRKDFQFYKVREINNYHHAHDAYLNAVVGTALIKKYPKLESEFVYGDYKVYDVRKMIAKSEQEIGKATAKYFFYSNIMNFFKTEITLANGEIRKRPLIETNGETGEIVWDKGRDFATVRKVLSMPQVNIVKKTEVQTGGFSKESILPKRNSDKLIARKKDWDPKKYGGFDSPTVAYSVLVVAKVEKGKSKKLKSVKELLGITIMERSSFEKNPIDFLEAKGYKEVKKDLIIKLPKYSLFELENGRKRMLASAGELQKGNELALPSKYVNFLYLASHYEKLKGSPEDNEQKQLFVEQHKHYLDEIIEQISEFSKRVILADANLDKVLSAYNKHRDKPIREQAENIIHLFTLTNLGAPAAFKYFDTTIDRKRYTSTKEVLDATLIHQSITGLYETRIDLSQLGGDGGGGGPAPGSSGGTLNLEDEYRLYETSAEPEVSPGSTWLSDFPQAWAETGGMGLAVRQAPLIIPLKATSTPVSIKQYPMSQEAKLGIKPHIQRLLDQGILVPCQSPWNTPLLPVKKPGTNDYRPVQDLREVNKRVEDIHPTVPNPYNLLSGLPPSHRWYTVLDLKDAFFCLRLHPTSQPLFAFEWRDPGMGISGQLTWTRLPQGFKNSPTLFNEALHRDLADFRIQHPDLILLQYVDDILLAATSELDCQQGTRALLLTLGNLGYRASAKKAQLCQKQVKYLGYLLKEGQRWLTEARKETVMGQPTPKTPRQLREFLGKAGFCRLFIPGFAEMAAPLYPLTKPGTLFNWGPDQQKAYQEIKQALLTAPALGLPDLTKPFELFVDEKQGYAKGVLTQKLGPWRRPVAYLSKKLDPVAAGWPPCLRMVAAIAVLRKDAGKLTMGQPLVILAPHAVEALVKQPPDRWLSNARMTHYQAMLLDTDRVQFGPVVALNPATLLPLPEEGAPHDCLEILAETHGTRPDLTDQPIPDADHTWYTDGSSFLQEGQRKAGAAVTTETEVIWARALPAGTSAQRAELIALTQALKMAEGKRLNVYTDSRYAFATAHIHGEIYRRRGWLTSEGREIKNKSEILALLKALFLPKRLSIIHCLGHQKGDSAEARGNRLADQAAREAAIKTPPDTSTLLAGKRTADGSEFEKRTADGSEFESPKKKAKVE

SEQ ID NO: 1858 - protein, 2093 aa, synthetic construct
  source 1..2093: note = Description of Artificial Sequence: Synthetic polypeptide
MPAAKRVKLDGGDKKYSIGLDIGTNSVGWAVITDEYKVPSKKFKVLGNTDRHSIKKNLIGALLFDSGETAEATRLKRTARRRYTRRKNRICYLQEIFSNEMAKVDDSFFHRLEESFLVEEDKKHERHPIFGNIVDEVAYHEKYPTIYHLRKKLVDSTDKADLRLIYLALAHMIKFRGHFLIEGDLNPDNSDVDKLFIQLVQTYNQLFEENPINASGVDAKAILSARLSKSRRLENLIAQLPGEKKNGLFGNLIALSLGLTPNFKSNFDLAEDAKLQLSKDTYDDDLDNLLAQIGDQYADLFLAAKNLSDAILLSDILRVNTEITKAPLSASMIKRYDEHHQDLTLLKALVRQQLPEKYKEIFFDQSKNGYAGYIDGGASQEEFYKFIKPILEKMDGTEELLVKLNREDLLRKQRTFDNGSIPHQIHLGELHAILRRQEDFYPFLKDNREKIEKILTFRIPYYVGPLARGNSRFAWMTRKSEETITPWNFEEVVDKGASAQSFIERMTNFDKNLPNEKVLPKHSLLYEYFTVYNELTKVKYVTEGMRKPAFLSGEQKKAIVDLLFKTNRKVTVKQLKEDYFKKIECFDSVEISGVEDRFNASLGTYHDLLKIIKDKDFLDNEENEDILEDIVLTLTLFEDREMIEERLKTYAHLFDDKVMKQLKRRRYTGWGRLSRKLINGIRDKQSGKTILDFLKSDGFANRNFMQLIHDDSLTFKEDIQKAQVSGQGDSLHEHIANLAGSPAIKKGILQTVKVVDELVKVMGRHKPENIVIEMARENQTTQKGQKNSRERMKRIEEGIKELGSQILKEHPVENTQLQNEKLYLYYLQNGRDMYVDQELDINRLSDYDVDHIVPQSFLKDDSIDNKVLTRSDKARGKSDNVPSEEVVKKMKNYWRQLLNAKLITQRKFDNLTKAERGGLSELDKAGFIKRQLVETRQITKHVAQILDSRMNTKYDENDKLIREVKVITLKSKLVSDFRKDFQFYKVREINNYHHAHDAYLNAVVGTALIKKYPKLESEFVYGDYKVYDVRKMIAKSEQEIGKATAKYFFYSNIMNFFKTEITLANGEIRKRPLIETNGETGEIVWDKGRDFATVRKVLSMPQVNIVKKTEVQTGGFSKESILPKRNSDKLIARKKDWDPKKYGGFDSPTVAYSVLVVAKVEKGKSKKLKSVKELLGITIMERSSFEKNPIDFLEAKGYKEVKKDLIIKLPKYSLFELENGRKRMLASAGELQKGNELALPSKYVNFLYLASHYEKLKGSPEDNEQKQLFVEQHKHYLDEIIEQISEFSKRVILADANLDKVLSAYNKHRDKPIREQAENIIHLFTLTNLGAPAAFKYFDTTIDRKRYTSTKEVLDATLIHQSITGLYETRIDLSQLGGDGGPAPEAAAKGGTLNLEDEYRLYETSAEPEVSPGSTWLSDFPQAWAETGGMGLAVRQAPLIIPLKATSTPVSIKQYPMSQEAKLGIKPHIQRLLDQGILVPCQSPWNTPLLPVKKPGTNDYRPVQDLREVNKRVEDIHPTVPNPYNLLSGLPPSHRWYTVLDLKDAFFCLRLHPTSQPLFAFEWRDPGMGISGQLTWTRLPQGFKNSPTLFNEALHRDLADFRIQHPDLILLQYVDDILLAATSELDCQQGTRALLLTLGNLGYRASAKKAQLCQKQVKYLGYLLKEGQRWLTEARKETVMGQPTPKTPRQLREFLGKAGFCRLFIPGFAEMAAPLYPLTKPGTLFNWGPDQQKAYQEIKQALLTAPALGLPDLTKPFELFVDEKQGYAKGVLTQKLGPWRRPVAYLSKKLDPVAAGWPPCLRMVAAIAVLRKDAGKLTMGQPLVILAPHAVEALVKQPPDRWLSNARMTHYQAMLLDTDRVQFGPVVALNPATLLPLPEEGAPHDCLEILAETHGTRPDLTDQPIPDADHTWYTDGSSFLQEGQRKAGAAVTTETEVIWARALPAGTSAQRAELIALTQALKMAEGKRLNVYTDSRYAFATAHIHGEIYRRRGWLTSEGREIKNKSEILALLKALFLPKRLSIIHCLGHQKGDSAEARGNRLADQAAREAAIKTPPDTSTLLAGKRTADGSEFEKRTADGSEFESPKKKAKVE

SEQ ID NO: 1859 - protein, 2096 aa, synthetic construct
  source 1..2096: note = Description of Artificial Sequence: Synthetic polypeptide
MPAAKRVKLDGGDKKYSIGLDIGTNSVGWAVITDEYKVPSKKFKVLGNTDRHSIKKNLIGALLFDSGETAEATRLKRTARRRYTRRKNRICYLQEIFSNEMAKVDDSFFHRLEESFLVEEDKKHERHPIFGNIVDEVAYHEKYPTIYHLRKKLVDSTDKADLRLIYLALAHMIKFRGHFLIEGDLNPDNSDVDKLFIQLVQTYNQLFEENPINASGVDAKAILSARLSKSRRLENLIAQLPGEKKNGLFGNLIALSLGLTPNFKSNFDLAEDAKLQLSKDTYDDDLDNLLAQIGDQYADLFLAAKNLSDAILLSDILRVNTEITKAPLSASMIKRYDEHHQDLTLLKALVRQQLPEKYKEIFFDQSKNGYAGYIDGGASQEEFYKFIKPILEKMDGTEELLVKLNREDLLRKQRTFDNGSIPHQIHLGELHAILRRQEDFYPFLKDNREKIEKILTFRIPYYVGPLARGNSRFAWMTRKSEETITPWNFEEVVDKGASAQSFIERMTNFDKNLPNEKVLPKHSLLYEYFTVYNELTKVKYVTEGMRKPAFLSGEQKKAIVDLLFKTNRKVTVKQLKEDYFKKIECFDSVEISGVEDRFNASLGTYHDLLKIIKDKDFLDNEENEDILEDIVLTLTLFEDREMIEERLKTYAHLFDDKVMKQLKRRRYTGWGRLSRKLINGIRDKQSGKTILDFLKSDGFANRNFMQLIHDDSLTFKEDIQKAQVSGQGDSLHEHIANLAGSPAIKKGILQTVKVVDELVKVMGRHKPENIVIEMARENQTTQKGQKNSRERMKRIEEGIKELGSQILKEHPVENTQLQNEKLYLYYLQNGRDMYVDQELDINRLSDYDVDHIVPQSFLKDDSIDNKVLTRSDKARGKSDNVPSEEVVKKMKNYWRQLLNAKLITQRKFDNLTKAERGGLSELDKAGFIKRQLVETRQITKHVAQILDSRMNTKYDENDKLIREVKVITLKSKLVSDFRKDFQFYKVREINNYHHAHDAYLNAVVGTALIKKYPKLESEFVYGDYKVYDVRKMIAKSEQEIGKATAKYFFYSNIMNFFKTEITLANGEIRKRPLIETNGETGEIVWDKGRDFATVRKVLSMPQVNIVKKTEVQTGGFSKESILPKRNSDKLIARKKDWDPKKYGGFDSPTVAYSVLVVAKVEKGKSKKLKSVKELLGITIMERSSFEKNPIDFLEAKGYKEVKKDLIIKLPKYSLFELENGRKRMLASAGELQKGNELALPSKYVNFLYLASHYEKLKGSPEDNEQKQLFVEQHKHYLDEIIEQISEFSKRVILADANLDKVLSAYNKHRDKPIREQAENIIHLFTLTNLGAPAAFKYFDTTIDRKRYTSTKEVLDATLIHQSITGLYETRIDLSQLGGDGGGGSEAAAKGSSGGTLNLEDEYRLYETSAEPEVSPGSTWLSDFPQAWAETGGMGLAVRQAPLIIPLKATSTPVSIKQYPMSQEAKLGIKPHIQRLLDQGILVPCQSPWNTPLLPVKKPGTNDYRPVQDLREVNKRVEDIHPTVPNPYNLLSGLPPSHRWYTVLDLKDAFFCLRLHPTSQPLFAFEWRDPGMGISGQLTWTRLPQGFKNSPTLFNEALHRDLADFRIQHPDLILLQYVDDILLAATSELDCQQGTRALLLTLGNLGYRASAKKAQLCQKQVKYLGYLLKEGQRWLTEARKETVMGQPTPKTPRQLREFLGKAGFCRLFIPGFAEMAAPLYPLTKPGTLFNWGPDQQKAYQEIKQALLTAPALGLPDLTKPFELFVDEKQGYAKGVLTQKLGPWRRPVAYLSKKLDPVAAGWPPCLRMVAAIAVLRKDAGKLTMGQPLVILAPHAVEALVKQPPDRWLSNARMTHYQAMLLDTDRVQFGPVVALNPATLLPLPEEGAPHDCLEILAETHGTRPDLTDQPIPDADHTWYTDGSSFLQEGQRKAGAAVTTETEVIWARALPAGTSAQRAELIALTQALKMAEGKRLNVYTDSRYAFATAHIHGEIYRRRGWLTSEGREIKNKSEILALLKALFLPKRLSIIHCLGHQKGDSAEARGNRLADQAAREAAIKTPPDTSTLLAGKRTADGSEFEKRTADGSEFESPKKKAKVE

SEQ ID NO: 1860 - protein, 2100 aa, synthetic construct
  source 1..2100: note = Description of Artificial Sequence: Synthetic polypeptide
MPAAKRVKLDGGDKKYSIGLDIGTNSVGWAVITDEYKVPSKKFKVLGNTDRHSIKKNLIGALLFDSGETAEATRLKRTARRRYTRRKNRICYLQEIFSNEMAKVDDSFFHRLEESFLVEEDKKHERHPIFGNIVDEVAYHEKYPTIYHLRKKLVDSTDKADLRLIYLALAHMIKFRGHFLIEGDLNPDNSDVDKLFIQLVQTYNQLFEENPINASGVDAKAILSARLSKSRRLENLIAQLPGEKKNGLFGNLIALSLGLTPNFKSNFDLAEDAKLQLSKDTYDDDLDNLLAQIGDQYADLFLAAKNLSDAILLSDILRVNTEITKAPLSASMIKRYDEHHQDLTLLKALVRQQLPEKYKEIFFDQSKNGYAGYIDGGASQEEFYKFIKPILEKMDGTEELLVKLNREDLLRKQRTFDNGSIPHQIHLGELHAILRRQEDFYPFLKDNREKIEKILTFRIPYYVGPLARGNSRFAWMTRKSEETITPWNFEEVVDKGASAQSFIERMTNFDKNLPNEKVLPKHSLLYEYFTVYNELTKVKYVTEGMRKPAFLSGEQKKAIVDLLFKTNRKVTVKQLKEDYFKKIECFDSVEISGVEDRFNASLGTYHDLLKIIKDKDFLDNEENEDILEDIVLTLTLFEDREMIEERLKTYAHLFDDKVMKQLKRRRYTGWGRLSRKLINGIRDKQSGKTILDFLKSDGFANRNFMQLIHDDSLTFKEDIQKAQVSGQGDSLHEHIANLAGSPAIKKGILQTVKVVDELVKVMGRHKPENIVIEMARENQTTQKGQKNSRERMKRIEEGIKELGSQILKEHPVENTQLQNEKLYLYYLQNGRDMYVDQELDINRLSDYDVDHIVPQSFLKDDSIDNKVLTRSDKARGKSDNVPSEEVVKKMKNYWRQLLNAKLITQRKFDNLTKAERGGLSELDKAGFIKRQLVETRQITKHVAQILDSRMNTKYDENDKLIREVKVITLKSKLVSDFRKDFQFYKVREINNYHHAHDAYLNAVVGTALIKKYPKLESEFVYGDYKVYDVRKMIAKSEQEIGKATAKYFFYSNIMNFFKTEITLANGEIRKRPLIETNGETGEIVWDKGRDFATVRKVLSMPQVNIVKKTEVQTGGFSKESILPKRNSDKLIARKKDWDPKKYGGFDSPTVAYSVLVVAKVEKGKSKKLKSVKELLGITIMERSSFEKNPIDFLEAKGYKEVKKDLIIKLPKYSLFELENGRKRMLASAGELQKGNELALPSKYVNFLYLASHYEKLKGSPEDNEQKQLFVEQHKHYLDEIIEQISEFSKRVILADANLDKVLSAYNKHRDKPIREQAENIIHLFTLTNLGAPAAFKYFDTTIDRKRYTSTKEVLDATLIHQSITGLYETRIDLSQLGGDGGEAAAKGGGGSEAAAKGGTLNLEDEYRLYETSAEPEVSPGSTWLSDFPQAWAETGGMGLAVRQAPLIIPLKATSTPVSIKQYPMSQEAKLGIKPHIQRLLDQGILVPCQSPWNTPLLPVKKPGTNDYRPVQDLREVNKRVEDIHPTVPNPYNLLSGLPPSHRWYTVLDLKDAFFCLRLHPTSQPLFAFEWRDPGMGISGQLTWTRLPQGFKNSPTLFNEALHRDLADFRIQHPDLILLQYVDDILLAATSELDCQQGTRALLLTLGNLGYRASAKKAQLCQKQVKYLGYLLKEGQRWLTEARKETVMGQPTPKTPRQLREFLGKAGFCRLFIPGFAEMAAPLYPLTKPGTLFNWGPDQQKAYQEIKQALLTAPALGLPDLTKPFELFVDEKQGYAKGVLTQKLGPWRRPVAYLSKKLDPVAAGWPPCLRMVAAIAVLRKDAGKLTMGQPLVILAPHAVEALVKQPPDRWLSNARMTHYQAMLLDTDRVQFGPVVALNPATLLPLPEEGAPHDCLEILAETHGTRPDLTDQPIPDADHTWYTDGSSFLQEGQRKAGAAVTTETEVIWARALPAGTSAQRAELIALTQALKMAEGKRLNVYTDSRYAFATAHIHGEIYRRRGWLTSEGREIKNKSEILALLKALFLPKRLSIIHCLGHQKGDSAEARGNRLADQAAREAAIKTPPDTSTLLAGKRTADGSEFEKRTADGSEFESPKKKAKVE

SEQ ID NO: 1861 - protein, 2096 aa, synthetic construct
  source 1..2096: note = Description of Artificial Sequence: Synthetic polypeptide
MPAAKRVKLDGGDKKYSIGLDIGTNSVGWAVITDEYKVPSKKFKVLGNTDRHSIKKNLIGALLFDSGETAEATRLKRTARRRYTRRKNRICYLQEIFSNEMAKVDDSFFHRLEESFLVEEDKKHERHPIFGNIVDEVAYHEKYPTIYHLRKKLVDSTDKADLRLIYLALAHMIKFRGHFLIEGDLNPDNSDVDKLFIQLVQTYNQLFEENPINASGVDAKAILSARLSKSRRLENLIAQLPGEKKNGLFGNLIALSLGLTPNFKSNFDLAEDAKLQLSKDTYDDDLDNLLAQIGDQYADLFLAAKNLSDAILLSDILRVNTEITKAPLSASMIKRYDEHHQDLTLLKALVRQQLPEKYKEIFFDQSKNGYAGYIDGGASQEEFYKFIKPILEKMDGTEELLVKLNREDLLRKQRTFDNGSIPHQIHLGELHAILRRQEDFYPFLKDNREKIEKILTFRIPYYVGPLARGNSRFAWMTRKSEETITPWNFEEVVDKGASAQSFIERMTNFDKNLPNEKVLPKHSLLYEYFTVYNELTKVKYVTEGMRKPAFLSGEQKKAIVDLLFKTNRKVTVKQLKEDYFKKIECFDSVEISGVEDRFNASLGTYHDLLKIIKDKDFLDNEENEDILEDIVLTLTLFEDREMIEERLKTYAHLFDDKVMKQLKRRRYTGWGRLSRKLINGIRDKQSGKTILDFLKSDGFANRNFMQLIHDDSLTFKEDIQKAQVSGQGDSLHEHIANLAGSPAIKKGILQTVKVVDELVKVMGRHKPENIVIEMARENQTTQKGQKNSRERMKRIEEGIKELGSQILKEHPVENTQLQNEKLYLYYLQNGRDMYVDQELDINRLSDYDVDHIVPQSFLKDDSIDNKVLTRSDKARGKSDNVPSEEVVKKMKNYWRQLLNAKLITQRKFDNLTKAERGGLSELDKAGFIKRQLVETRQITKHVAQILDSRMNTKYDENDKLIREVKVITLKSKLVSDFRKDFQFYKVREINNYHHAHDAYLNAVVGTALIKKYPKLESEFVYGDYKVYDVRKMIAKSEQEIGKATAKYFFYSNIMNFFKTEITLANGEIRKRPLIETNGETGEIVWDKGRDFATVRKVLSMPQVNIVKKTEVQTGGFSKESILPKRNSDKLIARKKDWDPKKYGGFDSPTVAYSVLVVAKVEKGKSKKLKSVKELLGITIMERSSFEKNPIDFLEAKGYKEVKKDLIIKLPKYSLFELENGRKRMLASAGELQKGNELALPSKYVNFLYLASHYEKLKGSPEDNEQKQLFVEQHKHYLDEIIEQISEFSKRVILADANLDKVLSAYNKHRDKPIREQAENIIHLFTLTNLGAPAAFKYFDTTIDRKRYTSTKEVLDATLIHQSITGLYETRIDLSQLGGDGGGSSEAAAKGGGGGTLNLEDEYRLYETSAEPEVSPGSTWLSDFPQAWAETGGMGLAVRQAPLIIPLKATSTPVSIKQYPMSQEAKLGIKPHIQRLLDQGILVPCQSPWNTPLLPVKKPGTNDYRPVQDLREVNKRVEDIHPTVPNPYNLLSGLPPSHRWYTVLDLKDAFFCLRLHPTSQPLFAFEWRDPGMGISGQLTWTRLPQGFKNSPTLFNEALHRDLADFRIQHPDLILLQYVDDILLAATSELDCQQGTRALLLTLGNLGYRASAKKAQLCQKQVKYLGYLLKEGQRWLTEARKETVMGQPTPKTPRQLREFLGKAGFCRLFIPGFAEMAAPLYPLTKPGTLFNWGPDQQKAYQEIKQALLTAPALGLPDLTKPFELFVDEKQGYAKGVLTQKLGPWRRPVAYLSKKLDPVAAGWPPCLRMVAAIAVLRKDAGKLTMGQPLVILAPHAVEALVKQPPDRWLSNARMTHYQAMLLDTDRVQFGPVVALNPATLLPLPEEGAPHDCLEILAETHGTRPDLTDQPIPDADHTWYTDGSSFLQEGQRKAGAAVTTETEVIWARALPAGTSAQRAELIALTQALKMAEGKRLNVYTDSRYAFATAHIHGEIYRRRGWLTSEGREIKNKSEILALLKALFLPKRLSIIHCLGHQKGDSAEARGNRLADQAAREAAIKTPPDTSTLLAGKRTADGSEFEKRTADGSEFESPKKKAKVE

SEQ ID NO: 1862 - protein, 2110 aa, synthetic construct
  source 1..2110: note = Description of Artificial Sequence: Synthetic polypeptide
MPAAKRVKLDGGDKKYSIGLDIGTNSVGWAVITDEYKVPSKKFKVLGNTDRHSIKKNLIGALLFDSGETAEATRLKRTARRRYTRRKNRICYLQEIFSNEMAKVDDSFFHRLEESFLVEEDKKHERHPIFGNIVDEVAYHEKYPTIYHLRKKLVDSTDKADLRLIYLALAHMIKFRGHFLIEGDLNPDNSDVDKLFIQLVQTYNQLFEENPINASGVDAKAILSARLSKSRRLENLIAQLPGEKKNGLFGNLIALSLGLTPNFKSNFDLAEDAKLQLSKDTYDDDLDNLLAQIGDQYADLFLAAKNLSDAILLSDILRVNTEITKAPLSASMIKRYDEHHQDLTLLKALVRQQLPEKYKEIFFDQSKNGYAGYIDGGASQEEFYKFIKPILEKMDGTEELLVKLNREDLLRKQRTFDNGSIPHQIHLGELHAILRRQEDFYPFLKDNREKIEKILTFRIPYYVGPLARGNSRFAWMTRKSEETITPWNFEEVVDKGASAQSFIERMTNFDKNLPNEKVLPKHSLLYEYFTVYNELTKVKYVTEGMRKPAFLSGEQKKAIVDLLFKTNRKVTVKQLKEDYFKKIECFDSVEISGVEDRFNASLGTYHDLLKIIKDKDFLDNEENEDILEDIVLTLTLFEDREMIEERLKTYAHLFDDKVMKQLKRRRYTGWGRLSRKLINGIRDKQSGKTILDFLKSDGFANRNFMQLIHDDSLTFKEDIQKAQVSGQGDSLHEHIANLAGSPAIKKGILQTVKVVDELVKVMGRHKPENIVIEMARENQTTQKGQKNSRERMKRIEEGIKELGSQILKEHPVENTQLQNEKLYLYYLQNGRDMYVDQELDINRLSDYDVDHIVPQSFLKDDSIDNKVLTRSDKARGKSDNVPSEEVVKKMKNYWRQLLNAKLITQRKFDNLTKAERGGLSELDKAGFIKRQLVETRQITKHVAQILDSRMNTKYDENDKLIREVKVITLKSKLVSDFRKDFQFYKVREINNYHHAHDAYLNAVVGTALIKKYPKLESEFVYGDYKVYDVRKMIAKSEQEIGKATAKYFFYSNIMNFFKTEITLANGEIRKRPLIETNGETGEIVWDKGRDFATVRKVLSMPQVNIVKKTEVQTGGFSKESILPKRNSDKLIARKKDWDPKKYGGFDSPTVAYSVLVVAKVEKGKSKKLKSVKELLGITIMERSSFEKNPIDFLEAKGYKEVKKDLIIKLPKYSLFELENGRKRMLASAGELQKGNELALPSKYVNFLYLASHYEKLKGSPEDNEQKQLFVEQHKHYLDEIIEQISEFSKRVILADANLDKVLSAYNKHRDKPIREQAENIIHLFTLTNLGAPAAFKYFDTTIDRKRYTSTKEVLDATLIHQSITGLYETRIDLSQLGGDGGEAAAKEAAAKEAAAKEAAAKEAAAKGGTLNLEDEYRLYETSAEPEVSPGSTWLSDFPQAWAETGGMGLAVRQAPLIIPLKATSTPVSIKQYPMSQEAKLGIKPHIQRLLDQGILVPCQSPWNTPLLPVKKPGTNDYRPVQDLREVNKRVEDIHPTVPNPYNLLSGLPPSHRWYTVLDLKDAFFCLRLHPTSQPLFAFEWRDPGMGISGQLTWTRLPQGFKNSPTLFNEALHRDLADFRIQHPDLILLQYVDDILLAATSELDCQQGTRALLLTLGNLGYRASAKKAQLCQKQVKYLGYLLKEGQRWLTEARKETVMGQPTPKTPRQLREFLGKAGFCRLFIPGFAEMAAPLYPLTKPGTLFNWGPDQQKAYQEIKQALLTAPALGLPDLTKPFELFVDEKQGYAKGVLTQKLGPWRRPVAYLSKKLDPVAAGWPPCLRMVAAIAVLRKDAGKLTMGQPLVILAPHAVEALVKQPPDRWLSNARMTHYQAMLLDTDRVQFGPVVALNPATLLPLPEEGAPHDCLEILAETHGTRPDLTDQPIPDADHTWYTDGSSFLQEGQRKAGAAVTTETEVIWARALPAGTSAQRAELIALTQALKMAEGKRLNVYTDSRYAFATAHIHGEIYRRRGWLTSEGREIKNKSEILALLKALFLPKRLSIIHCLGHQKGDSAEARGNRLADQAAREAAIKTPPDTSTLLAGKRTADGSEFEKRTADGSEFESPKKKAKVE

SEQ ID NO: 1863 - protein, 2098 aa, synthetic construct
  source 1..2098: note = Description of Artificial Sequence: Synthetic polypeptide
MPAAKRVKLDGGDKKYSIGLDIGTNSVGWAVITDEYKVPSKKFKVLGNTDRHSIKKNLIGALLFDSGETAEATRLKRTARRRYTRRKNRICYLQEIFSNEMAKVDDSFFHRLEESFLVEEDKKHERHPIFGNIVDEVAYHEKYPTIYHLRKKLVDSTDKADLRLIYLALAHMIKFRGHFLIEGDLNPDNSDVDKLFIQLVQTYNQLFEENPINASGVDAKAILSARLSKSRRLENLIAQLPGEKKNGLFGNLIALSLGLTPNFKSNFDLAEDAKLQLSKDTYDDDLDNLLAQIGDQYADLFLAAKNLSDAILLSDILRVNTEITKAPLSASMIKRYDEHHQDLTLLKALVRQQLPEKYKEIFFDQSKNGYAGYIDGGASQEEFYKFIKPILEKMDGTEELLVKLNREDLLRKQRTFDNGSIPHQIHLGELHAILRRQEDFYPFLKDNREKIEKILTFRIPYYVGPLARGNSRFAWMTRKSEETITPWNFEEVVDKGASAQSFIERMTNFDKNLPNEKVLPKHSLLYEYFTVYNELTKVKYVTEGMRKPAFLSGEQKKAIVDLLFKTNRKVTVKQLKEDYFKKIECFDSVEISGVEDRFNASLGTYHDLLKIIKDKDFLDNEENEDILEDIVLTLTLFEDREMIEERLKTYAHLFDDKVMKQLKRRRYTGWGRLSRKLINGIRDKQSGKTILDFLKSDGFANRNFMQLIHDDSLTFKEDIQKAQVSGQGDSLHEHIANLAGSPAIKKGILQTVKVVDELVKVMGRHKPENIVIEMARENQTTQKGQKNSRERMKRIEEGIKELGSQILKEHPVENTQLQNEKLYLYYLQNGRDMYVDQELDINRLSDYDVDHIVPQSFLKDDSIDNKVLTRSDKARGKSDNVPSEEVVKKMKNYWRQLLNAKLITQRKFDNLTKAERGGLSELDKAGFIKRQLVETRQITKHVAQILDSRMNTKYDENDKLIREVKVITLKSKLVSDFRKDFQFYKVREINNYHHAHDAYLNAVVGTALIKKYPKLESEFVYGDYKVYDVRKMIAKSEQEIGKATAKYFFYSNIMNFFKTEITLANGEIRKRPLIETNGETGEIVWDKGRDFATVRKVLSMPQVNIVKKTEVQTGGFSKESILPKRNSDKLIARKKDWDPKKYGGFDSPTVAYSVLVVAKVEKGKSKKLKSVKELLGITIMERSSFEKNPIDFLEAKGYKEVKKDLIIKLPKYSLFELENGRKRMLASAGELQKGNELALPSKYVNFLYLASHYEKLKGSPEDNEQKQLFVEQHKHYLDEIIEQISEFSKRVILADANLDKVLSAYNKHRDKPIREQAENIIHLFTLTNLGAPAAFKYFDTTIDRKRYTSTKEVLDATLIHQSITGLYETRIDLSQLGGDGGPAPAPAPAPAPAPGGTLNLEDEYRLYETSAEPEVSPGSTWLSDFPQAWAETGGMGLAVRQAPLIIPLKATSTPVSIKQYPMSQEAKLGIKPHIQRLLDQGILVPCQSPWNTPLLPVKKPGTNDYRPVQDLREVNKRVEDIHPTVPNPYNLLSGLPPSHRWYTVLDLKDAFFCLRLHPTSQPLFAFEWRDPGMGISGQLTWTRLPQGFKNSPTLFNEALHRDLADFRIQHPDLILLQYVDDILLAATSELDCQQGTRALLLTLGNLGYRASAKKAQLCQKQVKYLGYLLKEGQRWLTEARKETVMGQPTPKTPRQLREFLGKAGFCRLFIPGFAEMAAPLYPLTKPGTLFNWGPDQQKAYQEIKQALLTAPALGLPDLTKPFELFVDEKQGYAKGVLTQKLGPWRRPVAYLSKKLDPVAAGWPPCLRMVAAIAVLRKDAGKLTMGQPLVILAPHAVEALVKQPPDRWLSNARMTHYQAMLLDTDRVQFGPVVALNPATLLPLPEEGAPHDCLEILAETHGTRPDLTDQPIPDADHTWYTDGSSFLQEGQRKAGAAVTTETEVIWARALPAGTSAQRAELIALTQALKMAEGKRLNVYTDSRYAFATAHIHGEIYRRRGWLTSEGREIKNKSEILALLKALFLPKRLSIIHCLGHQKGDSAEARGNRLADQAAREAAIKTPPDTSTLLAGKRTADGSEFEKRTADGSEFESPKKKAKVE

SEQ ID NO: 1864 - protein, 2096 aa, synthetic construct
  source 1..2096: note = Description of Artificial Sequence: Synthetic polypeptide
MPAAKRVKLDGGDKKYSIGLDIGTNSVGWAVITDEYKVPSKKFKVLGNTDRHSIKKNLIGALLFDSGETAEATRLKRTARRRYTRRKNRICYLQEIFSNEMAKVDDSFFHRLEESFLVEEDKKHERHPIFGNIVDEVAYHEKYPTIYHLRKKLVDSTDKADLRLIYLALAHMIKFRGHFLIEGDLNPDNSDVDKLFIQLVQTYNQLFEENPINASGVDAKAILSARLSKSRRLENLIAQLPGEKKNGLFGNLIALSLGLTPNFKSNFDLAEDAKLQLSKDTYDDDLDNLLAQIGDQYADLFLAAKNLSDAILLSDILRVNTEITKAPLSASMIKRYDEHHQDLTLLKALVRQQLPEKYKEIFFDQSKNGYAGYIDGGASQEEFYKFIKPILEKMDGTEELLVKLNREDLLRKQRTFDNGSIPHQIHLGELHAILRRQEDFYPFLKDNREKIEKILTFRIPYYVGPLARGNSRFAWMTRKSEETITPWNFEEVVDKGASAQSFIERMTNFDKNLPNEKVLPKHSLLYEYFTVYNELTKVKYVTEGMRKPAFLSGEQKKAIVDLLFKTNRKVTVKQLKEDYFKKIECFDSVEISGVEDRFNASLGTYHDLLKIIKDKDFLDNEENEDILEDIVLTLTLFEDREMIEERLKTYAHLFDDKVMKQLKRRRYTGWGRLSRKLINGIRDKQSGKTILDFLKSDGFANRNFMQLIHDDSLTFKEDIQKAQVSGQGDSLHEHIANLAGSPAIKKGILQTVKVVDELVKVMGRHKPENIVIEMARENQTTQKGQKNSRERMKRIEEGIKELGSQILKEHPVENTQLQNEKLYLYYLQNGRDMYVDQELDINRLSDYDVDHIVPQSFLKDDSIDNKVLTRSDKARGKSDNVPSEEVVKKMKNYWRQLLNAKLITQRKFDNLTKAERGGLSELDKAGFIKRQLVETRQITKHVAQILDSRMNTKYDENDKLIREVKVITLKSKLVSDFRKDFQFYKVREINNYHHAHDAYLNAVVGTALIKKYPKLESEFVYGDYKVYDVRKMIAKSEQEIGKATAKYFFYSNIMNFFKTEITLANGEIRKRPLIETNGETGEIVWDKGRDFATVRKVLSMPQVNIVKKTEVQTGGFSKESILPKRNSDKLIARKKDWDPKKYGGFDSPTVAYSVLVVAKVEKGKSKKLKSVKELLGITIMERSSFEKNPIDFLEAKGYKEVKKDLIIKLPKYSLFELENGRKRMLASAGELQKGNELALPSKYVNFLYLASHYEKLKGSPEDNEQKQLFVEQHKHYLDEIIEQISEFSKRVILADANLDKVLSAYNKHRDKPIREQAENIIHLFTLTNLGAPAAFKYFDTTIDRKRYTSTKEVLDATLIHQSITGLYETRIDLSQLGGDGGPAPEAAAKGGGGGTLNLEDEYRLYETSAEPEVSPGSTWLSDFPQAWAETGGMGLAVRQAPLIIPLKATSTPVSIKQYPMSQEAKLGIKPHIQRLLDQGILVPCQSPWNTPLLPVKKPGTNDYRPVQDLREVNKRVEDIHPTVPNPYNLLSGLPPSHRWYTVLDLKDAFFCLRLHPTSQPLFAFEWRDPGMGISGQLTWTRLPQGFKNSPTLFNEALHRDLADFRIQHPDLILLQYVDDILLAATSELDCQQGTRALLLTLGNLGYRASAKKAQLCQKQVKYLGYLLKEGQRWLTEARKETVMGQPTPKTPRQLREFLGKAGFCRLFIPGFAEMAAPLYPLTKPGTLFNWGPDQQKAYQEIKQALLTAPALGLPDLTKPFELFVDEKQGYAKGVLTQKLGPWRRPVAYLSKKLDPVAAGWPPCLRMVAAIAVLRKDAGKLTMGQPLVILAPHAVEALVKQPPDRWLSNARMTHYQAMLLDTDRVQFGPVVALNPATLLPLPEEGAPHDCLEILAETHGTRPDLTDQPIPDADHTWYTDGSSFLQEGQRKAGAAVTTETEVIWARALPAGTSAQRAELIALTQALKMAEGKRLNVYTDSRYAFATAHIHGEIYRRRGWLTSEGREIKNKSEILALLKALFLPKRLSIIHCLGHQKGDSAEARGNRLADQAAREAAIKTPPDTSTLLAGKRTADGSEFEKRTADGSEFESPKKKAKVE

SEQ ID NO: 1865 - protein, 2105 aa, synthetic construct
  source 1..2105: note = Description of Artificial Sequence: Synthetic polypeptide
MPAAKRVKLDGGDKKYSIGLDIGTNSVGWAVITDEYKVPSKKFKVLGNTDRHSIKKNLIGALLFDSGETAEATRLKRTARRRYTRRKNRICYLQEIFSNEMAKVDDSFFHRLEESFLVEEDKKHERHPIFGNIVDEVAYHEKYPTIYHLRKKLVDSTDKADLRLIYLALAHMIKFRGHFLIEGDLNPDNSDVDKLFIQLVQTYNQLFEENPINASGVDAKAILSARLSKSRRLENLIAQLPGEKKNGLFGNLIALSLGLTPNFKSNFDLAEDAKLQLSKDTYDDDLDNLLAQIGDQYADLFLAAKNLSDAILLSDILRVNTEITKAPLSASMIKRYDEHHQDLTLLKALVRQQLPEKYKEIFFDQSKNGYAGYIDGGASQEEFYKFIKPILEKMDGTEELLVKLNREDLLRKQRTFDNGSIPHQIHLGELHAILRRQEDFYPFLKDNREKIEKILTFRIPYYVGPLARGNSRFAWMTRKSEETITPWNFEEVVDKGASAQSFIERMTNFDKNLPNEKVLPKHSLLYEYFTVYNELTKVKYVTEGMRKPAFLSGEQKKAIVDLLFKTNRKVTVKQLKEDYFKKIECFDSVEISGVEDRFNASLGTYHDLLKIIKDKDFLDNEENEDILEDIVLTLTLFEDREMIEERLKTYAHLFDDKVMKQLKRRRYTGWGRLSRKLINGIRDKQSGKTILDFLKSDGFANRNFMQLIHDDSLTFKEDIQKAQVSGQGDSLHEHIANLAGSPAIKKGILQTVKVVDELVKVMGRHKPENIVIEMARENQTTQKGQKNSRERMKRIEEGIKELGSQILKEHPVENTQLQNEKLYLYYLQNGRDMYVDQELDINRLSDYDVDHIVPQSFLKDDSIDNKVLTRSDKARGKSDNVPSEEVVKKMKNYWRQLLNAKLITQRKFDNLTKAERGGLSELDKAGFIKRQLVETRQITKHVAQILDSRMNTKYDENDKLIREVKVITLKSKLVSDFRKDFQFYKVREINNYHHAHDAYLNAVVGTALIKKYPKLESEFVYGDYKVYDVRKMIAKSEQEIGKATAKYFFYSNIMNFFKTEITLANGEIRKRPLIETNGETGEIVWDKGRDFATVRKVLSMPQVNIVKKTEVQTGGFSKESILPKRNSDKLIARKKDWDPKKYGGFDSPTVAYSVLVVAKVEKGKSKKLKSVKELLGITIMERSSFEKNPIDFLEAKGYKEVKKDLIIKLPKYSLFELENGRKRMLASAGELQKGNELALPSKYVNFLYLASHYEKLKGSPEDNEQKQLFVEQHKHYLDEIIEQISEFSKRVILADANLDKVLSAYNKHRDKPIREQAENIIHLFTLTNLGAPAAFKYFDTTIDRKRYTSTKEVLDATLIHQSITGLYETRIDLSQLGGDGGEAAAKEAAAKEAAAKEAAAKGGTLNLEDEYRLYETSAEPEVSPGSTWLSDFPQAWAETGGMGLAVRQAPLIIPLKATSTPVSIKQYPMSQEAKLGIKPHIQRLLDQGILVPCQSPWNTPLLPVKKPGTNDYRPVQDLREVNKRVEDIHPTVPNPYNLLSGLPPSHRWYTVLDLKDAFFCLRLHPTSQPLFAFEWRDPGMGISGQLTWTRLPQGFKNSPTLFNEALHRDLADFRIQHPDLILLQYVDDILLAATSELDCQQGTRALLLTLGNLGYRASAKKAQLCQKQVKYLGYLLKEGQRWLTEARKETVMGQPTPKTPRQLREFLGKAGFCRLFIPGFAEMAAPLYPLTKPGTLFNWGPDQQKAYQEIKQALLTAPALGLPDLTKPFELFVDEKQGYAKGVLTQKLGPWRRPVAYLSKKLDPVAAGWPPCLRMVAAIAVLRKDAGKLTMGQPLVILAPHAVEALVKQPPDRWLSNARMTHYQAMLLDTDRVQFGPVVALNPATLLPLPEEGAPHDCLEILAETHGTRPDLTDQPIPDADHTWYTDGSSFLQEGQRKAGAAVTTETEVIWARALPAGTSAQRAELIALTQALKMAEGKRLNVYTDSRYAFATAHIHGEIYRRRGWLTSEGREIKNKSEILALLKALFLPKRLSIIHCLGHQKGDSAEARGNRLADQAAREAAIKTPPDTSTLLAGKRTADGSEFEKRTADGSEFESPKKKAKVE

SEQ ID NO: 1866 - protein, 2096 aa, synthetic construct
  source 1..2096: note = Description of Artificial Sequence: Synthetic polypeptide
MPAAKRVKLDGGDKKYSIGLDIGTNSVGWAVITDEYKVPSKKFKVLGNTDRHSIKKNLIGALLFDSGETAEATRLKRTARRRYTRRKNRICYLQEIFSNEMAKVDDSFFHRLEESFLVEEDKKHERHPIFGNIVDEVAYHEKYPTIYHLRKKLVDSTDKADLRLIYLALAHMIKFRGHFLIEGDLNPDNSDVDKLFIQLVQTYNQLFEENPINASGVDAKAILSARLSKSRRLENLIAQLPGEKKNGLFGNLIALSLGLTPNFKSNFDLAEDAKLQLSKDTYDDDLDNLLAQIGDQYADLFLAAKNLSDAILLSDILRVNTEITKAPLSASMIKRYDEHHQDLTLLKALVRQQLPEKYKEIFFDQSKNGYAGYIDGGASQEEFYKFIKPILEKMDGTEELLVKLNREDLLRKQRTFDNGSIPHQIHLGELHAILRRQEDFYPFLKDNREKIEKILTFRIPYYVGPLARGNSRFAWMTRKSEETITPWNFEEVVDKGASAQSFIERMTNFDKNLPNEKVLPKHSLLYEYFTVYNELTKVKYVTEGMRKPAFLSGEQKKAIVDLLFKTNRKVTVKQLKEDYFKKIECFDSVEISGVEDRFNASLGTYHDLLKIIKDKDFLDNEENEDILEDIVLTLTLFEDREMIEERLKTYAHLFDDKVMKQLKRRRYTGWGRLSRKLINGIRDKQSGKTILDFLKSDGFANRNFMQLIHDDSLTFKEDIQKAQVSGQGDSLHEHIANLAGSPAIKKGILQTVKVVDELVKVMGRHKPENIVIEMARENQTTQKGQKNSRERMKRIEEGIKELGSQILKEHPVENTQLQNEKLYLYYLQNGRDMYVDQELDINRLSDYDVDHIVPQSFLKDDSIDNKVLTRSDKARGKSDNVPSEEVVKKMKNYWRQLLNAKLITQRKFDNLTKAERGGLSELDKAGFIKRQLVETRQITKHVAQILDSRMNTKYDENDKLIREVKVITLKSKLVSDFRKDFQFYKVREINNYHHAHDAYLNAVVGTALIKKYPKLESEFVYGDYKVYDVRKMIAKSEQEIGKATAKYFFYSNIMNFFKTEITLANGEIRKRPLIETNGETGEIVWDKGRDFATVRKVLSMPQVNIVKKTEVQTGGFSKESILPKRNSDKLIARKKDWDPKKYGGFDSPTVAYSVLVVAKVEKGKSKKLKSVKELLGITIMERSSFEKNPIDFLEAKGYKEVKKDLIIKLPKYSLFELENGRKRMLASAGELQKGNELALPSKYVNFLYLASHYEKLKGSPEDNEQKQLFVEQHKHYLDEIIEQISEFSKRVILADANLDKVLSAYNKHRDKPIREQAENIIHLFTLTNLGAPAAFKYFDTTIDRKRYTSTKEVLDATLIHQSITGLYETRIDLSQLGGDGGPAPGGSEAAAKGGTLNLEDEYRLYETSAEPEVSPGSTWLSDFPQAWAETGGMGLAVRQAPLIIPLKATSTPVSIKQYPMSQEAKLGIKPHIQRLLDQGILVPCQSPWNTPLLPVKKPGTNDYRPVQDLREVNKRVEDIHPTVPNPYNLLSGLPPSHRWYTVLDLKDAFFCLRLHPTSQPLFAFEWRDPGMGISGQLTWTRLPQGFKNSPTLFNEALHRDLADFRIQHPDLILLQYVDDILLAATSELDCQQGTRALLLTLGNLGYRASAKKAQLCQKQVKYLGYLLKEGQRWLTEARKETVMGQPTPKTPRQLREFLGKAGFCRLFIPGFAEMAAPLYPLTKPGTLFNWGPDQQKAYQEIKQALLTAPALGLPDLTKPFELFVDEKQGYAKGVLTQKLGPWRRPVAYLSKKLDPVAAGWPPCLRMVAAIAVLRKDAGKLTMGQPLVILAPHAVEALVKQPPDRWLSNARMTHYQAMLLDTDRVQFGPVVALNPATLLPLPEEGAPHDCLEILAETHGTRPDLTDQPIPDADHTWYTDGSSFLQEGQRKAGAAVTTETEVIWARALPAGTSAQRAELIALTQALKMAEGKRLNVYTDSRYAFATAHIHGEIYRRRGWLTSEGREIKNKSEILALLKALFLPKRLSIIHCLGHQKGDSAEARGNRLADQAAREAAIKTPPDTSTLLAGKRTADGSEFEKRTADGSEFESPKKKAKVE

SEQ ID NO: 1867 - protein, 2096 aa, synthetic construct
  source 1..2096: note = Description of Artificial Sequence: Synthetic polypeptide
MPAAKRVKLDGGDKKYSIGLDIGTNSVGWAVITDEYKVPSKKFKVLGNTDRHSIKKNLIGALLFDSGETAEATRLKRTARRRYTRRKNRICYLQEIFSNEMAKVDDSFFHRLEESFLVEEDKKHERHPIFGNIVDEVAYHEKYPTIYHLRKKLVDSTDKADLRLIYLALAHMIKFRGHFLIEGDLNPDNSDVDKLFIQLVQTYNQLFEENPINASGVDAKAILSARLSKSRRLENLIAQLPGEKKNGLFGNLIALSLGLTPNFKSNFDLAEDAKLQLSKDTYDDDLDNLLAQIGDQYADLFLAAKNLSDAILLSDILRVNTEITKAPLSASMIKRYDEHHQDLTLLKALVRQQLPEKYKEIFFDQSKNGYAGYIDGGASQEEFYKFIKPILEKMDGTEELLVKLNREDLLRKQRTFDNGSIPHQIHLGELHAILRRQEDFYPFLKDNREKIEKILTFRIPYYVGPLARGNSRFAWMTRKSEETITPWNFEEVVDKGASAQSFIERMTNFDKNLPNEKVLPKHSLLYEYFTVYNELTKVKYVTEGMRKPAFLSGEQKKAIVDLLFKTNRKVTVKQLKEDYFKKIECFDSVEISGVEDRFNASLGTYHDLLKIIKDKDFLDNEENEDILEDIVLTLTLFEDREMIEERLKTYAHLFDDKVMKQLKRRRYTGWGRLSRKLINGIRDKQSGKTILDFLKSDGFANRNFMQLIHDDSLTFKEDIQKAQVSGQGDSLHEHIANLAGSPAIKKGILQTVKVVDELVKVMGRHKPENIVIEMARENQTTQKGQKNSRERMKRIEEGIKELGSQILKEHPVENTQLQNEKLYLYYLQNGRDMYVDQELDINRLSDYDVDHIVPQSFLKDDSIDNKVLTRSDKARGKSDNVPSEEVVKKMKNYWRQLLNAKLITQRKFDNLTKAERGGLSELDKAGFIKRQLVETRQITKHVAQILDSRMNTKYDENDKLIREVKVITLKSKLVSDFRKDFQFYKVREINNYHHAHDAYLNAVVGTALIKKYPKLESEFVYGDYKVYDVRKMIAKSEQEIGKATAKYFFYSNIMNFFKTEITLANGEIRKRPLIETNGETGEIVWDKGRDFATVRKVLSMPQVNIVKKTEVQTGGFSKESILPKRNSDKLIARKKDWDPKKYGGFDSPTVAYSVLVVAKVEKGKSKKLKSVKELLGITIMERSSFEKNPIDFLEAKGYKEVKKDLIIKLPKYSLFELENGRKRMLASAGELQKGNELALPSKYVNFLYLASHYEKLKGSPEDNEQKQLFVEQHKHYLDEIIEQISEFSKRVILADANLDKVLSAYNKHRDKPIREQAENIIHLFTLTNLGAPAAFKYFDTTIDRKRYTSTKEVLDATLIHQSITGLYETRIDLSQLGGDGGEAAAKGGGPAPGGTLNLEDEYRLYETSAEPEVSPGSTWLSDFPQAWAETGGMGLAVRQAPLIIPLKATSTPVSIKQYPMSQEAKLGIKPHIQRLLDQGILVPCQSPWNTPLLPVKKPGTNDYRPVQDLREVNKRVEDIHPTVPNPYNLLSGLPPSHRWYTVLDLKDAFFCLRLHPTSQPLFAFEWRDPGMGISGQLTWTRLPQGFKNSPTLFNEALHRDLADFRIQHPDLILLQYVDDILLAATSELDCQQGTRALLLTLGNLGYRASAKKAQLCQKQVKYLGYLLKEGQRWLTEARKETVMGQPTPKTPRQLREFLGKAGFCRLFIPGFAEMAAPLYPLTKPGTLFNWGPDQQKAYQEIKQALLTAPALGLPDLTKPFELFVDEKQGYAKGVLTQKLGPWRRPVAYLSKKLDPVAAGWPPCLRMVAAIAVLRKDAGKLTMGQPLVILAPHAVEALVKQPPDRWLSNARMTHYQAMLLDTDRVQFGPVVALNPATLLPLPEEGAPHDCLEILAETHGTRPDLTDQPIPDADHTWYTDGSSFLQEGQRKAGAAVTTETEVIWARALPAGTSAQRAELIALTQALKMAEGKRLNVYTDSRYAFATAHIHGEIYRRRGWLTSEGREIKNKSEILALLKALFLPKRLSIIHCLGHQKGDSAEARGNRLADQAAREAAIKTPPDTSTLLAGKRTADGSEFEKRTADGSEFESPKKKAKVE

SEQ ID NO: 1868 - protein, 2090 aa, synthetic construct
  source 1..2090: note = Description of Artificial Sequence: Synthetic polypeptide
MPAAKRVKLDGGDKKYSIGLDIGTNSVGWAVITDEYKVPSKKFKVLGNTDRHSIKKNLIGALLFDSGETAEATRLKRTARRRYTRRKNRICYLQEIFSNEMAKVDDSFFHRLEESFLVEEDKKHERHPIFGNIVDEVAYHEKYPTIYHLRKKLVDSTDKADLRLIYLALAHMIKFRGHFLIEGDLNPDNSDVDKLFIQLVQTYNQLFEENPINASGVDAKAILSARLSKSRRLENLIAQLPGEKKNGLFGNLIALSLGLTPNFKSNFDLAEDAKLQLSKDTYDDDLDNLLAQIGDQYADLFLAAKNLSDAILLSDILRVNTEITKAPLSASMIKRYDEHHQDLTLLKALVRQQLPEKYKEIFFDQSKNGYAGYIDGGASQEEFYKFIKPILEKMDGTEELLVKLNREDLLRKQRTFDNGSIPHQIHLGELHAILRRQEDFYPFLKDNREKIEKILTFRIPYYVGPLARGNSRFAWMTRKSEETITPWNFEEVVDKGASAQSFIERMTNFDKNLPNEKVLPKHSLLYEYFTVYNELTKVKYVTEGMRKPAFLSGEQKKAIVDLLFKTNRKVTVKQLKEDYFKKIECFDSVEISGVEDRFNASLGTYHDLLKIIKDKDFLDNEENEDILEDIVLTLTLFEDREMIEERLKTYAHLFDDKVMKQLKRRRYTGWGRLSRKLINGIRDKQSGKTILDFLKSDGFANRNFMQLIHDDSLTFKEDIQKAQVSGQGDSLHEHIANLAGSPAIKKGILQTVKVVDELVKVMGRHKPENIVIEMARENQTTQKGQKNSRERMKRIEEGIKELGSQILKEHPVENTQLQNEKLYLYYLQNGRDMYVDQELDINRLSDYDVDHIVPQSFLKDDSIDNKVLTRSDKARGKSDNVPSEEVVKKMKNYWRQLLNAKLITQRKFDNLTKAERGGLSELDKAGFIKRQLVETRQITKHVAQILDSRMNTKYDENDKLIREVKVITLKSKLVSDFRKDFQFYKVREINNYHHAHDAYLNAVVGTALIKKYPKLESEFVYGDYKVYDVRKMIAKSEQEIGKATAKYFFYSNIMNFFKTEITLANGEIRKRPLIETNGETGEIVWDKGRDFATVRKVLSMPQVNIVKKTEVQTGGFSKESILPKRNSDKLIARKKDWDPKKYGGFDSPTVAYSVLVVAKVEKGKSKKLKSVKELLGITIMERSSFEKNPIDFLEAKGYKEVKKDLIIKLPKYSLFELENGRKRMLASAGELQKGNELALPSKYVNFLYLASHYEKLKGSPEDNEQKQLFVEQHKHYLDEIIEQISEFSKRVILADANLDKVLSAYNKHRDKPIREQAENIIHLFTLTNLGAPAAFKYFDTTIDRKRYTSTKEVLDATLIHQSITGLYETRIDLSQLGGDGGEAAAKGGTLNLEDEYRLYETSAEPEVSPGSTWLSDFPQAWAETGGMGLAVRQAPLIIPLKATSTPVSIKQYPMSQEAKLGIKPHIQRLLDQGILVPCQSPWNTPLLPVKKPGTNDYRPVQDLREVNKRVEDIHPTVPNPYNLLSGLPPSHRWYTVLDLKDAFFCLRLHPTSQPLFAFEWRDPGMGISGQLTWTRLPQGFKNSPTLFNEALHRDLADFRIQHPDLILLQYVDDILLAATSELDCQQGTRALLLTLGNLGYRASAKKAQLCQKQVKYLGYLLKEGQRWLTEARKETVMGQPTPKTPRQLREFLGKAGFCRLFIPGFAEMAAPLYPLTKPGTLFNWGPDQQKAYQEIKQALLTAPALGLPDLTKPFELFVDEKQGYAKGVLTQKLGPWRRPVAYLSKKLDPVAAGWPPCLRMVAAIAVLRKDAGKLTMGQPLVILAPHAVEALVKQPPDRWLSNARMTHYQAMLLDTDRVQFGPVVALNPATLLPLPEEGAPHDCLEILAETHGTRPDLTDQPIPDADHTWYTDGSSFLQEGQRKAGAAVTTETEVIWARALPAGTSAQRAELIALTQALKMAEGKRLNVYTDSRYAFATAHIHGEIYRRRGWLTSEGREIKNKSEILALLKALFLPKRLSIIHCLGHQKGDSAEARGNRLADQAAREAAIKTPPDTSTLLAGKRTADGSEFEKRTADGSEFESPKKKAKVE

SEQ ID NO: 1869 - protein, 2096 aa, synthetic construct
  source 1..2096: note = Description of Artificial Sequence: Synthetic polypeptide
MPAAKRVKLDGGDKKYSIGLDIGTNSVGWAVITDEYKVPSKKFKVLGNTDRHSIKKNLIGALLFDSGETAEATRLKRTARRRYTRRKNRICYLQEIFSNEMAKVDDSFFHRLEESFLVEEDKKHERHPIFGNIVDEVAYHEKYPTIYHLRKKLVDSTDKADLRLIYLALAHMIKFRGHFLIEGDLNPDNSDVDKLFIQLVQTYNQLFEENPINASGVDAKAILSARLSKSRRLENLIAQLPGEKKNGLFGNLIALSLGLTPNFKSNFDLAEDAKLQLSKDTYDDDLDNLLAQIGDQYADLFLAAKNLSDAILLSDILRVNTEITKAPLSASMIKRYDEHHQDLTLLKALVRQQLPEKYKEIFFDQSKNGYAGYIDGGASQEEFYKFIKPILEKMDGTEELLVKLNREDLLRKQRTFDNGSIPHQIHLGELHAILRRQEDFYPFLKDNREKIEKILTFRIPYYVGPLARGNSRFAWMTRKSEETITPWNFEEVVDKGASAQSFIERMTNFDKNLPNEKVLPKHSLLYEYFTVYNELTKVKYVTEGMRKPAFLSGEQKKAIVDLLFKTNRKVTVKQLKEDYFKKIECFDSVEISGVEDRFNASLGTYHDLLKIIKDKDFLDNEENEDILEDIVLTLTLFEDREMIEERLKTYAHLFDDKVMKQLKRRRYTGWGRLSRKLINGIRDKQSGKTILDFLKSDGFANRNFMQLIHDDSLTFKEDIQKAQVSGQGDSLHEHIANLAGSPAIKKGILQTVKVVDELVKVMGRHKPENIVIEMARENQTTQKGQKNSRERMKRIEEGIKELGSQILKEHPVENTQLQNEKLYLYYLQNGRDMYVDQELDINRLSDYDVDHIVPQSFLKDDSIDNKVLTRSDKARGKSDNVPSEEVVKKMKNYWRQLLNAKLITQRKFDNLTKAERGGLSELDKAGFIKRQLVETRQITKHVAQILDSRMNTKYDENDKLIREVKVITLKSKLVSDFRKDFQFYKVREINNYHHAHDAYLNAVVGTALIKKYPKLESEFVYGDYKVYDVRKMIAKSEQEIGKATAKYFFYSNIMNFFKTEITLANGEIRKRPLIETNGETGEIVWDKGRDFATVRKVLSMPQVNIVKKTEVQTGGFSKESILPKRNSDKLIARKKDWDPKKYGGFDSPTVAYSVLVVAKVEKGKSKKLKSVKELLGITIMERSSFEKNPIDFLEAKGYKEVKKDLIIKLPKYSLFELENGRKRMLASAGELQKGNELALPSKYVNFLYLASHYEKLKGSPEDNEQKQLFVEQHKHYLDEIIEQISEFSKRVILADANLDKVLSAYNKHRDKPIREQAENIIHLFTLTNLGAPAAFKYFDTTIDRKRYTSTKEVLDATLIHQSITGLYETRIDLSQLGGDGGEAAAKGGGGSSGGTLNLEDEYRLYETSAEPEVSPGSTWLSDFPQAWAETGGMGLAVRQAPLIIPLKATSTPVSIKQYPMSQEAKLGIKPHIQRLLDQGILVPCQSPWNTPLLPVKKPGTNDYRPVQDLREVNKRVEDIHPTVPNPYNLLSGLPPSHRWYTVLDLKDAFFCLRLHPTSQPLFAFEWRDPGMGISGQLTWTRLPQGFKNSPTLFNEALHRDLADFRIQHPDLILLQYVDDILLAATSELDCQQGTRALLLTLGNLGYRASAKKAQLCQKQVKYLGYLLKEGQRWLTEARKETVMGQPTPKTPRQLREFLGKAGFCRLFIPGFAEMAAPLYPLTKPGTLFNWGPDQQKAYQEIKQALLTAPALGLPDLTKPFELFVDEKQGYAKGVLTQKLGPWRRPVAYLSKKLDPVAAGWPPCLRMVAAIAVLRKDAGKLTMGQPLVILAPHAVEALVKQPPDRWLSNARMTHYQAMLLDTDRVQFGPVVALNPATLLPLPEEGAPHDCLEILAETHGTRPDLTDQPIPDADHTWYTDGSSFLQEGQRKAGAAVTTETEVIWARALPAGTSAQRAELIALTQALKMAEGKRLNVYTDSRYAFATAHIHGEIYRRRGWLTSEGREIKNKSEILALLKALFLPKRLSIIHCLGHQKGDSAEARGNRLADQAAREAAIKTPPDTSTLLAGKRTADGSEFEKRTADGSEFESPKKKAKVE

SEQ ID NO: 1870 - protein, 2097 aa, synthetic construct
  source 1..2097: note = Description of Artificial Sequence: Synthetic polypeptide
MPAAKRVKLDGGDKKYSIGLDIGTNSVGWAVITDEYKVPSKKFKVLGNTDRHSIKKNLIGALLFDSGETAEATRLKRTARRRYTRRKNRICYLQEIFSNEMAKVDDSFFHRLEESFLVEEDKKHERHPIFGNIVDEVAYHEKYPTIYHLRKKLVDSTDKADLRLIYLALAHMIKFRGHFLIEGDLNPDNSDVDKLFIQLVQTYNQLFEENPINASGVDAKAILSARLSKSRRLENLIAQLPGEKKNGLFGNLIALSLGLTPNFKSNFDLAEDAKLQLSKDTYDDDLDNLLAQIGDQYADLFLAAKNLSDAILLSDILRVNTEITKAPLSASMIKRYDEHHQDLTLLKALVRQQLPEKYKEIFFDQSKNGYAGYIDGGASQEEFYKFIKPILEKMDGTEELLVKLNREDLLRKQRTFDNGSIPHQIHLGELHAILRRQEDFYPFLKDNREKIEKILTFRIPYYVGPLARGNSRFAWMTRKSEETITPWNFEEVVDKGASAQSFIERMTNFDKNLPNEKVLPKHSLLYEYFTVYNELTKVKYVTEGMRKPAFLSGEQKKAIVDLLFKTNRKVTVKQLKEDYFKKIECFDSVEISGVEDRFNASLGTYHDLLKIIKDKDFLDNEENEDILEDIVLTLTLFEDREMIEERLKTYAHLFDDKVMKQLKRRRYTGWGRLSRKLINGIRDKQSGKTILDFLKSDGFANRNFMQLIHDDSLTFKEDIQKAQVSGQGDSLHEHIANLAGSPAIKKGILQTVKVVDELVKVMGRHKPENIVIEMARENQTTQKGQKNSRERMKRIEEGIKELGSQILKEHPVENTQLQNEKLYLYYLQNGRDMYVDQELDINRLSDYDVDHIVPQSFLKDDSIDNKVLTRSDKARGKSDNVPSEEVVKKMKNYWRQLLNAKLITQRKFDNLTKAERGGLSELDKAGFIKRQLVETRQITKHVAQILDSRMNTKYDENDKLIREVKVITLKSKLVSDFRKDFQFYKVREINNYHHAHDAYLNAVVGTALIKKYPKLESEFVYGDYKVYDVRKMIAKSEQEIGKATAKYFFYSNIMNFFKTEITLANGEIRKRPLIETNGETGEIVWDKGRDFATVRKVLSMPQVNIVKKTEVQTGGFSKESILPKRNSDKLIARKKDWDPKKYGGFDSPTVAYSVLVVAKVEKGKSKKLKSVKELLGITIMERSSFEKNPIDFLEAKGYKEVKKDLIIKLPKYSLFELENGRKRMLASAGELQKGNELALPSKYVNFLYLASHYEKLKGSPEDNEQKQLFVEQHKHYLDEIIEQISEFSKRVILADANLDKVLSAYNKHRDKPIREQAENIIHLFTLTNLGAPAAFKYFDTTIDRKRYTSTKEVLDATLIHQSITGLYETRIDLSQLGGDGGGSAGSAAGSGEFGGTLNLEDEYRLYETSAEPEVSPGSTWLSDFPQAWAETGGMGLAVRQAPLIIPLKATSTPVSIKQYPMSQEAKLGIKPHIQRLLDQGILVPCQSPWNTPLLPVKKPGTNDYRPVQDLREVNKRVEDIHPTVPNPYNLLSGLPPSHRWYTVLDLKDAFFCLRLHPTSQPLFAFEWRDPGMGISGQLTWTRLPQGFKNSPTLFNEALHRDLADFRIQHPDLILLQYVDDILLAATSELDCQQGTRALLLTLGNLGYRASAKKAQLCQKQVKYLGYLLKEGQRWLTEARKETVMGQPTPKTPRQLREFLGKAGFCRLFIPGFAEMAAPLYPLTKPGTLFNWGPDQQKAYQEIKQALLTAPALGLPDLTKPFELFVDEKQGYAKGVLTQKLGPWRRPVAYLSKKLDPVAAGWPPCLRMVAAIAVLRKDAGKLTMGQPLVILAPHAVEALVKQPPDRWLSNARMTHYQAMLLDTDRVQFGPVVALNPATLLPLPEEGAPHDCLEILAETHGTRPDLTDQPIPDADHTWYTDGSSFLQEGQRKAGAAVTTETEVIWARALPAGTSAQRAELIALTQALKMAEGKRLNVYTDSRYAFATAHIHGEIYRRRGWLTSEGREIKNKSEILALLKALFLPKRLSIIHCLGHQKGDSAEARGNRLADQAAREAAIKTPPDTSTLLAGKRTADGSEFEKRTADGSEFESPKKKAKVE

SEQ ID NO: 1871 - protein, 2096 aa, synthetic construct
  source 1..2096: note = Description of Artificial Sequence: Synthetic polypeptide
MPAAKRVKLDGGDKKYSIGLDIGTNSVGWAVITDEYKVPSKKFKVLGNTDRHSIKKNLIGALLFDSGETAEATRLKRTARRRYTRRKNRICYLQEIFSNEMAKVDDSFFHRLEESFLVEEDKKHERHPIFGNIVDEVAYHEKYPTIYHLRKKLVDSTDKADLRLIYLALAHMIKFRGHFLIEGDLNPDNSDVDKLFIQLVQTYNQLFEENPINASGVDAKAILSARLSKSRRLENLIAQLPGEKKNGLFGNLIALSLGLTPNFKSNFDLAEDAKLQLSKDTYDDDLDNLLAQIGDQYADLFLAAKNLSDAILLSDILRVNTEITKAPLSASMIKRYDEHHQDLTLLKALVRQQLPEKYKEIFFDQSKNGYAGYIDGGASQEEFYKFIKPILEKMDGTEELLVKLNREDLLRKQRTFDNGSIPHQIHLGELHAILRRQEDFYPFLKDNREKIEKILTFRIPYYVGPLARGNSRFAWMTRKSEETITPWNFEEVVDKGASAQSFIERMTNFDKNLPNEKVLPKHSLLYEYFTVYNELTKVKYVTEGMRKPAFLSGEQKKAIVDLLFKTNRKVTVKQLKEDYFKKIECFDSVEISGVEDRFNASLGTYHDLLKIIKDKDFLDNEENEDILEDIVLTLTLFEDREMIEERLKTYAHLFDDKVMKQLKRRRYTGWGRLSRKLINGIRDKQSGKTILDFLKSDGFANRNFMQLIHDDSLTFKEDIQKAQVSGQGDSLHEHIANLAGSPAIKKGILQTVKVVDELVKVMGRHKPENIVIEMARENQTTQKGQKNSRERMKRIEEGIKELGSQILKEHPVENTQLQNEKLYLYYLQNGRDMYVDQELDINRLSDYDVDHIVPQSFLKDDSIDNKVLTRSDKARGKSDNVPSEEVVKKMKNYWRQLLNAKLITQRKFDNLTKAERGGLSELDKAGFIKRQLVETRQITKHVAQILDSRMNTKYDENDKLIREVKVITLKSKLVSDFRKDFQFYKVREINNYHHAHDAYLNAVVGTALIKKYPKLESEFVYGDYKVYDVRKMIAKSEQEIGKATAKYFFYSNIMNFFKTEITLANGEIRKRPLIETNGETGEIVWDKGRDFATVRKVLSMPQVNIVKKTEVQTGGFSKESILPKRNSDKLIARKKDWDPKKYGGFDSPTVAYSVLVVAKVEKGKSKKLKSVKELLGITIMERSSFEKNPIDFLEAKGYKEVKKDLIIKLPKYSLFELENGRKRMLASAGELQKGNELALPSKYVNFLYLASHYEKLKGSPEDNEQKQLFVEQHKHYLDEIIEQISEFSKRVILADANLDKVLSAYNKHRDKPIREQAENIIHLFTLTNLGAPAAFKYFDTTIDRKRYTSTKEVLDATLIHQSITGLYETRIDLSQLGGDGGEAAAKPAPGGSGGTLNLEDEYRLYETSAEPEVSPGSTWLSDFPQAWAETGGMGLAVRQAPLIIPLKATSTPVSIKQYPMSQEAKLGIKPHIQRLLDQGILVPCQSPWNTPLLPVKKPGTNDYRPVQDLREVNKRVEDIHPTVPNPYNLLSGLPPSHRWYTVLDLKDAFFCLRLHPTSQPLFAFEWRDPGMGISGQLTWTRLPQGFKNSPTLFNEALHRDLADFRIQHPDLILLQYVDDILLAATSELDCQQGTRALLLTLGNLGYRASAKKAQLCQKQVKYLGYLLKEGQRWLTEARKETVMGQPTPKTPRQLREFLGKAGFCRLFIPGFAEMAAPLYPLTKPGTLFNWGPDQQKAYQEIKQALLTAPALGLPDLTKPFELFVDEKQGYAKGVLTQKLGPWRRPVAYLSKKLDPVAAGWPPCLRMVAAIAVLRKDAGKLTMGQPLVILAPHAVEALVKQPPDRWLSNARMTHYQAMLLDTDRVQFGPVVALNPATLLPLPEEGAPHDCLEILAETHGTRPDLTDQPIPDADHTWYTDGSSFLQEGQRKAGAAVTTETEVIWARALPAGTSAQRAELIALTQALKMAEGKRLNVYTDSRYAFATAHIHGEIYRRRGWLTSEGREIKNKSEILALLKALFLPKRLSIIHCLGHQKGDSAEARGNRLADQAAREAAIKTPPDTSTLLAGKRTADGSEFEKRTADGSEFESPKKKAKVE

SEQ ID NO: 1872 - protein, 2096 aa, synthetic construct
  source 1..2096: note = Description of Artificial Sequence: Synthetic polypeptide
MPAAKRVKLDGGDKKYSIGLDIGTNSVGWAVITDEYKVPSKKFKVLGNTDRHSIKKNLIGALLFDSGETAEATRLKRTARRRYTRRKNRICYLQEIFSNEMAKVDDSFFHRLEESFLVEEDKKHERHPIFGNIVDEVAYHEKYPTIYHLRKKLVDSTDKADLRLIYLALAHMIKFRGHFLIEGDLNPDNSDVDKLFIQLVQTYNQLFEENPINASGVDAKAILSARLSKSRRLENLIAQLPGEKKNGLFGNLIALSLGLTPNFKSNFDLAEDAKLQLSKDTYDDDLDNLLAQIGDQYADLFLAAKNLSDAILLSDILRVNTEITKAPLSASMIKRYDEHHQDLTLLKALVRQQLPEKYKEIFFDQSKNGYAGYIDGGASQEEFYKFIKPILEKMDGTEELLVKLNREDLLRKQRTFDNGSIPHQIHLGELHAILRRQEDFYPFLKDNREKIEKILTFRIPYYVGPLARGNSRFAWMTRKSEETITPWNFEEVVDKGASAQSFIERMTNFDKNLPNEKVLPKHSLLYEYFTVYNELTKVKYVTEGMRKPAFLSGEQKKAIVDLLFKTNRKVTVKQLKEDYFKKIECFDSVEISGVEDRFNASLGTYHDLLKIIKDKDFLDNEENEDILEDIVLTLTLFEDREMIEERLKTYAHLFDDKVMKQLKRRRYTGWGRLSRKLINGIRDKQSGKTILDFLKSDGFANRNFMQLIHDDSLTFKEDIQKAQVSGQGDSLHEHIANLAGSPAIKKGILQTVKVVDELVKVMGRHKPENIVIEMARENQTTQKGQKNSRERMKRIEEGIKELGSQILKEHPVENTQLQNEKLYLYYLQNGRDMYVDQELDINRLSDYDVDHIVPQSFLKDDSIDNKVLTRSDKARGKSDNVPSEEVVKKMKNYWRQLLNAKLITQRKFDNLTKAERGGLSELDKAGFIKRQLVETRQITKHVAQILDSRMNTKYDENDKLIREVKVITLKSKLVSDFRKDFQFYKVREINNYHHAHDAYLNAVVGTALIKKYPKLESEFVYGDYKVYDVRKMIAKSEQEIGKATAKYFFYSNIMNFFKTEITLANGEIRKRPLIETNGETGEIVWDKGRDFATVRKVLSMPQVNIVKKTEVQTGGFSKESILPKRNSDKLIARKKDWDPKKYGGFDSPTVAYSVLVVAKVEKGKSKKLKSVKELLGITIMERSSFEKNPIDFLEAKGYKEVKKDLIIKLPKYSLFELENGRKRMLASAGELQKGNELALPSKYVNFLYLASHYEKLKGSPEDNEQKQLFVEQHKHYLDEIIEQISEFSKRVILADANLDKVLSAYNKHRDKPIREQAENIIHLFTLTNLGAPAAFKYFDTTIDRKRYTSTKEVLDATLIHQSITGLYETRIDLSQLGGDGGEAAAKGSSPAPGGTLNLEDEYRLYETSAEPEVSPGSTWLSDFPQAWAETGGMGLAVRQAPLIIPLKATSTPVSIKQYPMSQEAKLGIKPHIQRLLDQGILVPCQSPWNTPLLPVKKPGTNDYRPVQDLREVNKRVEDIHPTVPNPYNLLSGLPPSHRWYTVLDLKDAFFCLRLHPTSQPLFAFEWRDPGMGISGQLTWTRLPQGFKNSPTLFNEALHRDLADFRIQHPDLILLQYVDDILLAATSELDCQQGTRALLLTLGNLGYRASAKKAQLCQKQVKYLGYLLKEGQRWLTEARKETVMGQPTPKTPRQLREFLGKAGFCRLFIPGFAEMAAPLYPLTKPGTLFNWGPDQQKAYQEIKQALLTAPALGLPDLTKPFELFVDEKQGYAKGVLTQKLGPWRRPVAYLSKKLDPVAAGWPPCLRMVAAIAVLRKDAGKLTMGQPLVILAPHAVEALVKQPPDRWLSNARMTHYQAMLLDTDRVQFGPVVALNPATLLPLPEEGAPHDCLEILAETHGTRPDLTDQPIPDADHTWYTDGSSFLQEGQRKAGAAVTTETEVIWARALPAGTSAQRAELIALTQALKMAEGKRLNVYTDSRYAFATAHIHGEIYRRRGWLTSEGREIKNKSEILALLKALFLPKRLSIIHCLGHQKGDSAEARGNRLADQAAREAAIKTPPDTSTLLAGKRTADGSEFEKRTADGSEFESPKKKAKVE

SEQ ID NO: 1873 - protein, 2091 aa, synthetic construct
  source 1..2091: note = Description of Artificial Sequence: Synthetic polypeptide
MPAAKRVKLDGGDKKYSIGLDIGTNSVGWAVITDEYKVPSKKFKVLGNTDRHSIKKNLIGALLFDSGETAEATRLKRTARRRYTRRKNRICYLQEIFSNEMAKVDDSFFHRLEESFLVEEDKKHERHPIFGNIVDEVAYHEKYPTIYHLRKKLVDSTDKADLRLIYLALAHMIKFRGHFLIEGDLNPDNSDVDKLFIQLVQTYNQLFEENPINASGVDAKAILSARLSKSRRLENLIAQLPGEKKNGLFGNLIALSLGLTPNFKSNFDLAEDAKLQLSKDTYDDDLDNLLAQIGDQYADLFLAAKNLSDAILLSDILRVNTEITKAPLSASMIKRYDEHHQDLTLLKALVRQQLPEKYKEIFFDQSKNGYAGYIDGGASQEEFYKFIKPILEKMDGTEELLVKLNREDLLRKQRTFDNGSIPHQIHLGELHAILRRQEDFYPFLKDNREKIEKILTFRIPYYVGPLARGNSRFAWMTRKSEETITPWNFEEVVDKGASAQSFIERMTNFDKNLPNEKVLPKHSLLYEYFTVYNELTKVKYVTEGMRKPAFLSGEQKKAIVDLLFKTNRKVTVKQLKEDYFKKIECFDSVEISGVEDRFNASLGTYHDLLKIIKDKDFLDNEENEDILEDIVLTLTLFEDREMIEERLKTYAHLFDDKVMKQLKRRRYTGWGRLSRKLINGIRDKQSGKTILDFLKSDGFANRNFMQLIHDDSLTFKEDIQKAQVSGQGDSLHEHIANLAGSPAIKKGILQTVKVVDELVKVMGRHKPENIVIEMARENQTTQKGQKNSRERMKRIEEGIKELGSQILKEHPVENTQLQNEKLYLYYLQNGRDMYVDQELDINRLSDYDVDHIVPQSFLKDDSIDNKVLTRSDKARGKSDNVPSEEVVKKMKNYWRQLLNAKLITQRKFDNLTKAERGGLSELDKAGFIKRQLVETRQITKHVAQILDSRMNTKYDENDKLIREVKVITLKSKLVSDFRKDFQFYKVREINNYHHAHDAYLNAVVGTALIKKYPKLESEFVYGDYKVYDVRKMIAKSEQEIGKATAKYFFYSNIMNFFKTEITLANGEIRKRPLIETNGETGEIVWDKGRDFATVRKVLSMPQVNIVKKTEVQTGGFSKESILPKRNSDKLIARKKDWDPKKYGGFDSPTVAYSVLVVAKVEKGKSKKLKSVKELLGITIMERSSFEKNPIDFLEAKGYKEVKKDLIIKLPKYSLFELENGRKRMLASAGELQKGNELALPSKYVNFLYLASHYEKLKGSPEDNEQKQLFVEQHKHYLDEIIEQISEFSKRVILADANLDKVLSAYNKHRDKPIREQAENIIHLFTLTNLGAPAAFKYFDTTIDRKRYTSTKEVLDATLIHQSITGLYETRIDLSQLGGDGGGGGGGGGGTLNLEDEYRLYETSAEPEVSPGSTWLSDFPQAWAETGGMGLAVRQAPLIIPLKATSTPVSIKQYPMSQEAKLGIKPHIQRLLDQGILVPCQSPWNTPLLPVKKPGTNDYRPVQDLREVNKRVEDIHPTVPNPYNLLSGLPPSHRWYTVLDLKDAFFCLRLHPTSQPLFAFEWRDPGMGISGQLTWTRLPQGFKNSPTLFNEALHRDLADFRIQHPDLILLQYVDDILLAATSELDCQQGTRALLLTLGNLGYRASAKKAQLCQKQVKYLGYLLKEGQRWLTEARKETVMGQPTPKTPRQLREFLGKAGFCRLFIPGFAEMAAPLYPLTKPGTLFNWGPDQQKAYQEIKQALLTAPALGLPDLTKPFELFVDEKQGYAKGVLTQKLGPWRRPVAYLSKKLDPVAAGWPPCLRMVAAIAVLRKDAGKLTMGQPLVILAPHAVEALVKQPPDRWLSNARMTHYQAMLLDTDRVQFGPVVALNPATLLPLPEEGAPHDCLEILAETHGTRPDLTDQPIPDADHTWYTDGSSFLQEGQRKAGAAVTTETEVIWARALPAGTSAQRAELIALTQALKMAEGKRLNVYTDSRYAFATAHIHGEIYRRRGWLTSEGREIKNKSEILALLKALFLPKRLSIIHCLGHQKGDSAEARGNRLADQAAREAAIKTPPDTSTLLAGKRTADGSEFEKRTADGSEFESPKKKAKVE

SEQ ID NO: 1874 - protein, 2094 aa, synthetic construct
  source 1..2094: note = Description of Artificial Sequence: Synthetic polypeptide
MPAAKRVKLDGGDKKYSIGLDIGTNSVGWAVITDEYKVPSKKFKVLGNTDRHSIKKNLIGALLFDSGETAEATRLKRTARRRYTRRKNRICYLQEIFSNEMAKVDDSFFHRLEESFLVEEDKKHERHPIFGNIVDEVAYHEKYPTIYHLRKKLVDSTDKADLRLIYLALAHMIKFRGHFLIEGDLNPDNSDVDKLFIQLVQTYNQLFEENPINASGVDAKAILSARLSKSRRLENLIAQLPGEKKNGLFGNLIALSLGLTPNFKSNFDLAEDAKLQLSKDTYDDDLDNLLAQIGDQYADLFLAAKNLSDAILLSDILRVNTEITKAPLSASMIKRYDEHHQDLTLLKALVRQQLPEKYKEIFFDQSKNGYAGYIDGGASQEEFYKFIKPILEKMDGTEELLVKLNREDLLRKQRTFDNGSIPHQIHLGELHAILRRQEDFYPFLKDNREKIEKILTFRIPYYVGPLARGNSRFAWMTRKSEETITPWNFEEVVDKGASAQSFIERMTNFDKNLPNEKVLPKHSLLYEYFTVYNELTKVKYVTEGMRKPAFLSGEQKKAIVDLLFKTNRKVTVKQLKEDYFKKIECFDSVEISGVEDRFNASLGTYHDLLKIIKDKDFLDNEENEDILEDIVLTLTLFEDREMIEERLKTYAHLFDDKVMKQLKRRRYTGWGRLSRKLINGIRDKQSGKTILDFLKSDGFANRNFMQLIHDDSLTFKEDIQKAQVSGQGDSLHEHIANLAGSPAIKKGILQTVKVVDELVKVMGRHKPENIVIEMARENQTTQKGQKNSRERMKRIEEGIKELGSQILKEHPVENTQLQNEKLYLYYLQNGRDMYVDQELDINRLSDYDVDHIVPQSFLKDDSIDNKVLTRSDKARGKSDNVPSEEVVKKMKNYWRQLLNAKLITQRKFDNLTKAERGGLSELDKAGFIKRQLVETRQITKHVAQILDSRMNTKYDENDKLIREVKVITLKSKLVSDFRKDFQFYKVREINNYHHAHDAYLNAVVGTALIKKYPKLESEFVYGDYKVYDVRKMIAKSEQEIGKATAKYFFYSNIMNFFKTEITLANGEIRKRPLIETNGETGEIVWDKGRDFATVRKVLSMPQVNIVKKTEVQTGGFSKESILPKRNSDKLIARKKDWDPKKYGGFDSPTVAYSVLVVAKVEKGKSKKLKSVKELLGITIMERSSFEKNPIDFLEAKGYKEVKKDLIIKLPKYSLFELENGRKRMLASAGELQKGNELALPSKYVNFLYLASHYEKLKGSPEDNEQKQLFVEQHKHYLDEIIEQISEFSKRVILADANLDKVLSAYNKHRDKPIREQAENIIHLFTLTNLGAPAAFKYFDTTIDRKRYTSTKEVLDATLIHQSITGLYETRIDLSQLGGDGGGSSPAPGGGGGTLNLEDEYRLYETSAEPEVSPGSTWLSDFPQAWAETGGMGLAVRQAPLIIPLKATSTPVSIKQYPMSQEAKLGIKPHIQRLLDQGILVPCQSPWNTPLLPVKKPGTNDYRPVQDLREVNKRVEDIHPTVPNPYNLLSGLPPSHRWYTVLDLKDAFFCLRLHPTSQPLFAFEWRDPGMGISGQLTWTRLPQGFKNSPTLFNEALHRDLADFRIQHPDLILLQYVDDILLAATSELDCQQGTRALLLTLGNLGYRASAKKAQLCQKQVKYLGYLLKEGQRWLTEARKETVMGQPTPKTPRQLREFLGKAGFCRLFIPGFAEMAAPLYPLTKPGTLFNWGPDQQKAYQEIKQALLTAPALGLPDLTKPFELFVDEKQGYAKGVLTQKLGPWRRPVAYLSKKLDPVAAGWPPCLRMVAAIAVLRKDAGKLTMGQPLVILAPHAVEALVKQPPDRWLSNARMTHYQAMLLDTDRVQFGPVVALNPATLLPLPEEGAPHDCLEILAETHGTRPDLTDQPIPDADHTWYTDGSSFLQEGQRKAGAAVTTETEVIWARALPAGTSAQRAELIALTQALKMAEGKRLNVYTDSRYAFATAHIHGEIYRRRGWLTSEGREIKNKSEILALLKALFLPKRLSIIHCLGHQKGDSAEARGNRLADQAAREAAIKTPPDTSTLLAGKRTADGSEFEKRTADGSEFESPKKKAKVE

SEQ ID NO: 1875 - protein, 2096 aa, synthetic construct
  source 1..2096: note = Description of Artificial Sequence: Synthetic polypeptide
MPAAKRVKLDGGDKKYSIGLDIGTNSVGWAVITDEYKVPSKKFKVLGNTDRHSIKKNLIGALLFDSGETAEATRLKRTARRRYTRRKNRICYLQEIFSNEMAKVDDSFFHRLEESFLVEEDKKHERHPIFGNIVDEVAYHEKYPTIYHLRKKLVDSTDKADLRLIYLALAHMIKFRGHFLIEGDLNPDNSDVDKLFIQLVQTYNQLFEENPINASGVDAKAILSARLSKSRRLENLIAQLPGEKKNGLFGNLIALSLGLTPNFKSNFDLAEDAKLQLSKDTYDDDLDNLLAQIGDQYADLFLAAKNLSDAILLSDILRVNTEITKAPLSASMIKRYDEHHQDLTLLKALVRQQLPEKYKEIFFDQSKNGYAGYIDGGASQEEFYKFIKPILEKMDGTEELLVKLNREDLLRKQRTFDNGSIPHQIHLGELHAILRRQEDFYPFLKDNREKIEKILTFRIPYYVGPLARGNSRFAWMTRKSEETITPWNFEEVVDKGASAQSFIERMTNFDKNLPNEKVLPKHSLLYEYFTVYNELTKVKYVTEGMRKPAFLSGEQKKAIVDLLFKTNRKVTVKQLKEDYFKKIECFDSVEISGVEDRFNASLGTYHDLLKIIKDKDFLDNEENEDILEDIVLTLTLFEDREMIEERLKTYAHLFDDKVMKQLKRRRYTGWGRLSRKLINGIRDKQSGKTILDFLKSDGFANRNFMQLIHDDSLTFKEDIQKAQVSGQGDSLHEHIANLAGSPAIKKGILQTVKVVDELVKVMGRHKPENIVIEMARENQTTQKGQKNSRERMKRIEEGIKELGSQILKEHPVENTQLQNEKLYLYYLQNGRDMYVDQELDINRLSDYDVDHIVPQSFLKDDSIDNKVLTRSDKARGKSDNVPSEEVVKKMKNYWRQLLNAKLITQRKFDNLTKAERGGLSELDKAGFIKRQLVETRQITKHVAQILDSRMNTKYDENDKLIREVKVITLKSKLVSDFRKDFQFYKVREINNYHHAHDAYLNAVVGTALIKKYPKLESEFVYGDYKVYDVRKMIAKSEQEIGKATAKYFFYSNIMNFFKTEITLANGEIRKRPLIETNGETGEIVWDKGRDFATVRKVLSMPQVNIVKKTEVQTGGFSKESILPKRNSDKLIARKKDWDPKKYGGFDSPTVAYSVLVVAKVEKGKSKKLKSVKELLGITIMERSSFEKNPIDFLEAKGYKEVKKDLIIKLPKYSLFELENGRKRMLASAGELQKGNELALPSKYVNFLYLASHYEKLKGSPEDNEQKQLFVEQHKHYLDEIIEQISEFSKRVILADANLDKVLSAYNKHRDKPIREQAENIIHLFTLTNLGAPAAFKYFDTTIDRKRYTSTKEVLDATLIHQSITGLYETRIDLSQLGGDGGGSSGGGEAAAKGGTLNLEDEYRLYETSAEPEVSPGSTWLSDFPQAWAETGGMGLAVRQAPLIIPLKATSTPVSIKQYPMSQEAKLGIKPHIQRLLDQGILVPCQSPWNTPLLPVKKPGTNDYRPVQDLREVNKRVEDIHPTVPNPYNLLSGLPPSHRWYTVLDLKDAFFCLRLHPTSQPLFAFEWRDPGMGISGQLTWTRLPQGFKNSPTLFNEALHRDLADFRIQHPDLILLQYVDDILLAATSELDCQQGTRALLLTLGNLGYRASAKKAQLCQKQVKYLGYLLKEGQRWLTEARKETVMGQPTPKTPRQLREFLGKAGFCRLFIPGFAEMAAPLYPLTKPGTLFNWGPDQQKAYQEIKQALLTAPALGLPDLTKPFELFVDEKQGYAKGVLTQKLGPWRRPVAYLSKKLDPVAAGWPPCLRMVAAIAVLRKDAGKLTMGQPLVILAPHAVEALVKQPPDRWLSNARMTHYQAMLLDTDRVQFGPVVALNPATLLPLPEEGAPHDCLEILAETHGTRPDLTDQPIPDADHTWYTDGSSFLQEGQRKAGAAVTTETEVIWARALPAGTSAQRAELIALTQALKMAEGKRLNVYTDSRYAFATAHIHGEIYRRRGWLTSEGREIKNKSEILALLKALFLPKRLSIIHCLGHQKGDSAEARGNRLADQAAREAAIKTPPDTSTLLAGKRTADGSEFEKRTADGSEFESPKKKAKVE

SEQ ID NO: 1876 - protein, 2105 aa, synthetic construct
  source 1..2105: note = Description of Artificial Sequence: Synthetic polypeptide
MPAAKRVKLDGGDKKYSIGLDIGTNSVGWAVITDEYKVPSKKFKVLGNTDRHSIKKNLIGALLFDSGETAEATRLKRTARRRYTRRKNRICYLQEIFSNEMAKVDDSFFHRLEESFLVEEDKKHERHPIFGNIVDEVAYHEKYPTIYHLRKKLVDSTDKADLRLIYLALAHMIKFRGHFLIEGDLNPDNSDVDKLFIQLVQTYNQLFEENPINASGVDAKAILSARLSKSRRLENLIAQLPGEKKNGLFGNLIALSLGLTPNFKSNFDLAEDAKLQLSKDTYDDDLDNLLAQIGDQYADLFLAAKNLSDAILLSDILRVNTEITKAPLSASMIKRYDEHHQDLTLLKALVRQQLPEKYKEIFFDQSKNGYAGYIDGGASQEEFYKFIKPILEKMDGTEELLVKLNREDLLRKQRTFDNGSIPHQIHLGELHAILRRQEDFYPFLKDNREKIEKILTFRIPYYVGPLARGNSRFAWMTRKSEETITPWNFEEVVDKGASAQSFIERMTNFDKNLPNEKVLPKHSLLYEYFTVYNELTKVKYVTEGMRKPAFLSGEQKKAIVDLLFKTNRKVTVKQLKEDYFKKIECFDSVEISGVEDRFNASLGTYHDLLKIIKDKDFLDNEENEDILEDIVLTLTLFEDREMIEERLKTYAHLFDDKVMKQLKRRRYTGWGRLSRKLINGIRDKQSGKTILDFLKSDGFANRNFMQLIHDDSLTFKEDIQKAQVSGQGDSLHEHIANLAGSPAIKKGILQTVKVVDELVKVMGRHKPENIVIEMARENQTTQKGQKNSRERMKRIEEGIKELGSQILKEHPVENTQLQNEKLYLYYLQNGRDMYVDQELDINRLSDYDVDHIVPQSFLKDDSIDNKVLTRSDKARGKSDNVPSEEVVKKMKNYWRQLLNAKLITQRKFDNLTKAERGGLSELDKAGFIKRQLVETRQITKHVAQILDSRMNTKYDENDKLIREVKVITLKSKLVSDFRKDFQFYKVREINNYHHAHDAYLNAVVGTALIKKYPKLESEFVYGDYKVYDVRKMIAKSEQEIGKATAKYFFYSNIMNFFKTEITLANGEIRKRPLIETNGETGEIVWDKGRDFATVRKVLSMPQVNIVKKTEVQTGGFSKESILPKRNSDKLIARKKDWDPKKYGGFDSPTVAYSVLVVAKVEKGKSKKLKSVKELLGITIMERSSFEKNPIDFLEAKGYKEVKKDLIIKLPKYSLFELENGRKRMLASAGELQKGNELALPSKYVNFLYLASHYEKLKGSPEDNEQKQLFVEQHKHYLDEIIEQISEFSKRVILADANLDKVLSAYNKHRDKPIREQAENIIHLFTLTNLGAPAAFKYFDTTIDRKRYTSTKEVLDATLIHQSITGLYETRIDLSQLGGDGGGGGGSGGGGSGGGGSGGGGSGGTLNLEDEYRLYETSAEPEVSPGSTWLSDFPQAWAETGGMGLAVRQAPLIIPLKATSTPVSIKQYPMSQEAKLGIKPHIQRLLDQGILVPCQSPWNTPLLPVKKPGTNDYRPVQDLREVNKRVEDIHPTVPNPYNLLSGLPPSHRWYTVLDLKDAFFCLRLHPTSQPLFAFEWRDPGMGISGQLTWTRLPQGFKNSPTLFNEALHRDLADFRIQHPDLILLQYVDDILLAATSELDCQQGTRALLLTLGNLGYRASAKKAQLCQKQVKYLGYLLKEGQRWLTEARKETVMGQPTPKTPRQLREFLGKAGFCRLFIPGFAEMAAPLYPLTKPGTLFNWGPDQQKAYQEIKQALLTAPALGLPDLTKPFELFVDEKQGYAKGVLTQKLGPWRRPVAYLSKKLDPVAAGWPPCLRMVAAIAVLRKDAGKLTMGQPLVILAPHAVEALVKQPPDRWLSNARMTHYQAMLLDTDRVQFGPVVALNPATLLPLPEEGAPHDCLEILAETHGTRPDLTDQPIPDADHTWYTDGSSFLQEGQRKAGAAVTTETEVIWARALPAGTSAQRAELIALTQALKMAEGKRLNVYTDSRYAFATAHIHGEIYRRRGWLTSEGREIKNKSEILALLKALFLPKRLSIIHCLGHQKGDSAEARGNRLADQAAREAAIKTPPDTSTLLAGKRTADGSEFEKRTADGSEFESPKKKAKVE

SEQ ID NO: 1877 - protein, 2097 aa, synthetic construct
  source 1..2097: note = Description of Artificial Sequence: Synthetic polypeptide
MPAAKRVKLDGGDKKYSIGLDIGTNSVGWAVITDEYKVPSKKFKVLGNTDRHSIKKNLIGALLFDSGETAEATRLKRTARRRYTRRKNRICYLQEIFSNEMAKVDDSFFHRLEESFLVEEDKKHERHPIFGNIVDEVAYHEKYPTIYHLRKKLVDSTDKADLRLIYLALAHMIKFRGHFLIEGDLNPDNSDVDKLFIQLVQTYNQLFEENPINASGVDAKAILSARLSKSRRLENLIAQLPGEKKNGLFGNLIALSLGLTPNFKSNFDLAEDAKLQLSKDTYDDDLDNLLAQIGDQYADLFLAAKNLSDAILLSDILRVNTEITKAPLSASMIKRYDEHHQDLTLLKALVRQQLPEKYKEIFFDQSKNGYAGYIDGGASQEEFYKFIKPILEKMDGTEELLVKLNREDLLRKQRTFDNGSIPHQIHLGELHAILRRQEDFYPFLKDNREKIEKILTFRIPYYVGPLARGNSRFAWMTRKSEETITPWNFEEVVDKGASAQSFIERMTNFDKNLPNEKVLPKHSLLYEYFTVYNELTKVKYVTEGMRKPAFLSGEQKKAIVDLLFKTNRKVTVKQLKEDYFKKIECFDSVEISGVEDRFNASLGTYHDLLKIIKDKDFLDNEENEDILEDIVLTLTLFEDREMIEERLKTYAHLFDDKVMKQLKRRRYTGWGRLSRKLINGIRDKQSGKTILDFLKSDGFANRNFMQLIHDDSLTFKEDIQKAQVSGQGDSLHEHIANLAGSPAIKKGILQTVKVVDELVKVMGRHKPENIVIEMARENQTTQKGQKNSRERMKRIEEGIKELGSQILKEHPVENTQLQNEKLYLYYLQNGRDMYVDQELDINRLSDYDVDHIVPQSFLKDDSIDNKVLTRSDKARGKSDNVPSEEVVKKMKNYWRQLLNAKLITQRKFDNLTKAERGGLSELDKAGFIKRQLVETRQITKHVAQILDSRMNTKYDENDKLIREVKVITLKSKLVSDFRKDFQFYKVREINNYHHAHDAYLNAVVGTALIKKYPKLESEFVYGDYKVYDVRKMIAKSEQEIGKATAKYFFYSNIMNFFKTEITLANGEIRKRPLIETNGETGEIVWDKGRDFATVRKVLSMPQVNIVKKTEVQTGGFSKESILPKRNSDKLIARKKDWDPKKYGGFDSPTVAYSVLVVAKVEKGKSKKLKSVKELLGITIMERSSFEKNPIDFLEAKGYKEVKKDLIIKLPKYSLFELENGRKRMLASAGELQKGNELALPSKYVNFLYLASHYEKLKGSPEDNEQKQLFVEQHKHYLDEIIEQISEFSKRVILADANLDKVLSAYNKHRDKPIREQAENIIHLFTLTNLGAPAAFKYFDTTIDRKRYTSTKEVLDATLIHQSITGLYETRIDLSQLGGDGGGSSGSSGSSGSSGGTLNLEDEYRLYETSAEPEVSPGSTWLSDFPQAWAETGGMGLAVRQAPLIIPLKATSTPVSIKQYPMSQEAKLGIKPHIQRLLDQGILVPCQSPWNTPLLPVKKPGTNDYRPVQDLREVNKRVEDIHPTVPNPYNLLSGLPPSHRWYTVLDLKDAFFCLRLHPTSQPLFAFEWRDPGMGISGQLTWTRLPQGFKNSPTLFNEALHRDLADFRIQHPDLILLQYVDDILLAATSELDCQQGTRALLLTLGNLGYRASAKKAQLCQKQVKYLGYLLKEGQRWLTEARKETVMGQPTPKTPRQLREFLGKAGFCRLFIPGFAEMAAPLYPLTKPGTLFNWGPDQQKAYQEIKQALLTAPALGLPDLTKPFELFVDEKQGYAKGVLTQKLGPWRRPVAYLSKKLDPVAAGWPPCLRMVAAIAVLRKDAGKLTMGQPLVILAPHAVEALVKQPPDRWLSNARMTHYQAMLLDTDRVQFGPVVALNPATLLPLPEEGAPHDCLEILAETHGTRPDLTDQPIPDADHTWYTDGSSFLQEGQRKAGAAVTTETEVIWARALPAGTSAQRAELIALTQALKMAEGKRLNVYTDSRYAFATAHIHGEIYRRRGWLTSEGREIKNKSEILALLKALFLPKRLSIIHCLGHQKGDSAEARGNRLADQAAREAAIKTPPDTSTLLAGKRTADGSEFEKRTADGSEFESPKKKAKVE

SEQ ID NO: 1878 - protein, 2096 aa, synthetic construct
  source 1..2096: note = Description of Artificial Sequence: Synthetic polypeptide
MPAAKRVKLDGGDKKYSIGLDIGTNSVGWAVITDEYKVPSKKFKVLGNTDRHSIKKNLIGALLFDSGETAEATRLKRTARRRYTRRKNRICYLQEIFSNEMAKVDDSFFHRLEESFLVEEDKKHERHPIFGNIVDEVAYHEKYPTIYHLRKKLVDSTDKADLRLIYLALAHMIKFRGHFLIEGDLNPDNSDVDKLFIQLVQTYNQLFEENPINASGVDAKAILSARLSKSRRLENLIAQLPGEKKNGLFGNLIALSLGLTPNFKSNFDLAEDAKLQLSKDTYDDDLDNLLAQIGDQYADLFLAAKNLSDAILLSDILRVNTEITKAPLSASMIKRYDEHHQDLTLLKALVRQQLPEKYKEIFFDQSKNGYAGYIDGGASQEEFYKFIKPILEKMDGTEELLVKLNREDLLRKQRTFDNGSIPHQIHLGELHAILRRQEDFYPFLKDNREKIEKILTFRIPYYVGPLARGNSRFAWMTRKSEETITPWNFEEVVDKGASAQSFIERMTNFDKNLPNEKVLPKHSLLYEYFTVYNELTKVKYVTEGMRKPAFLSGEQKKAIVDLLFKTNRKVTVKQLKEDYFKKIECFDSVEISGVEDRFNASLGTYHDLLKIIKDKDFLDNEENEDILEDIVLTLTLFEDREMIEERLKTYAHLFDDKVMKQLKRRRYTGWGRLSRKLINGIRDKQSGKTILDFLKSDGFANRNFMQLIHDDSLTFKEDIQKAQVSGQGDSLHEHIANLAGSPAIKKGILQTVKVVDELVKVMGRHKPENIVIEMARENQTTQKGQKNSRERMKRIEEGIKELGSQILKEHPVENTQLQNEKLYLYYLQNGRDMYVDQELDINRLSDYDVDHIVPQSFLKDDSIDNKVLTRSDKARGKSDNVPSEEVVKKMKNYWRQLLNAKLITQRKFDNLTKAERGGLSELDKAGFIKRQLVETRQITKHVAQILDSRMNTKYDENDKLIREVKVITLKSKLVSDFRKDFQFYKVREINNYHHAHDAYLNAVVGTALIKKYPKLESEFVYGDYKVYDVRKMIAKSEQEIGKATAKYFFYSNIMNFFKTEITLANGEIRKRPLIETNGETGEIVWDKGRDFATVRKVLSMPQVNIVKKTEVQTGGFSKESILPKRNSDKLIARKKDWDPKKYGGFDSPTVAYSVLVVAKVEKGKSKKLKSVKELLGITIMERSSFEKNPIDFLEAKGYKEVKKDLIIKLPKYSLFELENGRKRMLASAGELQKGNELALPSKYVNFLYLASHYEKLKGSPEDNEQKQLFVEQHKHYLDEIIEQISEFSKRVILADANLDKVLSAYNKHRDKPIREQAENIIHLFTLTNLGAPAAFKYFDTTIDRKRYTSTKEVLDATLIHQSITGLYETRIDLSQLGGDGGGGGEAAAKGSSGGTLNLEDEYRLYETSAEPEVSPGSTWLSDFPQAWAETGGMGLAVRQAPLIIPLKATSTPVSIKQYPMSQEAKLGIKPHIQRLLDQGILVPCQSPWNTPLLPVKKPGTNDYRPVQDLREVNKRVEDIHPTVPNPYNLLSGLPPSHRWYTVLDLKDAFFCLRLHPTSQPLFAFEWRDPGMGISGQLTWTRLPQGFKNSPTLFNEALHRDLADFRIQHPDLILLQYVDDILLAATSELDCQQGTRALLLTLGNLGYRASAKKAQLCQKQVKYLGYLLKEGQRWLTEARKETVMGQPTPKTPRQLREFLGKAGFCRLFIPGFAEMAAPLYPLTKPGTLFNWGPDQQKAYQEIKQALLTAPALGLPDLTKPFELFVDEKQGYAKGVLTQKLGPWRRPVAYLSKKLDPVAAGWPPCLRMVAAIAVLRKDAGKLTMGQPLVILAPHAVEALVKQPPDRWLSNARMTHYQAMLLDTDRVQFGPVVALNPATLLPLPEEGAPHDCLEILAETHGTRPDLTDQPIPDADHTWYTDGSSFLQEGQRKAGAAVTTETEVIWARALPAGTSAQRAELIALTQALKMAEGKRLNVYTDSRYAFATAHIHGEIYRRRGWLTSEGREIKNKSEILALLKALFLPKRLSIIHCLGHQKGDSAEARGNRLADQAAREAAIKTPPDTSTLLAGKRTADGSEFEKRTADGSEFESPKKKAKVE

SEQ ID NO: 1879 - protein, 2100 aa, synthetic construct
  source 1..2100: note = Description of Artificial Sequence: Synthetic polypeptide
MPAAKRVKLDGGDKKYSIGLDIGTNSVGWAVITDEYKVPSKKFKVLGNTDRHSIKKNLIGALLFDSGETAEATRLKRTARRRYTRRKNRICYLQEIFSNEMAKVDDSFFHRLEESFLVEEDKKHERHPIFGNIVDEVAYHEKYPTIYHLRKKLVDSTDKADLRLIYLALAHMIKFRGHFLIEGDLNPDNSDVDKLFIQLVQTYNQLFEENPINASGVDAKAILSARLSKSRRLENLIAQLPGEKKNGLFGNLIALSLGLTPNFKSNFDLAEDAKLQLSKDTYDDDLDNLLAQIGDQYADLFLAAKNLSDAILLSDILRVNTEITKAPLSASMIKRYDEHHQDLTLLKALVRQQLPEKYKEIFFDQSKNGYAGYIDGGASQEEFYKFIKPILEKMDGTEELLVKLNREDLLRKQRTFDNGSIPHQIHLGELHAILRRQEDFYPFLKDNREKIEKILTFRIPYYVGPLARGNSRFAWMTRKSEETITPWNFEEVVDKGASAQSFIERMTNFDKNLPNEKVLPKHSLLYEYFTVYNELTKVKYVTEGMRKPAFLSGEQKKAIVDLLFKTNRKVTVKQLKEDYFKKIECFDSVEISGVEDRFNASLGTYHDLLKIIKDKDFLDNEENEDILEDIVLTLTLFEDREMIEERLKTYAHLFDDKVMKQLKRRRYTGWGRLSRKLINGIRDKQSGKTILDFLKSDGFANRNFMQLIHDDSLTFKEDIQKAQVSGQGDSLHEHIANLAGSPAIKKGILQTVKVVDELVKVMGRHKPENIVIEMARENQTTQKGQKNSRERMKRIEEGIKELGSQILKEHPVENTQLQNEKLYLYYLQNGRDMYVDQELDINRLSDYDVDHIVPQSFLKDDSIDNKVLTRSDKARGKSDNVPSEEVVKKMKNYWRQLLNAKLITQRKFDNLTKAERGGLSELDKAGFIKRQLVETRQITKHVAQILDSRMNTKYDENDKLIREVKVITLKSKLVSDFRKDFQFYKVREINNYHHAHDAYLNAVVGTALIKKYPKLESEFVYGDYKVYDVRKMIAKSEQEIGKATAKYFFYSNIMNFFKTEITLANGEIRKRPLIETNGETGEIVWDKGRDFATVRKVLSMPQVNIVKKTEVQTGGFSKESILPKRNSDKLIARKKDWDPKKYGGFDSPTVAYSVLVVAKVEKGKSKKLKSVKELLGITIMERSSFEKNPIDFLEAKGYKEVKKDLIIKLPKYSLFELENGRKRMLASAGELQKGNELALPSKYVNFLYLASHYEKLKGSPEDNEQKQLFVEQHKHYLDEIIEQISEFSKRVILADANLDKVLSAYNKHRDKPIREQAENIIHLFTLTNLGAPAAFKYFDTTIDRKRYTSTKEVLDATLIHQSITGLYETRIDLSQLGGDGGEAAAKEAAAKEAAAKGGTLNLEDEYRLYETSAEPEVSPGSTWLSDFPQAWAETGGMGLAVRQAPLIIPLKATSTPVSIKQYPMSQEAKLGIKPHIQRLLDQGILVPCQSPWNTPLLPVKKPGTNDYRPVQDLREVNKRVEDIHPTVPNPYNLLSGLPPSHRWYTVLDLKDAFFCLRLHPTSQPLFAFEWRDPGMGISGQLTWTRLPQGFKNSPTLFNEALHRDLADFRIQHPDLILLQYVDDILLAATSELDCQQGTRALLLTLGNLGYRASAKKAQLCQKQVKYLGYLLKEGQRWLTEARKETVMGQPTPKTPRQLREFLGKAGFCRLFIPGFAEMAAPLYPLTKPGTLFNWGPDQQKAYQEIKQALLTAPALGLPDLTKPFELFVDEKQGYAKGVLTQKLGPWRRPVAYLSKKLDPVAAGWPPCLRMVAAIAVLRKDAGKLTMGQPLVILAPHAVEALVKQPPDRWLSNARMTHYQAMLLDTDRVQFGPVVALNPATLLPLPEEGAPHDCLEILAETHGTRPDLTDQPIPDADHTWYTDGSSFLQEGQRKAGAAVTTETEVIWARALPAGTSAQRAELIALTQALKMAEGKRLNVYTDSRYAFATAHIHGEIYRRRGWLTSEGREIKNKSEILALLKALFLPKRLSIIHCLGHQKGDSAEARGNRLADQAAREAAIKTPPDTSTLLAGKRTADGSEFEKRTADGSEFESPKKKAKVE

SEQ ID NO: 1880 - protein, 2103 aa, synthetic construct
  source 1..2103: note = Description of Artificial Sequence: Synthetic polypeptide
MPAAKRVKLDGGDKKYSIGLDIGTNSVGWAVITDEYKVPSKKFKVLGNTDRHSIKKNLIGALLFDSGETAEATRLKRTARRRYTRRKNRICYLQEIFSNEMAKVDDSFFHRLEESFLVEEDKKHERHPIFGNIVDEVAYHEKYPTIYHLRKKLVDSTDKADLRLIYLALAHMIKFRGHFLIEGDLNPDNSDVDKLFIQLVQTYNQLFEENPINASGVDAKAILSARLSKSRRLENLIAQLPGEKKNGLFGNLIALSLGLTPNFKSNFDLAEDAKLQLSKDTYDDDLDNLLAQIGDQYADLFLAAKNLSDAILLSDILRVNTEITKAPLSASMIKRYDEHHQDLTLLKALVRQQLPEKYKEIFFDQSKNGYAGYIDGGASQEEFYKFIKPILEKMDGTEELLVKLNREDLLRKQRTFDNGSIPHQIHLGELHAILRRQEDFYPFLKDNREKIEKILTFRIPYYVGPLARGNSRFAWMTRKSEETITPWNFEEVVDKGASAQSFIERMTNFDKNLPNEKVLPKHSLLYEYFTVYNELTKVKYVTEGMRKPAFLSGEQKKAIVDLLFKTNRKVTVKQLKEDYFKKIECFDSVEISGVEDRFNASLGTYHDLLKIIKDKDFLDNEENEDILEDIVLTLTLFEDREMIEERLKTYAHLFDDKVMKQLKRRRYTGWGRLSRKLINGIRDKQSGKTILDFLKSDGFANRNFMQLIHDDSLTFKEDIQKAQVSGQGDSLHEHIANLAGSPAIKKGILQTVKVVDELVKVMGRHKPENIVIEMARENQTTQKGQKNSRERMKRIEEGIKELGSQILKEHPVENTQLQNEKLYLYYLQNGRDMYVDQELDINRLSDYDVDHIVPQSFLKDDSIDNKVLTRSDKARGKSDNVPSEEVVKKMKNYWRQLLNAKLITQRKFDNLTKAERGGLSELDKAGFIKRQLVETRQITKHVAQILDSRMNTKYDENDKLIREVKVITLKSKLVSDFRKDFQFYKVREINNYHHAHDAYLNAVVGTALIKKYPKLESEFVYGDYKVYDVRKMIAKSEQEIGKATAKYFFYSNIMNFFKTEITLANGEIRKRPLIETNGETGEIVWDKGRDFATVRKVLSMPQVNIVKKTEVQTGGFSKESILPKRNSDKLIARKKDWDPKKYGGFDSPTVAYSVLVVAKVEKGKSKKLKSVKELLGITIMERSSFEKNPIDFLEAKGYKEVKKDLIIKLPKYSLFELENGRKRMLASAGELQKGNELALPSKYVNFLYLASHYEKLKGSPEDNEQKQLFVEQHKHYLDEIIEQISEFSKRVILADANLDKVLSAYNKHRDKPIREQAENIIHLFTLTNLGAPAAFKYFDTTIDRKRYTSTKEVLDATLIHQSITGLYETRIDLSQLGGDGGGGSGGSGGSGGSGGSGGSGGTLNLEDEYRLYETSAEPEVSPGSTWLSDFPQAWAETGGMGLAVRQAPLIIPLKATSTPVSIKQYPMSQEAKLGIKPHIQRLLDQGILVPCQSPWNTPLLPVKKPGTNDYRPVQDLREVNKRVEDIHPTVPNPYNLLSGLPPSHRWYTVLDLKDAFFCLRLHPTSQPLFAFEWRDPGMGISGQLTWTRLPQGFKNSPTLFNEALHRDLADFRIQHPDLILLQYVDDILLAATSELDCQQGTRALLLTLGNLGYRASAKKAQLCQKQVKYLGYLLKEGQRWLTEARKETVMGQPTPKTPRQLREFLGKAGFCRLFIPGFAEMAAPLYPLTKPGTLFNWGPDQQKAYQEIKQALLTAPALGLPDLTKPFELFVDEKQGYAKGVLTQKLGPWRRPVAYLSKKLDPVAAGWPPCLRMVAAIAVLRKDAGKLTMGQPLVILAPHAVEALVKQPPDRWLSNARMTHYQAMLLDTDRVQFGPVVALNPATLLPLPEEGAPHDCLEILAETHGTRPDLTDQPIPDADHTWYTDGSSFLQEGQRKAGAAVTTETEVIWARALPAGTSAQRAELIALTQALKMAEGKRLNVYTDSRYAFATAHIHGEIYRRRGWLTSEGREIKNKSEILALLKALFLPKRLSIIHCLGHQKGDSAEARGNRLADQAAREAAIKTPPDTSTLLAGKRTADGSEFEKRTADGSEFESPKKKAKVE

SEQ ID NO: 1881 - protein, 2094 aa, synthetic construct
  source 1..2094: note = Description of Artificial Sequence: Synthetic polypeptide
MPAAKRVKLDGGDKKYSIGLDIGTNSVGWAVITDEYKVPSKKFKVLGNTDRHSIKKNLIGALLFDSGETAEATRLKRTARRRYTRRKNRICYLQEIFSNEMAKVDDSFFHRLEESFLVEEDKKHERHPIFGNIVDEVAYHEKYPTIYHLRKKLVDSTDKADLRLIYLALAHMIKFRGHFLIEGDLNPDNSDVDKLFIQLVQTYNQLFEENPINASGVDAKAILSARLSKSRRLENLIAQLPGEKKNGLFGNLIALSLGLTPNFKSNFDLAEDAKLQLSKDTYDDDLDNLLAQIGDQYADLFLAAKNLSDAILLSDILRVNTEITKAPLSASMIKRYDEHHQDLTLLKALVRQQLPEKYKEIFFDQSKNGYAGYIDGGASQEEFYKFIKPILEKMDGTEELLVKLNREDLLRKQRTFDNGSIPHQIHLGELHAILRRQEDFYPFLKDNREKIEKILTFRIPYYVGPLARGNSRFAWMTRKSEETITPWNFEEVVDKGASAQSFIERMTNFDKNLPNEKVLPKHSLLYEYFTVYNELTKVKYVTEGMRKPAFLSGEQKKAIVDLLFKTNRKVTVKQLKEDYFKKIECFDSVEISGVEDRFNASLGTYHDLLKIIKDKDFLDNEENEDILEDIVLTLTLFEDREMIEERLKTYAHLFDDKVMKQLKRRRYTGWGRLSRKLINGIRDKQSGKTILDFLKSDGFANRNFMQLIHDDSLTFKEDIQKAQVSGQGDSLHEHIANLAGSPAIKKGILQTVKVVDELVKVMGRHKPENIVIEMARENQTTQKGQKNSRERMKRIEEGIKELGSQILKEHPVENTQLQNEKLYLYYLQNGRDMYVDQELDINRLSDYDVDHIVPQSFLKDDSIDNKVLTRSDKARGKSDNVPSEEVVKKMKNYWRQLLNAKLITQRKFDNLTKAERGGLSELDKAGFIKRQLVETRQITKHVAQILDSRMNTKYDENDKLIREVKVITLKSKLVSDFRKDFQFYKVREINNYHHAHDAYLNAVVGTALIKKYPKLESEFVYGDYKVYDVRKMIAKSEQEIGKATAKYFFYSNIMNFFKTEITLANGEIRKRPLIETNGETGEIVWDKGRDFATVRKVLSMPQVNIVKKTEVQTGGFSKESILPKRNSDKLIARKKDWDPKKYGGFDSPTVAYSVLVVAKVEKGKSKKLKSVKELLGITIMERSSFEKNPIDFLEAKGYKEVKKDLIIKLPKYSLFELENGRKRMLASAGELQKGNELALPSKYVNFLYLASHYEKLKGSPEDNEQKQLFVEQHKHYLDEIIEQISEFSKRVILADANLDKVLSAYNKHRDKPIREQAENIIHLFTLTNLGAPAAFKYFDTTIDRKRYTSTKEVLDATLIHQSITGLYETRIDLSQLGGDGGPAPAPAPAPGGTLNLEDEYRLYETSAEPEVSPGSTWLSDFPQAWAETGGMGLAVRQAPLIIPLKATSTPVSIKQYPMSQEAKLGIKPHIQRLLDQGILVPCQSPWNTPLLPVKKPGTNDYRPVQDLREVNKRVEDIHPTVPNPYNLLSGLPPSHRWYTVLDLKDAFFCLRLHPTSQPLFAFEWRDPGMGISGQLTWTRLPQGFKNSPTLFNEALHRDLADFRIQHPDLILLQYVDDILLAATSELDCQQGTRALLLTLGNLGYRASAKKAQLCQKQVKYLGYLLKEGQRWLTEARKETVMGQPTPKTPRQLREFLGKAGFCRLFIPGFAEMAAPLYPLTKPGTLFNWGPDQQKAYQEIKQALLTAPALGLPDLTKPFELFVDEKQGYAKGVLTQKLGPWRRPVAYLSKKLDPVAAGWPPCLRMVAAIAVLRKDAGKLTMGQPLVILAPHAVEALVKQPPDRWLSNARMTHYQAMLLDTDRVQFGPVVALNPATLLPLPEEGAPHDCLEILAETHGTRPDLTDQPIPDADHTWYTDGSSFLQEGQRKAGAAVTTETEVIWARALPAGTSAQRAELIALTQALKMAEGKRLNVYTDSRYAFATAHIHGEIYRRRGWLTSEGREIKNKSEILALLKALFLPKRLSIIHCLGHQKGDSAEARGNRLADQAAREAAIKTPPDTSTLLAGKRTADGSEFEKRTADGSEFESPKKKAKVE

SEQ ID NO: 1882 - protein, 2093 aa, synthetic construct
  source 1..2093: note = Description of Artificial Sequence: Synthetic polypeptide
MPAAKRVKLDGGDKKYSIGLDIGTNSVGWAVITDEYKVPSKKFKVLGNTDRHSIKKNLIGALLFDSGETAEATRLKRTARRRYTRRKNRICYLQEIFSNEMAKVDDSFFHRLEESFLVEEDKKHERHPIFGNIVDEVAYHEKYPTIYHLRKKLVDSTDKADLRLIYLALAHMIKFRGHFLIEGDLNPDNSDVDKLFIQLVQTYNQLFEENPINASGVDAKAILSARLSKSRRLENLIAQLPGEKKNGLFGNLIALSLGLTPNFKSNFDLAEDAKLQLSKDTYDDDLDNLLAQIGDQYADLFLAAKNLSDAILLSDILRVNTEITKAPLSASMIKRYDEHHQDLTLLKALVRQQLPEKYKEIFFDQSKNGYAGYIDGGASQEEFYKFIKPILEKMDGTEELLVKLNREDLLRKQRTFDNGSIPHQIHLGELHAILRRQEDFYPFLKDNREKIEKILTFRIPYYVGPLARGNSRFAWMTRKSEETITPWNFEEVVDKGASAQSFIERMTNFDKNLPNEKVLPKHSLLYEYFTVYNELTKVKYVTEGMRKPAFLSGEQKKAIVDLLFKTNRKVTVKQLKEDYFKKIECFDSVEISGVEDRFNASLGTYHDLLKIIKDKDFLDNEENEDILEDIVLTLTLFEDREMIEERLKTYAHLFDDKVMKQLKRRRYTGWGRLSRKLINGIRDKQSGKTILDFLKSDGFANRNFMQLIHDDSLTFKEDIQKAQVSGQGDSLHEHIANLAGSPAIKKGILQTVKVVDELVKVMGRHKPENIVIEMARENQTTQKGQKNSRERMKRIEEGIKELGSQILKEHPVENTQLQNEKLYLYYLQNGRDMYVDQELDINRLSDYDVDHIVPQSFLKDDSIDNKVLTRSDKARGKSDNVPSEEVVKKMKNYWRQLLNAKLITQRKFDNLTKAERGGLSELDKAGFIKRQLVETRQITKHVAQILDSRMNTKYDENDKLIREVKVITLKSKLVSDFRKDFQFYKVREINNYHHAHDAYLNAVVGTALIKKYPKLESEFVYGDYKVYDVRKMIAKSEQEIGKATAKYFFYSNIMNFFKTEITLANGEIRKRPLIETNGETGEIVWDKGRDFATVRKVLSMPQVNIVKKTEVQTGGFSKESILPKRNSDKLIARKKDWDPKKYGGFDSPTVAYSVLVVAKVEKGKSKKLKSVKELLGITIMERSSFEKNPIDFLEAKGYKEVKKDLIIKLPKYSLFELENGRKRMLASAGELQKGNELALPSKYVNFLYLASHYEKLKGSPEDNEQKQLFVEQHKHYLDEIIEQISEFSKRVILADANLDKVLSAYNKHRDKPIREQAENIIHLFTLTNLGAPAAFKYFDTTIDRKRYTSTKEVLDATLIHQSITGLYETRIDLSQLGGDGGEAAAKGGSGGTLNLEDEYRLYETSAEPEVSPGSTWLSDFPQAWAETGGMGLAVRQAPLIIPLKATSTPVSIKQYPMSQEAKLGIKPHIQRLLDQGILVPCQSPWNTPLLPVKKPGTNDYRPVQDLREVNKRVEDIHPTVPNPYNLLSGLPPSHRWYTVLDLKDAFFCLRLHPTSQPLFAFEWRDPGMGISGQLTWTRLPQGFKNSPTLFNEALHRDLADFRIQHPDLILLQYVDDILLAATSELDCQQGTRALLLTLGNLGYRASAKKAQLCQKQVKYLGYLLKEGQRWLTEARKETVMGQPTPKTPRQLREFLGKAGFCRLFIPGFAEMAAPLYPLTKPGTLFNWGPDQQKAYQEIKQALLTAPALGLPDLTKPFELFVDEKQGYAKGVLTQKLGPWRRPVAYLSKKLDPVAAGWPPCLRMVAAIAVLRKDAGKLTMGQPLVILAPHAVEALVKQPPDRWLSNARMTHYQAMLLDTDRVQFGPVVALNPATLLPLPEEGAPHDCLEILAETHGTRPDLTDQPIPDADHTWYTDGSSFLQEGQRKAGAAVTTETEVIWARALPAGTSAQRAELIALTQALKMAEGKRLNVYTDSRYAFATAHIHGEIYRRRGWLTSEGREIKNKSEILALLKALFLPKRLSIIHCLGHQKGDSAEARGNRLADQAAREAAIKTPPDTSTLLAGKRTADGSEFEKRTADGSEFESPKKKAKVE

SEQ ID NO: 1883 - protein, 2094 aa, synthetic construct
  source 1..2094: note = Description of Artificial Sequence: Synthetic polypeptide
MPAAKRVKLDGGDKKYSIGLDIGTNSVGWAVITDEYKVPSKKFKVLGNTDRHSIKKNLIGALLFDSGETAEATRLKRTARRRYTRRKNRICYLQEIFSNEMAKVDDSFFHRLEESFLVEEDKKHERHPIFGNIVDEVAYHEKYPTIYHLRKKLVDSTDKADLRLIYLALAHMIKFRGHFLIEGDLNPDNSDVDKLFIQLVQTYNQLFEENPINASGVDAKAILSARLSKSRRLENLIAQLPGEKKNGLFGNLIALSLGLTPNFKSNFDLAEDAKLQLSKDTYDDDLDNLLAQIGDQYADLFLAAKNLSDAILLSDILRVNTEITKAPLSASMIKRYDEHHQDLTLLKALVRQQLPEKYKEIFFDQSKNGYAGYIDGGASQEEFYKFIKPILEKMDGTEELLVKLNREDLLRKQRTFDNGSIPHQIHLGELHAILRRQEDFYPFLKDNREKIEKILTFRIPYYVGPLARGNSRFAWMTRKSEETITPWNFEEVVDKGASAQSFIERMTNFDKNLPNEKVLPKHSLLYEYFTVYNELTKVKYVTEGMRKPAFLSGEQKKAIVDLLFKTNRKVTVKQLKEDYFKKIECFDSVEISGVEDRFNASLGTYHDLLKIIKDKDFLDNEENEDILEDIVLTLTLFEDREMIEERLKTYAHLFDDKVMKQLKRRRYTGWGRLSRKLINGIRDKQSGKTILDFLKSDGFANRNFMQLIHDDSLTFKEDIQKAQVSGQGDSLHEHIANLAGSPAIKKGILQTVKVVDELVKVMGRHKPENIVIEMARENQTTQKGQKNSRERMKRIEEGIKELGSQILKEHPVENTQLQNEKLYLYYLQNGRDMYVDQELDINRLSDYDVDHIVPQSFLKDDSIDNKVLTRSDKARGKSDNVPSEEVVKKMKNYWRQLLNAKLITQRKFDNLTKAERGGLSELDKAGFIKRQLVETRQITKHVAQILDSRMNTKYDENDKLIREVKVITLKSKLVSDFRKDFQFYKVREINNYHHAHDAYLNAVVGTALIKKYPKLESEFVYGDYKVYDVRKMIAKSEQEIGKATAKYFFYSNIMNFFKTEITLANGEIRKRPLIETNGETGEIVWDKGRDFATVRKVLSMPQVNIVKKTEVQTGGFSKESILPKRNSDKLIARKKDWDPKKYGGFDSPTVAYSVLVVAKVEKGKSKKLKSVKELLGITIMERSSFEKNPIDFLEAKGYKEVKKDLIIKLPKYSLFELENGRKRMLASAGELQKGNELALPSKYVNFLYLASHYEKLKGSPEDNEQKQLFVEQHKHYLDEIIEQISEFSKRVILADANLDKVLSAYNKHRDKPIREQAENIIHLFTLTNLGAPAAFKYFDTTIDRKRYTSTKEVLDATLIHQSITGLYETRIDLSQLGGDGGPAPGSSGGSGGTLNLEDEYRLYETSAEPEVSPGSTWLSDFPQAWAETGGMGLAVRQAPLIIPLKATSTPVSIKQYPMSQEAKLGIKPHIQRLLDQGILVPCQSPWNTPLLPVKKPGTNDYRPVQDLREVNKRVEDIHPTVPNPYNLLSGLPPSHRWYTVLDLKDAFFCLRLHPTSQPLFAFEWRDPGMGISGQLTWTRLPQGFKNSPTLFNEALHRDLADFRIQHPDLILLQYVDDILLAATSELDCQQGTRALLLTLGNLGYRASAKKAQLCQKQVKYLGYLLKEGQRWLTEARKETVMGQPTPKTPRQLREFLGKAGFCRLFIPGFAEMAAPLYPLTKPGTLFNWGPDQQKAYQEIKQALLTAPALGLPDLTKPFELFVDEKQGYAKGVLTQKLGPWRRPVAYLSKKLDPVAAGWPPCLRMVAAIAVLRKDAGKLTMGQPLVILAPHAVEALVKQPPDRWLSNARMTHYQAMLLDTDRVQFGPVVALNPATLLPLPEEGAPHDCLEILAETHGTRPDLTDQPIPDADHTWYTDGSSFLQEGQRKAGAAVTTETEVIWARALPAGTSAQRAELIALTQALKMAEGKRLNVYTDSRYAFATAHIHGEIYRRRGWLTSEGREIKNKSEILALLKALFLPKRLSIIHCLGHQKGDSAEARGNRLADQAAREAAIKTPPDTSTLLAGKRTADGSEFEKRTADGSEFESPKKKAKVE

SEQ ID NO: 1884 - protein, 2094 aa, synthetic construct
  source 1..2094: note = Description of Artificial Sequence: Synthetic polypeptide
MPAAKRVKLDGGDKKYSIGLDIGTNSVGWAVITDEYKVPSKKFKVLGNTDRHSIKKNLIGALLFDSGETAEATRLKRTARRRYTRRKNRICYLQEIFSNEMAKVDDSFFHRLEESFLVEEDKKHERHPIFGNIVDEVAYHEKYPTIYHLRKKLVDSTDKADLRLIYLALAHMIKFRGHFLIEGDLNPDNSDVDKLFIQLVQTYNQLFEENPINASGVDAKAILSARLSKSRRLENLIAQLPGEKKNGLFGNLIALSLGLTPNFKSNFDLAEDAKLQLSKDTYDDDLDNLLAQIGDQYADLFLAAKNLSDAILLSDILRVNTEITKAPLSASMIKRYDEHHQDLTLLKALVRQQLPEKYKEIFFDQSKNGYAGYIDGGASQEEFYKFIKPILEKMDGTEELLVKLNREDLLRKQRTFDNGSIPHQIHLGELHAILRRQEDFYPFLKDNREKIEKILTFRIPYYVGPLARGNSRFAWMTRKSEETITPWNFEEVVDKGASAQSFIERMTNFDKNLPNEKVLPKHSLLYEYFTVYNELTKVKYVTEGMRKPAFLSGEQKKAIVDLLFKTNRKVTVKQLKEDYFKKIECFDSVEISGVEDRFNASLGTYHDLLKIIKDKDFLDNEENEDILEDIVLTLTLFEDREMIEERLKTYAHLFDDKVMKQLKRRRYTGWGRLSRKLINGIRDKQSGKTILDFLKSDGFANRNFMQLIHDDSLTFKEDIQKAQVSGQGDSLHEHIANLAGSPAIKKGILQTVKVVDELVKVMGRHKPENIVIEMARENQTTQKGQKNSRERMKRIEEGIKELGSQILKEHPVENTQLQNEKLYLYYLQNGRDMYVDQELDINRLSDYDVDHIVPQSFLKDDSIDNKVLTRSDKARGKSDNVPSEEVVKKMKNYWRQLLNAKLITQRKFDNLTKAERGGLSELDKAGFIKRQLVETRQITKHVAQILDSRMNTKYDENDKLIREVKVITLKSKLVSDFRKDFQFYKVREINNYHHAHDAYLNAVVGTALIKKYPKLESEFVYGDYKVYDVRKMIAKSEQEIGKATAKYFFYSNIMNFFKTEITLANGEIRKRPLIETNGETGEIVWDKGRDFATVRKVLSMPQVNIVKKTEVQTGGFSKESILPKRNSDKLIARKKDWDPKKYGGFDSPTVAYSVLVVAKVEKGKSKKLKSVKELLGITIMERSSFEKNPIDFLEAKGYKEVKKDLIIKLPKYSLFELENGRKRMLASAGELQKGNELALPSKYVNFLYLASHYEKLKGSPEDNEQKQLFVEQHKHYLDEIIEQISEFSKRVILADANLDKVLSAYNKHRDKPIREQAENIIHLFTLTNLGAPAAFKYFDTTIDRKRYTSTKEVLDATLIHQSITGLYETRIDLSQLGGDGGGGGGSSGGSGGTLNLEDEYRLYETSAEPEVSPGSTWLSDFPQAWAETGGMGLAVRQAPLIIPLKATSTPVSIKQYPMSQEAKLGIKPHIQRLLDQGILVPCQSPWNTPLLPVKKPGTNDYRPVQDLREVNKRVEDIHPTVPNPYNLLSGLPPSHRWYTVLDLKDAFFCLRLHPTSQPLFAFEWRDPGMGISGQLTWTRLPQGFKNSPTLFNEALHRDLADFRIQHPDLILLQYVDDILLAATSELDCQQGTRALLLTLGNLGYRASAKKAQLCQKQVKYLGYLLKEGQRWLTEARKETVMGQPTPKTPRQLREFLGKAGFCRLFIPGFAEMAAPLYPLTKPGTLFNWGPDQQKAYQEIKQALLTAPALGLPDLTKPFELFVDEKQGYAKGVLTQKLGPWRRPVAYLSKKLDPVAAGWPPCLRMVAAIAVLRKDAGKLTMGQPLVILAPHAVEALVKQPPDRWLSNARMTHYQAMLLDTDRVQFGPVVALNPATLLPLPEEGAPHDCLEILAETHGTRPDLTDQPIPDADHTWYTDGSSFLQEGQRKAGAAVTTETEVIWARALPAGTSAQRAELIALTQALKMAEGKRLNVYTDSRYAFATAHIHGEIYRRRGWLTSEGREIKNKSEILALLKALFLPKRLSIIHCLGHQKGDSAEARGNRLADQAAREAAIKTPPDTSTLLAGKRTADGSEFEKRTADGSEFESPKKKAKVE

SEQ ID NO: 1885 - protein, 2090 aa, synthetic construct
  source 1..2090: note = Description of Artificial Sequence: Synthetic polypeptide
MPAAKRVKLDGGDKKYSIGLDIGTNSVGWAVITDEYKVPSKKFKVLGNTDRHSIKKNLIGALLFDSGETAEATRLKRTARRRYTRRKNRICYLQEIFSNEMAKVDDSFFHRLEESFLVEEDKKHERHPIFGNIVDEVAYHEKYPTIYHLRKKLVDSTDKADLRLIYLALAHMIKFRGHFLIEGDLNPDNSDVDKLFIQLVQTYNQLFEENPINASGVDAKAILSARLSKSRRLENLIAQLPGEKKNGLFGNLIALSLGLTPNFKSNFDLAEDAKLQLSKDTYDDDLDNLLAQIGDQYADLFLAAKNLSDAILLSDILRVNTEITKAPLSASMIKRYDEHHQDLTLLKALVRQQLPEKYKEIFFDQSKNGYAGYIDGGASQEEFYKFIKPILEKMDGTEELLVKLNREDLLRKQRTFDNGSIPHQIHLGELHAILRRQEDFYPFLKDNREKIEKILTFRIPYYVGPLARGNSRFAWMTRKSEETITPWNFEEVVDKGASAQSFIERMTNFDKNLPNEKVLPKHSLLYEYFTVYNELTKVKYVTEGMRKPAFLSGEQKKAIVDLLFKTNRKVTVKQLKEDYFKKIECFDSVEISGVEDRFNASLGTYHDLLKIIKDKDFLDNEENEDILEDIVLTLTLFEDREMIEERLKTYAHLFDDKVMKQLKRRRYTGWGRLSRKLINGIRDKQSGKTILDFLKSDGFANRNFMQLIHDDSLTFKEDIQKAQVSGQGDSLHEHIANLAGSPAIKKGILQTVKVVDELVKVMGRHKPENIVIEMARENQTTQKGQKNSRERMKRIEEGIKELGSQILKEHPVENTQLQNEKLYLYYLQNGRDMYVDQELDINRLSDYDVDHIVPQSFLKDDSIDNKVLTRSDKARGKSDNVPSEEVVKKMKNYWRQLLNAKLITQRKFDNLTKAERGGLSELDKAGFIKRQLVETRQITKHVAQILDSRMNTKYDENDKLIREVKVITLKSKLVSDFRKDFQFYKVREINNYHHAHDAYLNAVVGTALIKKYPKLESEFVYGDYKVYDVRKMIAKSEQEIGKATAKYFFYSNIMNFFKTEITLANGEIRKRPLIETNGETGEIVWDKGRDFATVRKVLSMPQVNIVKKTEVQTGGFSKESILPKRNSDKLIARKKDWDPKKYGGFDSPTVAYSVLVVAKVEKGKSKKLKSVKELLGITIMERSSFEKNPIDFLEAKGYKEVKKDLIIKLPKYSLFELENGRKRMLASAGELQKGNELALPSKYVNFLYLASHYEKLKGSPEDNEQKQLFVEQHKHYLDEIIEQISEFSKRVILADANLDKVLSAYNKHRDKPIREQAENIIHLFTLTNLGAPAAFKYFDTTIDRKRYTSTKEVLDATLIHQSITGLYETRIDLSQLGGDGGGGGGSGGTLNLEDEYRLYETSAEPEVSPGSTWLSDFPQAWAETGGMGLAVRQAPLIIPLKATSTPVSIKQYPMSQEAKLGIKPHIQRLLDQGILVPCQSPWNTPLLPVKKPGTNDYRPVQDLREVNKRVEDIHPTVPNPYNLLSGLPPSHRWYTVLDLKDAFFCLRLHPTSQPLFAFEWRDPGMGISGQLTWTRLPQGFKNSPTLFNEALHRDLADFRIQHPDLILLQYVDDILLAATSELDCQQGTRALLLTLGNLGYRASAKKAQLCQKQVKYLGYLLKEGQRWLTEARKETVMGQPTPKTPRQLREFLGKAGFCRLFIPGFAEMAAPLYPLTKPGTLFNWGPDQQKAYQEIKQALLTAPALGLPDLTKPFELFVDEKQGYAKGVLTQKLGPWRRPVAYLSKKLDPVAAGWPPCLRMVAAIAVLRKDAGKLTMGQPLVILAPHAVEALVKQPPDRWLSNARMTHYQAMLLDTDRVQFGPVVALNPATLLPLPEEGAPHDCLEILAETHGTRPDLTDQPIPDADHTWYTDGSSFLQEGQRKAGAAVTTETEVIWARALPAGTSAQRAELIALTQALKMAEGKRLNVYTDSRYAFATAHIHGEIYRRRGWLTSEGREIKNKSEILALLKALFLPKRLSIIHCLGHQKGDSAEARGNRLADQAAREAAIKTPPDTSTLLAGKRTADGSEFEKRTADGSEFESPKKKAKVE

SEQ ID NO: 1886 - protein, 2096 aa, synthetic construct
  source 1..2096: note = Description of Artificial Sequence: Synthetic polypeptide
MPAAKRVKLDGGDKKYSIGLDIGTNSVGWAVITDEYKVPSKKFKVLGNTDRHSIKKNLIGALLFDSGETAEATRLKRTARRRYTRRKNRICYLQEIFSNEMAKVDDSFFHRLEESFLVEEDKKHERHPIFGNIVDEVAYHEKYPTIYHLRKKLVDSTDKADLRLIYLALAHMIKFRGHFLIEGDLNPDNSDVDKLFIQLVQTYNQLFEENPINASGVDAKAILSARLSKSRRLENLIAQLPGEKKNGLFGNLIALSLGLTPNFKSNFDLAEDAKLQLSKDTYDDDLDNLLAQIGDQYADLFLAAKNLSDAILLSDILRVNTEITKAPLSASMIKRYDEHHQDLTLLKALVRQQLPEKYKEIFFDQSKNGYAGYIDGGASQEEFYKFIKPILEKMDGTEELLVKLNREDLLRKQRTFDNGSIPHQIHLGELHAILRRQEDFYPFLKDNREKIEKILTFRIPYYVGPLARGNSRFAWMTRKSEETITPWNFEEVVDKGASAQSFIERMTNFDKNLPNEKVLPKHSLLYEYFTVYNELTKVKYVTEGMRKPAFLSGEQKKAIVDLLFKTNRKVTVKQLKEDYFKKIECFDSVEISGVEDRFNASLGTYHDLLKIIKDKDFLDNEENEDILEDIVLTLTLFEDREMIEERLKTYAHLFDDKVMKQLKRRRYTGWGRLSRKLINGIRDKQSGKTILDFLKSDGFANRNFMQLIHDDSLTFKEDIQKAQVSGQGDSLHEHIANLAGSPAIKKGILQTVKVVDELVKVMGRHKPENIVIEMARENQTTQKGQKNSRERMKRIEEGIKELGSQILKEHPVENTQLQNEKLYLYYLQNGRDMYVDQELDINRLSDYDVDHIVPQSFLKDDSIDNKVLTRSDKARGKSDNVPSEEVVKKMKNYWRQLLNAKLITQRKFDNLTKAERGGLSELDKAGFIKRQLVETRQITKHVAQILDSRMNTKYDENDKLIREVKVITLKSKLVSDFRKDFQFYKVREINNYHHAHDAYLNAVVGTALIKKYPKLESEFVYGDYKVYDVRKMIAKSEQEIGKATAKYFFYSNIMNFFKTEITLANGEIRKRPLIETNGETGEIVWDKGRDFATVRKVLSMPQVNIVKKTEVQTGGFSKESILPKRNSDKLIARKKDWDPKKYGGFDSPTVAYSVLVVAKVEKGKSKKLKSVKELLGITIMERSSFEKNPIDFLEAKGYKEVKKDLIIKLPKYSLFELENGRKRMLASAGELQKGNELALPSKYVNFLYLASHYEKLKGSPEDNEQKQLFVEQHKHYLDEIIEQISEFSKRVILADANLDKVLSAYNKHRDKPIREQAENIIHLFTLTNLGAPAAFKYFDTTIDRKRYTSTKEVLDATLIHQSITGLYETRIDLSQLGGDGGGGGEAAAKPAPGGTLNLEDEYRLYETSAEPEVSPGSTWLSDFPQAWAETGGMGLAVRQAPLIIPLKATSTPVSIKQYPMSQEAKLGIKPHIQRLLDQGILVPCQSPWNTPLLPVKKPGTNDYRPVQDLREVNKRVEDIHPTVPNPYNLLSGLPPSHRWYTVLDLKDAFFCLRLHPTSQPLFAFEWRDPGMGISGQLTWTRLPQGFKNSPTLFNEALHRDLADFRIQHPDLILLQYVDDILLAATSELDCQQGTRALLLTLGNLGYRASAKKAQLCQKQVKYLGYLLKEGQRWLTEARKETVMGQPTPKTPRQLREFLGKAGFCRLFIPGFAEMAAPLYPLTKPGTLFNWGPDQQKAYQEIKQALLTAPALGLPDLTKPFELFVDEKQGYAKGVLTQKLGPWRRPVAYLSKKLDPVAAGWPPCLRMVAAIAVLRKDAGKLTMGQPLVILAPHAVEALVKQPPDRWLSNARMTHYQAMLLDTDRVQFGPVVALNPATLLPLPEEGAPHDCLEILAETHGTRPDLTDQPIPDADHTWYTDGSSFLQEGQRKAGAAVTTETEVIWARALPAGTSAQRAELIALTQALKMAEGKRLNVYTDSRYAFATAHIHGEIYRRRGWLTSEGREIKNKSEILALLKALFLPKRLSIIHCLGHQKGDSAEARGNRLADQAAREAAIKTPPDTSTLLAGKRTADGSEFEKRTADGSEFESPKKKAKVE

SEQ ID NO: 1887 - protein, 2091 aa, synthetic construct
  source 1..2091: note = Description of Artificial Sequence: Synthetic polypeptide
MPAAKRVKLDGGDKKYSIGLDIGTNSVGWAVITDEYKVPSKKFKVLGNTDRHSIKKNLIGALLFDSGETAEATRLKRTARRRYTRRKNRICYLQEIFSNEMAKVDDSFFHRLEESFLVEEDKKHERHPIFGNIVDEVAYHEKYPTIYHLRKKLVDSTDKADLRLIYLALAHMIKFRGHFLIEGDLNPDNSDVDKLFIQLVQTYNQLFEENPINASGVDAKAILSARLSKSRRLENLIAQLPGEKKNGLFGNLIALSLGLTPNFKSNFDLAEDAKLQLSKDTYDDDLDNLLAQIGDQYADLFLAAKNLSDAILLSDILRVNTEITKAPLSASMIKRYDEHHQDLTLLKALVRQQLPEKYKEIFFDQSKNGYAGYIDGGASQEEFYKFIKPILEKMDGTEELLVKLNREDLLRKQRTFDNGSIPHQIHLGELHAILRRQEDFYPFLKDNREKIEKILTFRIPYYVGPLARGNSRFAWMTRKSEETITPWNFEEVVDKGASAQSFIERMTNFDKNLPNEKVLPKHSLLYEYFTVYNELTKVKYVTEGMRKPAFLSGEQKKAIVDLLFKTNRKVTVKQLKEDYFKKIECFDSVEISGVEDRFNASLGTYHDLLKIIKDKDFLDNEENEDILEDIVLTLTLFEDREMIEERLKTYAHLFDDKVMKQLKRRRYTGWGRLSRKLINGIRDKQSGKTILDFLKSDGFANRNFMQLIHDDSLTFKEDIQKAQVSGQGDSLHEHIANLAGSPAIKKGILQTVKVVDELVKVMGRHKPENIVIEMARENQTTQKGQKNSRERMKRIEEGIKELGSQILKEHPVENTQLQNEKLYLYYLQNGRDMYVDQELDINRLSDYDVDHIVPQSFLKDDSIDNKVLTRSDKARGKSDNVPSEEVVKKMKNYWRQLLNAKLITQRKFDNLTKAERGGLSELDKAGFIKRQLVETRQITKHVAQILDSRMNTKYDENDKLIREVKVITLKSKLVSDFRKDFQFYKVREINNYHHAHDAYLNAVVGTALIKKYPKLESEFVYGDYKVYDVRKMIAKSEQEIGKATAKYFFYSNIMNFFKTEITLANGEIRKRPLIETNGETGEIVWDKGRDFATVRKVLSMPQVNIVKKTEVQTGGFSKESILPKRNSDKLIARKKDWDPKKYGGFDSPTVAYSVLVVAKVEKGKSKKLKSVKELLGITIMERSSFEKNPIDFLEAKGYKEVKKDLIIKLPKYSLFELENGRKRMLASAGELQKGNELALPSKYVNFLYLASHYEKLKGSPEDNEQKQLFVEQHKHYLDEIIEQISEFSKRVILADANLDKVLSAYNKHRDKPIREQAENIIHLFTLTNLGAPAAFKYFDTTIDRKRYTSTKEVLDATLIHQSITGLYETRIDLSQLGGDGGGSSPAPGGTLNLEDEYRLYETSAEPEVSPGSTWLSDFPQAWAETGGMGLAVRQAPLIIPLKATSTPVSIKQYPMSQEAKLGIKPHIQRLLDQGILVPCQSPWNTPLLPVKKPGTNDYRPVQDLREVNKRVEDIHPTVPNPYNLLSGLPPSHRWYTVLDLKDAFFCLRLHPTSQPLFAFEWRDPGMGISGQLTWTRLPQGFKNSPTLFNEALHRDLADFRIQHPDLILLQYVDDILLAATSELDCQQGTRALLLTLGNLGYRASAKKAQLCQKQVKYLGYLLKEGQRWLTEARKETVMGQPTPKTPRQLREFLGKAGFCRLFIPGFAEMAAPLYPLTKPGTLFNWGPDQQKAYQEIKQALLTAPALGLPDLTKPFELFVDEKQGYAKGVLTQKLGPWRRPVAYLSKKLDPVAAGWPPCLRMVAAIAVLRKDAGKLTMGQPLVILAPHAVEALVKQPPDRWLSNARMTHYQAMLLDTDRVQFGPVVALNPATLLPLPEEGAPHDCLEILAETHGTRPDLTDQPIPDADHTWYTDGSSFLQEGQRKAGAAVTTETEVIWARALPAGTSAQRAELIALTQALKMAEGKRLNVYTDSRYAFATAHIHGEIYRRRGWLTSEGREIKNKSEILALLKALFLPKRLSIIHCLGHQKGDSAEARGNRLADQAAREAAIKTPPDTSTLLAGKRTADGSEFEKRTADGSEFESPKKKAKVE

SEQ ID NO: 1888 - protein, 2093 aa, synthetic construct
  source 1..2093: note = Description of Artificial Sequence: Synthetic polypeptide
MPAAKRVKLDGGDKKYSIGLDIGTNSVGWAVITDEYKVPSKKFKVLGNTDRHSIKKNLIGALLFDSGETAEATRLKRTARRRYTRRKNRICYLQEIFSNEMAKVDDSFFHRLEESFLVEEDKKHERHPIFGNIVDEVAYHEKYPTIYHLRKKLVDSTDKADLRLIYLALAHMIKFRGHFLIEGDLNPDNSDVDKLFIQLVQTYNQLFEENPINASGVDAKAILSARLSKSRRLENLIAQLPGEKKNGLFGNLIALSLGLTPNFKSNFDLAEDAKLQLSKDTYDDDLDNLLAQIGDQYADLFLAAKNLSDAILLSDILRVNTEITKAPLSASMIKRYDEHHQDLTLLKALVRQQLPEKYKEIFFDQSKNGYAGYIDGGASQEEFYKFIKPILEKMDGTEELLVKLNREDLLRKQRTFDNGSIPHQIHLGELHAILRRQEDFYPFLKDNREKIEKILTFRIPYYVGPLARGNSRFAWMTRKSEETITPWNFEEVVDKGASAQSFIERMTNFDKNLPNEKVLPKHSLLYEYFTVYNELTKVKYVTEGMRKPAFLSGEQKKAIVDLLFKTNRKVTVKQLKEDYFKKIECFDSVEISGVEDRFNASLGTYHDLLKIIKDKDFLDNEENEDILEDIVLTLTLFEDREMIEERLKTYAHLFDDKVMKQLKRRRYTGWGRLSRKLINGIRDKQSGKTILDFLKSDGFANRNFMQLIHDDSLTFKEDIQKAQVSGQGDSLHEHIANLAGSPAIKKGILQTVKVVDELVKVMGRHKPENIVIEMARENQTTQKGQKNSRERMKRIEEGIKELGSQILKEHPVENTQLQNEKLYLYYLQNGRDMYVDQELDINRLSDYDVDHIVPQSFLKDDSIDNKVLTRSDKARGKSDNVPSEEVVKKMKNYWRQLLNAKLITQRKFDNLTKAERGGLSELDKAGFIKRQLVETRQITKHVAQILDSRMNTKYDENDKLIREVKVITLKSKLVSDFRKDFQFYKVREINNYHHAHDAYLNAVVGTALIKKYPKLESEFVYGDYKVYDVRKMIAKSEQEIGKATAKYFFYSNIMNFFKTEITLANGEIRKRPLIETNGETGEIVWDKGRDFATVRKVLSMPQVNIVKKTEVQTGGFSKESILPKRNSDKLIARKKDWDPKKYGGFDSPTVAYSVLVVAKVEKGKSKKLKSVKELLGITIMERSSFEKNPIDFLEAKGYKEVKKDLIIKLPKYSLFELENGRKRMLASAGELQKGNELALPSKYVNFLYLASHYEKLKGSPEDNEQKQLFVEQHKHYLDEIIEQISEFSKRVILADANLDKVLSAYNKHRDKPIREQAENIIHLFTLTNLGAPAAFKYFDTTIDRKRYTSTKEVLDATLIHQSITGLYETRIDLSQLGGDGGEAAAKGGGGGTLNLEDEYRLYETSAEPEVSPGSTWLSDFPQAWAETGGMGLAVRQAPLIIPLKATSTPVSIKQYPMSQEAKLGIKPHIQRLLDQGILVPCQSPWNTPLLPVKKPGTNDYRPVQDLREVNKRVEDIHPTVPNPYNLLSGLPPSHRWYTVLDLKDAFFCLRLHPTSQPLFAFEWRDPGMGISGQLTWTRLPQGFKNSPTLFNEALHRDLADFRIQHPDLILLQYVDDILLAATSELDCQQGTRALLLTLGNLGYRASAKKAQLCQKQVKYLGYLLKEGQRWLTEARKETVMGQPTPKTPRQLREFLGKAGFCRLFIPGFAEMAAPLYPLTKPGTLFNWGPDQQKAYQEIKQALLTAPALGLPDLTKPFELFVDEKQGYAKGVLTQKLGPWRRPVAYLSKKLDPVAAGWPPCLRMVAAIAVLRKDAGKLTMGQPLVILAPHAVEALVKQPPDRWLSNARMTHYQAMLLDTDRVQFGPVVALNPATLLPLPEEGAPHDCLEILAETHGTRPDLTDQPIPDADHTWYTDGSSFLQEGQRKAGAAVTTETEVIWARALPAGTSAQRAELIALTQALKMAEGKRLNVYTDSRYAFATAHIHGEIYRRRGWLTSEGREIKNKSEILALLKALFLPKRLSIIHCLGHQKGDSAEARGNRLADQAAREAAIKTPPDTSTLLAGKRTADGSEFEKRTADGSEFESPKKKAKVE

SEQ ID NO: 1889 - protein, 2096 aa, synthetic construct
  source 1..2096: note = Description of Artificial Sequence: Synthetic polypeptide
MPAAKRVKLDGGDKKYSIGLDIGTNSVGWAVITDEYKVPSKKFKVLGNTDRHSIKKNLIGALLFDSGETAEATRLKRTARRRYTRRKNRICYLQEIFSNEMAKVDDSFFHRLEESFLVEEDKKHERHPIFGNIVDEVAYHEKYPTIYHLRKKLVDSTDKADLRLIYLALAHMIKFRGHFLIEGDLNPDNSDVDKLFIQLVQTYNQLFEENPINASGVDAKAILSARLSKSRRLENLIAQLPGEKKNGLFGNLIALSLGLTPNFKSNFDLAEDAKLQLSKDTYDDDLDNLLAQIGDQYADLFLAAKNLSDAILLSDILRVNTEITKAPLSASMIKRYDEHHQDLTLLKALVRQQLPEKYKEIFFDQSKNGYAGYIDGGASQEEFYKFIKPILEKMDGTEELLVKLNREDLLRKQRTFDNGSIPHQIHLGELHAILRRQEDFYPFLKDNREKIEKILTFRIPYYVGPLARGNSRFAWMTRKSEETITPWNFEEVVDKGASAQSFIERMTNFDKNLPNEKVLPKHSLLYEYFTVYNELTKVKYVTEGMRKPAFLSGEQKKAIVDLLFKTNRKVTVKQLKEDYFKKIECFDSVEISGVEDRFNASLGTYHDLLKIIKDKDFLDNEENEDILEDIVLTLTLFEDREMIEERLKTYAHLFDDKVMKQLKRRRYTGWGRLSRKLINGIRDKQSGKTILDFLKSDGFANRNFMQLIHDDSLTFKEDIQKAQVSGQGDSLHEHIANLAGSPAIKKGILQTVKVVDELVKVMGRHKPENIVIEMARENQTTQKGQKNSRERMKRIEEGIKELGSQILKEHPVENTQLQNEKLYLYYLQNGRDMYVDQELDINRLSDYDVDHIVPQSFLKDDSIDNKVLTRSDKARGKSDNVPSEEVVKKMKNYWRQLLNAKLITQRKFDNLTKAERGGLSELDKAGFIKRQLVETRQITKHVAQILDSRMNTKYDENDKLIREVKVITLKSKLVSDFRKDFQFYKVREINNYHHAHDAYLNAVVGTALIKKYPKLESEFVYGDYKVYDVRKMIAKSEQEIGKATAKYFFYSNIMNFFKTEITLANGEIRKRPLIETNGETGEIVWDKGRDFATVRKVLSMPQVNIVKKTEVQTGGFSKESILPKRNSDKLIARKKDWDPKKYGGFDSPTVAYSVLVVAKVEKGKSKKLKSVKELLGITIMERSSFEKNPIDFLEAKGYKEVKKDLIIKLPKYSLFELENGRKRMLASAGELQKGNELALPSKYVNFLYLASHYEKLKGSPEDNEQKQLFVEQHKHYLDEIIEQISEFSKRVILADANLDKVLSAYNKHRDKPIREQAENIIHLFTLTNLGAPAAFKYFDTTIDRKRYTSTKEVLDATLIHQSITGLYETRIDLSQLGGDGGGGSGSSEAAAKGGTLNLEDEYRLYETSAEPEVSPGSTWLSDFPQAWAETGGMGLAVRQAPLIIPLKATSTPVSIKQYPMSQEAKLGIKPHIQRLLDQGILVPCQSPWNTPLLPVKKPGTNDYRPVQDLREVNKRVEDIHPTVPNPYNLLSGLPPSHRWYTVLDLKDAFFCLRLHPTSQPLFAFEWRDPGMGISGQLTWTRLPQGFKNSPTLFNEALHRDLADFRIQHPDLILLQYVDDILLAATSELDCQQGTRALLLTLGNLGYRASAKKAQLCQKQVKYLGYLLKEGQRWLTEARKETVMGQPTPKTPRQLREFLGKAGFCRLFIPGFAEMAAPLYPLTKPGTLFNWGPDQQKAYQEIKQALLTAPALGLPDLTKPFELFVDEKQGYAKGVLTQKLGPWRRPVAYLSKKLDPVAAGWPPCLRMVAAIAVLRKDAGKLTMGQPLVILAPHAVEALVKQPPDRWLSNARMTHYQAMLLDTDRVQFGPVVALNPATLLPLPEEGAPHDCLEILAETHGTRPDLTDQPIPDADHTWYTDGSSFLQEGQRKAGAAVTTETEVIWARALPAGTSAQRAELIALTQALKMAEGKRLNVYTDSRYAFATAHIHGEIYRRRGWLTSEGREIKNKSEILALLKALFLPKRLSIIHCLGHQKGDSAEARGNRLADQAAREAAIKTPPDTSTLLAGKRTADGSEFEKRTADGSEFESPKKKAKVE

SEQ ID NO: 1890 - protein, 2096 aa, synthetic construct
  source 1..2096: note = Description of Artificial Sequence: Synthetic polypeptide
MPAAKRVKLDGGDKKYSIGLDIGTNSVGWAVITDEYKVPSKKFKVLGNTDRHSIKKNLIGALLFDSGETAEATRLKRTARRRYTRRKNRICYLQEIFSNEMAKVDDSFFHRLEESFLVEEDKKHERHPIFGNIVDEVAYHEKYPTIYHLRKKLVDSTDKADLRLIYLALAHMIKFRGHFLIEGDLNPDNSDVDKLFIQLVQTYNQLFEENPINASGVDAKAILSARLSKSRRLENLIAQLPGEKKNGLFGNLIALSLGLTPNFKSNFDLAEDAKLQLSKDTYDDDLDNLLAQIGDQYADLFLAAKNLSDAILLSDILRVNTEITKAPLSASMIKRYDEHHQDLTLLKALVRQQLPEKYKEIFFDQSKNGYAGYIDGGASQEEFYKFIKPILEKMDGTEELLVKLNREDLLRKQRTFDNGSIPHQIHLGELHAILRRQEDFYPFLKDNREKIEKILTFRIPYYVGPLARGNSRFAWMTRKSEETITPWNFEEVVDKGASAQSFIERMTNFDKNLPNEKVLPKHSLLYEYFTVYNELTKVKYVTEGMRKPAFLSGEQKKAIVDLLFKTNRKVTVKQLKEDYFKKIECFDSVEISGVEDRFNASLGTYHDLLKIIKDKDFLDNEENEDILEDIVLTLTLFEDREMIEERLKTYAHLFDDKVMKQLKRRRYTGWGRLSRKLINGIRDKQSGKTILDFLKSDGFANRNFMQLIHDDSLTFKEDIQKAQVSGQGDSLHEHIANLAGSPAIKKGILQTVKVVDELVKVMGRHKPENIVIEMARENQTTQKGQKNSRERMKRIEEGIKELGSQILKEHPVENTQLQNEKLYLYYLQNGRDMYVDQELDINRLSDYDVDHIVPQSFLKDDSIDNKVLTRSDKARGKSDNVPSEEVVKKMKNYWRQLLNAKLITQRKFDNLTKAERGGLSELDKAGFIKRQLVETRQITKHVAQILDSRMNTKYDENDKLIREVKVITLKSKLVSDFRKDFQFYKVREINNYHHAHDAYLNAVVGTALIKKYPKLESEFVYGDYKVYDVRKMIAKSEQEIGKATAKYFFYSNIMNFFKTEITLANGEIRKRPLIETNGETGEIVWDKGRDFATVRKVLSMPQVNIVKKTEVQTGGFSKESILPKRNSDKLIARKKDWDPKKYGGFDSPTVAYSVLVVAKVEKGKSKKLKSVKELLGITIMERSSFEKNPIDFLEAKGYKEVKKDLIIKLPKYSLFELENGRKRMLASAGELQKGNELALPSKYVNFLYLASHYEKLKGSPEDNEQKQLFVEQHKHYLDEIIEQISEFSKRVILADANLDKVLSAYNKHRDKPIREQAENIIHLFTLTNLGAPAAFKYFDTTIDRKRYTSTKEVLDATLIHQSITGLYETRIDLSQLGGDGGGSSPAPEAAAKGGTLNLEDEYRLYETSAEPEVSPGSTWLSDFPQAWAETGGMGLAVRQAPLIIPLKATSTPVSIKQYPMSQEAKLGIKPHIQRLLDQGILVPCQSPWNTPLLPVKKPGTNDYRPVQDLREVNKRVEDIHPTVPNPYNLLSGLPPSHRWYTVLDLKDAFFCLRLHPTSQPLFAFEWRDPGMGISGQLTWTRLPQGFKNSPTLFNEALHRDLADFRIQHPDLILLQYVDDILLAATSELDCQQGTRALLLTLGNLGYRASAKKAQLCQKQVKYLGYLLKEGQRWLTEARKETVMGQPTPKTPRQLREFLGKAGFCRLFIPGFAEMAAPLYPLTKPGTLFNWGPDQQKAYQEIKQALLTAPALGLPDLTKPFELFVDEKQGYAKGVLTQKLGPWRRPVAYLSKKLDPVAAGWPPCLRMVAAIAVLRKDAGKLTMGQPLVILAPHAVEALVKQPPDRWLSNARMTHYQAMLLDTDRVQFGPVVALNPATLLPLPEEGAPHDCLEILAETHGTRPDLTDQPIPDADHTWYTDGSSFLQEGQRKAGAAVTTETEVIWARALPAGTSAQRAELIALTQALKMAEGKRLNVYTDSRYAFATAHIHGEIYRRRGWLTSEGREIKNKSEILALLKALFLPKRLSIIHCLGHQKGDSAEARGNRLADQAAREAAIKTPPDTSTLLAGKRTADGSEFEKRTADGSEFESPKKKAKVE

SEQ ID NO: 1891 - protein, 2093 aa, synthetic construct
  source 1..2093: note = Description of Artificial Sequence: Synthetic polypeptide
MPAAKRVKLDGGDKKYSIGLDIGTNSVGWAVITDEYKVPSKKFKVLGNTDRHSIKKNLIGALLFDSGETAEATRLKRTARRRYTRRKNRICYLQEIFSNEMAKVDDSFFHRLEESFLVEEDKKHERHPIFGNIVDEVAYHEKYPTIYHLRKKLVDSTDKADLRLIYLALAHMIKFRGHFLIEGDLNPDNSDVDKLFIQLVQTYNQLFEENPINASGVDAKAILSARLSKSRRLENLIAQLPGEKKNGLFGNLIALSLGLTPNFKSNFDLAEDAKLQLSKDTYDDDLDNLLAQIGDQYADLFLAAKNLSDAILLSDILRVNTEITKAPLSASMIKRYDEHHQDLTLLKALVRQQLPEKYKEIFFDQSKNGYAGYIDGGASQEEFYKFIKPILEKMDGTEELLVKLNREDLLRKQRTFDNGSIPHQIHLGELHAILRRQEDFYPFLKDNREKIEKILTFRIPYYVGPLARGNSRFAWMTRKSEETITPWNFEEVVDKGASAQSFIERMTNFDKNLPNEKVLPKHSLLYEYFTVYNELTKVKYVTEGMRKPAFLSGEQKKAIVDLLFKTNRKVTVKQLKEDYFKKIECFDSVEISGVEDRFNASLGTYHDLLKIIKDKDFLDNEENEDILEDIVLTLTLFEDREMIEERLKTYAHLFDDKVMKQLKRRRYTGWGRLSRKLINGIRDKQSGKTILDFLKSDGFANRNFMQLIHDDSLTFKEDIQKAQVSGQGDSLHEHIANLAGSPAIKKGILQTVKVVDELVKVMGRHKPENIVIEMARENQTTQKGQKNSRERMKRIEEGIKELGSQILKEHPVENTQLQNEKLYLYYLQNGRDMYVDQELDINRLSDYDVDHIVPQSFLKDDSIDNKVLTRSDKARGKSDNVPSEEVVKKMKNYWRQLLNAKLITQRKFDNLTKAERGGLSELDKAGFIKRQLVETRQITKHVAQILDSRMNTKYDENDKLIREVKVITLKSKLVSDFRKDFQFYKVREINNYHHAHDAYLNAVVGTALIKKYPKLESEFVYGDYKVYDVRKMIAKSEQEIGKATAKYFFYSNIMNFFKTEITLANGEIRKRPLIETNGETGEIVWDKGRDFATVRKVLSMPQVNIVKKTEVQTGGFSKESILPKRNSDKLIARKKDWDPKKYGGFDSPTVAYSVLVVAKVEKGKSKKLKSVKELLGITIMERSSFEKNPIDFLEAKGYKEVKKDLIIKLPKYSLFELENGRKRMLASAGELQKGNELALPSKYVNFLYLASHYEKLKGSPEDNEQKQLFVEQHKHYLDEIIEQISEFSKRVILADANLDKVLSAYNKHRDKPIREQAENIIHLFTLTNLGAPAAFKYFDTTIDRKRYTSTKEVLDATLIHQSITGLYETRIDLSQLGGDGGGSSEAAAKGGTLNLEDEYRLYETSAEPEVSPGSTWLSDFPQAWAETGGMGLAVRQAPLIIPLKATSTPVSIKQYPMSQEAKLGIKPHIQRLLDQGILVPCQSPWNTPLLPVKKPGTNDYRPVQDLREVNKRVEDIHPTVPNPYNLLSGLPPSHRWYTVLDLKDAFFCLRLHPTSQPLFAFEWRDPGMGISGQLTWTRLPQGFKNSPTLFNEALHRDLADFRIQHPDLILLQYVDDILLAATSELDCQQGTRALLLTLGNLGYRASAKKAQLCQKQVKYLGYLLKEGQRWLTEARKETVMGQPTPKTPRQLREFLGKAGFCRLFIPGFAEMAAPLYPLTKPGTLFNWGPDQQKAYQEIKQALLTAPALGLPDLTKPFELFVDEKQGYAKGVLTQKLGPWRRPVAYLSKKLDPVAAGWPPCLRMVAAIAVLRKDAGKLTMGQPLVILAPHAVEALVKQPPDRWLSNARMTHYQAMLLDTDRVQFGPVVALNPATLLPLPEEGAPHDCLEILAETHGTRPDLTDQPIPDADHTWYTDGSSFLQEGQRKAGAAVTTETEVIWARALPAGTSAQRAELIALTQALKMAEGKRLNVYTDSRYAFATAHIHGEIYRRRGWLTSEGREIKNKSEILALLKALFLPKRLSIIHCLGHQKGDSAEARGNRLADQAAREAAIKTPPDTSTLLAGKRTADGSEFEKRTADGSEFESPKKKAKVE

SEQ ID NO: 1892 - protein, 2094 aa, synthetic construct
  source 1..2094: note = Description of Artificial Sequence: Synthetic polypeptide
MPAAKRVKLDGGDKKYSIGLDIGTNSVGWAVITDEYKVPSKKFKVLGNTDRHSIKKNLIGALLFDSGETAEATRLKRTARRRYTRRKNRICYLQEIFSNEMAKVDDSFFHRLEESFLVEEDKKHERHPIFGNIVDEVAYHEKYPTIYHLRKKLVDSTDKADLRLIYLALAHMIKFRGHFLIEGDLNPDNSDVDKLFIQLVQTYNQLFEENPINASGVDAKAILSARLSKSRRLENLIAQLPGEKKNGLFGNLIALSLGLTPNFKSNFDLAEDAKLQLSKDTYDDDLDNLLAQIGDQYADLFLAAKNLSDAILLSDILRVNTEITKAPLSASMIKRYDEHHQDLTLLKALVRQQLPEKYKEIFFDQSKNGYAGYIDGGASQEEFYKFIKPILEKMDGTEELLVKLNREDLLRKQRTFDNGSIPHQIHLGELHAILRRQEDFYPFLKDNREKIEKILTFRIPYYVGPLARGNSRFAWMTRKSEETITPWNFEEVVDKGASAQSFIERMTNFDKNLPNEKVLPKHSLLYEYFTVYNELTKVKYVTEGMRKPAFLSGEQKKAIVDLLFKTNRKVTVKQLKEDYFKKIECFDSVEISGVEDRFNASLGTYHDLLKIIKDKDFLDNEENEDILEDIVLTLTLFEDREMIEERLKTYAHLFDDKVMKQLKRRRYTGWGRLSRKLINGIRDKQSGKTILDFLKSDGFANRNFMQLIHDDSLTFKEDIQKAQVSGQGDSLHEHIANLAGSPAIKKGILQTVKVVDELVKVMGRHKPENIVIEMARENQTTQKGQKNSRERMKRIEEGIKELGSQILKEHPVENTQLQNEKLYLYYLQNGRDMYVDQELDINRLSDYDVDHIVPQSFLKDDSIDNKVLTRSDKARGKSDNVPSEEVVKKMKNYWRQLLNAKLITQRKFDNLTKAERGGLSELDKAGFIKRQLVETRQITKHVAQILDSRMNTKYDENDKLIREVKVITLKSKLVSDFRKDFQFYKVREINNYHHAHDAYLNAVVGTALIKKYPKLESEFVYGDYKVYDVRKMIAKSEQEIGKATAKYFFYSNIMNFFKTEITLANGEIRKRPLIETNGETGEIVWDKGRDFATVRKVLSMPQVNIVKKTEVQTGGFSKESILPKRNSDKLIARKKDWDPKKYGGFDSPTVAYSVLVVAKVEKGKSKKLKSVKELLGITIMERSSFEKNPIDFLEAKGYKEVKKDLIIKLPKYSLFELENGRKRMLASAGELQKGNELALPSKYVNFLYLASHYEKLKGSPEDNEQKQLFVEQHKHYLDEIIEQISEFSKRVILADANLDKVLSAYNKHRDKPIREQAENIIHLFTLTNLGAPAAFKYFDTTIDRKRYTSTKEVLDATLIHQSITGLYETRIDLSQLGGDGGGGGPAPGGSGGTLNLEDEYRLYETSAEPEVSPGSTWLSDFPQAWAETGGMGLAVRQAPLIIPLKATSTPVSIKQYPMSQEAKLGIKPHIQRLLDQGILVPCQSPWNTPLLPVKKPGTNDYRPVQDLREVNKRVEDIHPTVPNPYNLLSGLPPSHRWYTVLDLKDAFFCLRLHPTSQPLFAFEWRDPGMGISGQLTWTRLPQGFKNSPTLFNEALHRDLADFRIQHPDLILLQYVDDILLAATSELDCQQGTRALLLTLGNLGYRASAKKAQLCQKQVKYLGYLLKEGQRWLTEARKETVMGQPTPKTPRQLREFLGKAGFCRLFIPGFAEMAAPLYPLTKPGTLFNWGPDQQKAYQEIKQALLTAPALGLPDLTKPFELFVDEKQGYAKGVLTQKLGPWRRPVAYLSKKLDPVAAGWPPCLRMVAAIAVLRKDAGKLTMGQPLVILAPHAVEALVKQPPDRWLSNARMTHYQAMLLDTDRVQFGPVVALNPATLLPLPEEGAPHDCLEILAETHGTRPDLTDQPIPDADHTWYTDGSSFLQEGQRKAGAAVTTETEVIWARALPAGTSAQRAELIALTQALKMAEGKRLNVYTDSRYAFATAHIHGEIYRRRGWLTSEGREIKNKSEILALLKALFLPKRLSIIHCLGHQKGDSAEARGNRLADQAAREAAIKTPPDTSTLLAGKRTADGSEFEKRTADGSEFESPKKKAKVE

SEQ ID NO: 1893 - protein, 2094 aa, synthetic construct
  source 1..2094: note = Description of Artificial Sequence: Synthetic polypeptide
MPAAKRVKLDGGDKKYSIGLDIGTNSVGWAVITDEYKVPSKKFKVLGNTDRHSIKKNLIGALLFDSGETAEATRLKRTARRRYTRRKNRICYLQEIFSNEMAKVDDSFFHRLEESFLVEEDKKHERHPIFGNIVDEVAYHEKYPTIYHLRKKLVDSTDKADLRLIYLALAHMIKFRGHFLIEGDLNPDNSDVDKLFIQLVQTYNQLFEENPINASGVDAKAILSARLSKSRRLENLIAQLPGEKKNGLFGNLIALSLGLTPNFKSNFDLAEDAKLQLSKDTYDDDLDNLLAQIGDQYADLFLAAKNLSDAILLSDILRVNTEITKAPLSASMIKRYDEHHQDLTLLKALVRQQLPEKYKEIFFDQSKNGYAGYIDGGASQEEFYKFIKPILEKMDGTEELLVKLNREDLLRKQRTFDNGSIPHQIHLGELHAILRRQEDFYPFLKDNREKIEKILTFRIPYYVGPLARGNSRFAWMTRKSEETITPWNFEEVVDKGASAQSFIERMTNFDKNLPNEKVLPKHSLLYEYFTVYNELTKVKYVTEGMRKPAFLSGEQKKAIVDLLFKTNRKVTVKQLKEDYFKKIECFDSVEISGVEDRFNASLGTYHDLLKIIKDKDFLDNEENEDILEDIVLTLTLFEDREMIEERLKTYAHLFDDKVMKQLKRRRYTGWGRLSRKLINGIRDKQSGKTILDFLKSDGFANRNFMQLIHDDSLTFKEDIQKAQVSGQGDSLHEHIANLAGSPAIKKGILQTVKVVDELVKVMGRHKPENIVIEMARENQTTQKGQKNSRERMKRIEEGIKELGSQILKEHPVENTQLQNEKLYLYYLQNGRDMYVDQELDINRLSDYDVDHIVPQSFLKDDSIDNKVLTRSDKARGKSDNVPSEEVVKKMKNYWRQLLNAKLITQRKFDNLTKAERGGLSELDKAGFIKRQLVETRQITKHVAQILDSRMNTKYDENDKLIREVKVITLKSKLVSDFRKDFQFYKVREINNYHHAHDAYLNAVVGTALIKKYPKLESEFVYGDYKVYDVRKMIAKSEQEIGKATAKYFFYSNIMNFFKTEITLANGEIRKRPLIETNGETGEIVWDKGRDFATVRKVLSMPQVNIVKKTEVQTGGFSKESILPKRNSDKLIARKKDWDPKKYGGFDSPTVAYSVLVVAKVEKGKSKKLKSVKELLGITIMERSSFEKNPIDFLEAKGYKEVKKDLIIKLPKYSLFELENGRKRMLASAGELQKGNELALPSKYVNFLYLASHYEKLKGSPEDNEQKQLFVEQHKHYLDEIIEQISEFSKRVILADANLDKVLSAYNKHRDKPIREQAENIIHLFTLTNLGAPAAFKYFDTTIDRKRYTSTKEVLDATLIHQSITGLYETRIDLSQLGGDGGPAPGGGGSSGGTLNLEDEYRLYETSAEPEVSPGSTWLSDFPQAWAETGGMGLAVRQAPLIIPLKATSTPVSIKQYPMSQEAKLGIKPHIQRLLDQGILVPCQSPWNTPLLPVKKPGTNDYRPVQDLREVNKRVEDIHPTVPNPYNLLSGLPPSHRWYTVLDLKDAFFCLRLHPTSQPLFAFEWRDPGMGISGQLTWTRLPQGFKNSPTLFNEALHRDLADFRIQHPDLILLQYVDDILLAATSELDCQQGTRALLLTLGNLGYRASAKKAQLCQKQVKYLGYLLKEGQRWLTEARKETVMGQPTPKTPRQLREFLGKAGFCRLFIPGFAEMAAPLYPLTKPGTLFNWGPDQQKAYQEIKQALLTAPALGLPDLTKPFELFVDEKQGYAKGVLTQKLGPWRRPVAYLSKKLDPVAAGWPPCLRMVAAIAVLRKDAGKLTMGQPLVILAPHAVEALVKQPPDRWLSNARMTHYQAMLLDTDRVQFGPVVALNPATLLPLPEEGAPHDCLEILAETHGTRPDLTDQPIPDADHTWYTDGSSFLQEGQRKAGAAVTTETEVIWARALPAGTSAQRAELIALTQALKMAEGKRLNVYTDSRYAFATAHIHGEIYRRRGWLTSEGREIKNKSEILALLKALFLPKRLSIIHCLGHQKGDSAEARGNRLADQAAREAAIKTPPDTSTLLAGKRTADGSEFEKRTADGSEFESPKKKAKVE

SEQ ID NO: 1894 - protein, 2094 aa, synthetic construct
  source 1..2094: note = Description of Artificial Sequence: Synthetic polypeptide
MPAAKRVKLDGGDKKYSIGLDIGTNSVGWAVITDEYKVPSKKFKVLGNTDRHSIKKNLIGALLFDSGETAEATRLKRTARRRYTRRKNRICYLQEIFSNEMAKVDDSFFHRLEESFLVEEDKKHERHPIFGNIVDEVAYHEKYPTIYHLRKKLVDSTDKADLRLIYLALAHMIKFRGHFLIEGDLNPDNSDVDKLFIQLVQTYNQLFEENPINASGVDAKAILSARLSKSRRLENLIAQLPGEKKNGLFGNLIALSLGLTPNFKSNFDLAEDAKLQLSKDTYDDDLDNLLAQIGDQYADLFLAAKNLSDAILLSDILRVNTEITKAPLSASMIKRYDEHHQDLTLLKALVRQQLPEKYKEIFFDQSKNGYAGYIDGGASQEEFYKFIKPILEKMDGTEELLVKLNREDLLRKQRTFDNGSIPHQIHLGELHAILRRQEDFYPFLKDNREKIEKILTFRIPYYVGPLARGNSRFAWMTRKSEETITPWNFEEVVDKGASAQSFIERMTNFDKNLPNEKVLPKHSLLYEYFTVYNELTKVKYVTEGMRKPAFLSGEQKKAIVDLLFKTNRKVTVKQLKEDYFKKIECFDSVEISGVEDRFNASLGTYHDLLKIIKDKDFLDNEENEDILEDIVLTLTLFEDREMIEERLKTYAHLFDDKVMKQLKRRRYTGWGRLSRKLINGIRDKQSGKTILDFLKSDGFANRNFMQLIHDDSLTFKEDIQKAQVSGQGDSLHEHIANLAGSPAIKKGILQTVKVVDELVKVMGRHKPENIVIEMARENQTTQKGQKNSRERMKRIEEGIKELGSQILKEHPVENTQLQNEKLYLYYLQNGRDMYVDQELDINRLSDYDVDHIVPQSFLKDDSIDNKVLTRSDKARGKSDNVPSEEVVKKMKNYWRQLLNAKLITQRKFDNLTKAERGGLSELDKAGFIKRQLVETRQITKHVAQILDSRMNTKYDENDKLIREVKVITLKSKLVSDFRKDFQFYKVREINNYHHAHDAYLNAVVGTALIKKYPKLESEFVYGDYKVYDVRKMIAKSEQEIGKATAKYFFYSNIMNFFKTEITLANGEIRKRPLIETNGETGEIVWDKGRDFATVRKVLSMPQVNIVKKTEVQTGGFSKESILPKRNSDKLIARKKDWDPKKYGGFDSPTVAYSVLVVAKVEKGKSKKLKSVKELLGITIMERSSFEKNPIDFLEAKGYKEVKKDLIIKLPKYSLFELENGRKRMLASAGELQKGNELALPSKYVNFLYLASHYEKLKGSPEDNEQKQLFVEQHKHYLDEIIEQISEFSKRVILADANLDKVLSAYNKHRDKPIREQAENIIHLFTLTNLGAPAAFKYFDTTIDRKRYTSTKEVLDATLIHQSITGLYETRIDLSQLGGDGGGGGGGSGSSGGTLNLEDEYRLYETSAEPEVSPGSTWLSDFPQAWAETGGMGLAVRQAPLIIPLKATSTPVSIKQYPMSQEAKLGIKPHIQRLLDQGILVPCQSPWNTPLLPVKKPGTNDYRPVQDLREVNKRVEDIHPTVPNPYNLLSGLPPSHRWYTVLDLKDAFFCLRLHPTSQPLFAFEWRDPGMGISGQLTWTRLPQGFKNSPTLFNEALHRDLADFRIQHPDLILLQYVDDILLAATSELDCQQGTRALLLTLGNLGYRASAKKAQLCQKQVKYLGYLLKEGQRWLTEARKETVMGQPTPKTPRQLREFLGKAGFCRLFIPGFAEMAAPLYPLTKPGTLFNWGPDQQKAYQEIKQALLTAPALGLPDLTKPFELFVDEKQGYAKGVLTQKLGPWRRPVAYLSKKLDPVAAGWPPCLRMVAAIAVLRKDAGKLTMGQPLVILAPHAVEALVKQPPDRWLSNARMTHYQAMLLDTDRVQFGPVVALNPATLLPLPEEGAPHDCLEILAETHGTRPDLTDQPIPDADHTWYTDGSSFLQEGQRKAGAAVTTETEVIWARALPAGTSAQRAELIALTQALKMAEGKRLNVYTDSRYAFATAHIHGEIYRRRGWLTSEGREIKNKSEILALLKALFLPKRLSIIHCLGHQKGDSAEARGNRLADQAAREAAIKTPPDTSTLLAGKRTADGSEFEKRTADGSEFESPKKKAKVE

SEQ ID NO: 1895 - protein, 2091 aa, synthetic construct
  source 1..2091: note = Description of Artificial Sequence: Synthetic polypeptide
MPAAKRVKLDGGDKKYSIGLDIGTNSVGWAVITDEYKVPSKKFKVLGNTDRHSIKKNLIGALLFDSGETAEATRLKRTARRRYTRRKNRICYLQEIFSNEMAKVDDSFFHRLEESFLVEEDKKHERHPIFGNIVDEVAYHEKYPTIYHLRKKLVDSTDKADLRLIYLALAHMIKFRGHFLIEGDLNPDNSDVDKLFIQLVQTYNQLFEENPINASGVDAKAILSARLSKSRRLENLIAQLPGEKKNGLFGNLIALSLGLTPNFKSNFDLAEDAKLQLSKDTYDDDLDNLLAQIGDQYADLFLAAKNLSDAILLSDILRVNTEITKAPLSASMIKRYDEHHQDLTLLKALVRQQLPEKYKEIFFDQSKNGYAGYIDGGASQEEFYKFIKPILEKMDGTEELLVKLNREDLLRKQRTFDNGSIPHQIHLGELHAILRRQEDFYPFLKDNREKIEKILTFRIPYYVGPLARGNSRFAWMTRKSEETITPWNFEEVVDKGASAQSFIERMTNFDKNLPNEKVLPKHSLLYEYFTVYNELTKVKYVTEGMRKPAFLSGEQKKAIVDLLFKTNRKVTVKQLKEDYFKKIECFDSVEISGVEDRFNASLGTYHDLLKIIKDKDFLDNEENEDILEDIVLTLTLFEDREMIEERLKTYAHLFDDKVMKQLKRRRYTGWGRLSRKLINGIRDKQSGKTILDFLKSDGFANRNFMQLIHDDSLTFKEDIQKAQVSGQGDSLHEHIANLAGSPAIKKGILQTVKVVDELVKVMGRHKPENIVIEMARENQTTQKGQKNSRERMKRIEEGIKELGSQILKEHPVENTQLQNEKLYLYYLQNGRDMYVDQELDINRLSDYDVDHIVPQSFLKDDSIDNKVLTRSDKARGKSDNVPSEEVVKKMKNYWRQLLNAKLITQRKFDNLTKAERGGLSELDKAGFIKRQLVETRQITKHVAQILDSRMNTKYDENDKLIREVKVITLKSKLVSDFRKDFQFYKVREINNYHHAHDAYLNAVVGTALIKKYPKLESEFVYGDYKVYDVRKMIAKSEQEIGKATAKYFFYSNIMNFFKTEITLANGEIRKRPLIETNGETGEIVWDKGRDFATVRKVLSMPQVNIVKKTEVQTGGFSKESILPKRNSDKLIARKKDWDPKKYGGFDSPTVAYSVLVVAKVEKGKSKKLKSVKELLGITIMERSSFEKNPIDFLEAKGYKEVKKDLIIKLPKYSLFELENGRKRMLASAGELQKGNELALPSKYVNFLYLASHYEKLKGSPEDNEQKQLFVEQHKHYLDEIIEQISEFSKRVILADANLDKVLSAYNKHRDKPIREQAENIIHLFTLTNLGAPAAFKYFDTTIDRKRYTSTKEVLDATLIHQSITGLYETRIDLSQLGGDGGPAPGGGGGTLNLEDEYRLYETSAEPEVSPGSTWLSDFPQAWAETGGMGLAVRQAPLIIPLKATSTPVSIKQYPMSQEAKLGIKPHIQRLLDQGILVPCQSPWNTPLLPVKKPGTNDYRPVQDLREVNKRVEDIHPTVPNPYNLLSGLPPSHRWYTVLDLKDAFFCLRLHPTSQPLFAFEWRDPGMGISGQLTWTRLPQGFKNSPTLFNEALHRDLADFRIQHPDLILLQYVDDILLAATSELDCQQGTRALLLTLGNLGYRASAKKAQLCQKQVKYLGYLLKEGQRWLTEARKETVMGQPTPKTPRQLREFLGKAGFCRLFIPGFAEMAAPLYPLTKPGTLFNWGPDQQKAYQEIKQALLTAPALGLPDLTKPFELFVDEKQGYAKGVLTQKLGPWRRPVAYLSKKLDPVAAGWPPCLRMVAAIAVLRKDAGKLTMGQPLVILAPHAVEALVKQPPDRWLSNARMTHYQAMLLDTDRVQFGPVVALNPATLLPLPEEGAPHDCLEILAETHGTRPDLTDQPIPDADHTWYTDGSSFLQEGQRKAGAAVTTETEVIWARALPAGTSAQRAELIALTQALKMAEGKRLNVYTDSRYAFATAHIHGEIYRRRGWLTSEGREIKNKSEILALLKALFLPKRLSIIHCLGHQKGDSAEARGNRLADQAAREAAIKTPPDTSTLLAGKRTADGSEFEKRTADGSEFESPKKKAKVE

SEQ ID NO: 1896 - protein, 2115 aa, synthetic construct
  source 1..2115: note = Description of Artificial Sequence: Synthetic polypeptide
MPAAKRVKLDGGDKKYSIGLDIGTNSVGWAVITDEYKVPSKKFKVLGNTDRHSIKKNLIGALLFDSGETAEATRLKRTARRRYTRRKNRICYLQEIFSNEMAKVDDSFFHRLEESFLVEEDKKHERHPIFGNIVDEVAYHEKYPTIYHLRKKLVDSTDKADLRLIYLALAHMIKFRGHFLIEGDLNPDNSDVDKLFIQLVQTYNQLFEENPINASGVDAKAILSARLSKSRRLENLIAQLPGEKKNGLFGNLIALSLGLTPNFKSNFDLAEDAKLQLSKDTYDDDLDNLLAQIGDQYADLFLAAKNLSDAILLSDILRVNTEITKAPLSASMIKRYDEHHQDLTLLKALVRQQLPEKYKEIFFDQSKNGYAGYIDGGASQEEFYKFIKPILEKMDGTEELLVKLNREDLLRKQRTFDNGSIPHQIHLGELHAILRRQEDFYPFLKDNREKIEKILTFRIPYYVGPLARGNSRFAWMTRKSEETITPWNFEEVVDKGASAQSFIERMTNFDKNLPNEKVLPKHSLLYEYFTVYNELTKVKYVTEGMRKPAFLSGEQKKAIVDLLFKTNRKVTVKQLKEDYFKKIECFDSVEISGVEDRFNASLGTYHDLLKIIKDKDFLDNEENEDILEDIVLTLTLFEDREMIEERLKTYAHLFDDKVMKQLKRRRYTGWGRLSRKLINGIRDKQSGKTILDFLKSDGFANRNFMQLIHDDSLTFKEDIQKAQVSGQGDSLHEHIANLAGSPAIKKGILQTVKVVDELVKVMGRHKPENIVIEMARENQTTQKGQKNSRERMKRIEEGIKELGSQILKEHPVENTQLQNEKLYLYYLQNGRDMYVDQELDINRLSDYDVDHIVPQSFLKDDSIDNKVLTRSDKARGKSDNVPSEEVVKKMKNYWRQLLNAKLITQRKFDNLTKAERGGLSELDKAGFIKRQLVETRQITKHVAQILDSRMNTKYDENDKLIREVKVITLKSKLVSDFRKDFQFYKVREINNYHHAHDAYLNAVVGTALIKKYPKLESEFVYGDYKVYDVRKMIAKSEQEIGKATAKYFFYSNIMNFFKTEITLANGEIRKRPLIETNGETGEIVWDKGRDFATVRKVLSMPQVNIVKKTEVQTGGFSKESILPKRNSDKLIARKKDWDPKKYGGFDSPTVAYSVLVVAKVEKGKSKKLKSVKELLGITIMERSSFEKNPIDFLEAKGYKEVKKDLIIKLPKYSLFELENGRKRMLASAGELQKGNELALPSKYVNFLYLASHYEKLKGSPEDNEQKQLFVEQHKHYLDEIIEQISEFSKRVILADANLDKVLSAYNKHRDKPIREQAENIIHLFTLTNLGAPAAFKYFDTTIDRKRYTSTKEVLDATLIHQSITGLYETRIDLSQLGGDGGEAAAKEAAAKEAAAKEAAAKEAAAKEAAAKGGTLNLEDEYRLYETSAEPEVSPGSTWLSDFPQAWAETGGMGLAVRQAPLIIPLKATSTPVSIKQYPMSQEAKLGIKPHIQRLLDQGILVPCQSPWNTPLLPVKKPGTNDYRPVQDLREVNKRVEDIHPTVPNPYNLLSGLPPSHRWYTVLDLKDAFFCLRLHPTSQPLFAFEWRDPGMGISGQLTWTRLPQGFKNSPTLFNEALHRDLADFRIQHPDLILLQYVDDILLAATSELDCQQGTRALLLTLGNLGYRASAKKAQLCQKQVKYLGYLLKEGQRWLTEARKETVMGQPTPKTPRQLREFLGKAGFCRLFIPGFAEMAAPLYPLTKPGTLFNWGPDQQKAYQEIKQALLTAPALGLPDLTKPFELFVDEKQGYAKGVLTQKLGPWRRPVAYLSKKLDPVAAGWPPCLRMVAAIAVLRKDAGKLTMGQPLVILAPHAVEALVKQPPDRWLSNARMTHYQAMLLDTDRVQFGPVVALNPATLLPLPEEGAPHDCLEILAETHGTRPDLTDQPIPDADHTWYTDGSSFLQEGQRKAGAAVTTETEVIWARALPAGTSAQRAELIALTQALKMAEGKRLNVYTDSRYAFATAHIHGEIYRRRGWLTSEGREIKNKSEILALLKALFLPKRLSIIHCLGHQKGDSAEARGNRLADQAAREAAIKTPPDTSTLLAGKRTADGSEFEKRTADGSEFESPKKKAKVE

SEQ ID NO: 1897 - protein, 2091 aa, synthetic construct
  source 1..2091: note = Description of Artificial Sequence: Synthetic polypeptide
MPAAKRVKLDGGDKKYSIGLDIGTNSVGWAVITDEYKVPSKKFKVLGNTDRHSIKKNLIGALLFDSGETAEATRLKRTARRRYTRRKNRICYLQEIFSNEMAKVDDSFFHRLEESFLVEEDKKHERHPIFGNIVDEVAYHEKYPTIYHLRKKLVDSTDKADLRLIYLALAHMIKFRGHFLIEGDLNPDNSDVDKLFIQLVQTYNQLFEENPINASGVDAKAILSARLSKSRRLENLIAQLPGEKKNGLFGNLIALSLGLTPNFKSNFDLAEDAKLQLSKDTYDDDLDNLLAQIGDQYADLFLAAKNLSDAILLSDILRVNTEITKAPLSASMIKRYDEHHQDLTLLKALVRQQLPEKYKEIFFDQSKNGYAGYIDGGASQEEFYKFIKPILEKMDGTEELLVKLNREDLLRKQRTFDNGSIPHQIHLGELHAILRRQEDFYPFLKDNREKIEKILTFRIPYYVGPLARGNSRFAWMTRKSEETITPWNFEEVVDKGASAQSFIERMTNFDKNLPNEKVLPKHSLLYEYFTVYNELTKVKYVTEGMRKPAFLSGEQKKAIVDLLFKTNRKVTVKQLKEDYFKKIECFDSVEISGVEDRFNASLGTYHDLLKIIKDKDFLDNEENEDILEDIVLTLTLFEDREMIEERLKTYAHLFDDKVMKQLKRRRYTGWGRLSRKLINGIRDKQSGKTILDFLKSDGFANRNFMQLIHDDSLTFKEDIQKAQVSGQGDSLHEHIANLAGSPAIKKGILQTVKVVDELVKVMGRHKPENIVIEMARENQTTQKGQKNSRERMKRIEEGIKELGSQILKEHPVENTQLQNEKLYLYYLQNGRDMYVDQELDINRLSDYDVDHIVPQSFLKDDSIDNKVLTRSDKARGKSDNVPSEEVVKKMKNYWRQLLNAKLITQRKFDNLTKAERGGLSELDKAGFIKRQLVETRQITKHVAQILDSRMNTKYDENDKLIREVKVITLKSKLVSDFRKDFQFYKVREINNYHHAHDAYLNAVVGTALIKKYPKLESEFVYGDYKVYDVRKMIAKSEQEIGKATAKYFFYSNIMNFFKTEITLANGEIRKRPLIETNGETGEIVWDKGRDFATVRKVLSMPQVNIVKKTEVQTGGFSKESILPKRNSDKLIARKKDWDPKKYGGFDSPTVAYSVLVVAKVEKGKSKKLKSVKELLGITIMERSSFEKNPIDFLEAKGYKEVKKDLIIKLPKYSLFELENGRKRMLASAGELQKGNELALPSKYVNFLYLASHYEKLKGSPEDNEQKQLFVEQHKHYLDEIIEQISEFSKRVILADANLDKVLSAYNKHRDKPIREQAENIIHLFTLTNLGAPAAFKYFDTTIDRKRYTSTKEVLDATLIHQSITGLYETRIDLSQLGGDGGGGSGGSGGTLNLEDEYRLYETSAEPEVSPGSTWLSDFPQAWAETGGMGLAVRQAPLIIPLKATSTPVSIKQYPMSQEAKLGIKPHIQRLLDQGILVPCQSPWNTPLLPVKKPGTNDYRPVQDLREVNKRVEDIHPTVPNPYNLLSGLPPSHRWYTVLDLKDAFFCLRLHPTSQPLFAFEWRDPGMGISGQLTWTRLPQGFKNSPTLFNEALHRDLADFRIQHPDLILLQYVDDILLAATSELDCQQGTRALLLTLGNLGYRASAKKAQLCQKQVKYLGYLLKEGQRWLTEARKETVMGQPTPKTPRQLREFLGKAGFCRLFIPGFAEMAAPLYPLTKPGTLFNWGPDQQKAYQEIKQALLTAPALGLPDLTKPFELFVDEKQGYAKGVLTQKLGPWRRPVAYLSKKLDPVAAGWPPCLRMVAAIAVLRKDAGKLTMGQPLVILAPHAVEALVKQPPDRWLSNARMTHYQAMLLDTDRVQFGPVVALNPATLLPLPEEGAPHDCLEILAETHGTRPDLTDQPIPDADHTWYTDGSSFLQEGQRKAGAAVTTETEVIWARALPAGTSAQRAELIALTQALKMAEGKRLNVYTDSRYAFATAHIHGEIYRRRGWLTSEGREIKNKSEILALLKALFLPKRLSIIHCLGHQKGDSAEARGNRLADQAAREAAIKTPPDTSTLLAGKRTADGSEFEKRTADGSEFESPKKKAKVE

SEQ ID NO: 1898 - protein, 2093 aa, synthetic construct
  source 1..2093: note = Description of Artificial Sequence: Synthetic polypeptide
MPAAKRVKLDGGDKKYSIGLDIGTNSVGWAVITDEYKVPSKKFKVLGNTDRHSIKKNLIGALLFDSGETAEATRLKRTARRRYTRRKNRICYLQEIFSNEMAKVDDSFFHRLEESFLVEEDKKHERHPIFGNIVDEVAYHEKYPTIYHLRKKLVDSTDKADLRLIYLALAHMIKFRGHFLIEGDLNPDNSDVDKLFIQLVQTYNQLFEENPINASGVDAKAILSARLSKSRRLENLIAQLPGEKKNGLFGNLIALSLGLTPNFKSNFDLAEDAKLQLSKDTYDDDLDNLLAQIGDQYADLFLAAKNLSDAILLSDILRVNTEITKAPLSASMIKRYDEHHQDLTLLKALVRQQLPEKYKEIFFDQSKNGYAGYIDGGASQEEFYKFIKPILEKMDGTEELLVKLNREDLLRKQRTFDNGSIPHQIHLGELHAILRRQEDFYPFLKDNREKIEKILTFRIPYYVGPLARGNSRFAWMTRKSEETITPWNFEEVVDKGASAQSFIERMTNFDKNLPNEKVLPKHSLLYEYFTVYNELTKVKYVTEGMRKPAFLSGEQKKAIVDLLFKTNRKVTVKQLKEDYFKKIECFDSVEISGVEDRFNASLGTYHDLLKIIKDKDFLDNEENEDILEDIVLTLTLFEDREMIEERLKTYAHLFDDKVMKQLKRRRYTGWGRLSRKLINGIRDKQSGKTILDFLKSDGFANRNFMQLIHDDSLTFKEDIQKAQVSGQGDSLHEHIANLAGSPAIKKGILQTVKVVDELVKVMGRHKPENIVIEMARENQTTQKGQKNSRERMKRIEEGIKELGSQILKEHPVENTQLQNEKLYLYYLQNGRDMYVDQELDINRLSDYDVDHIVPQSFLKDDSIDNKVLTRSDKARGKSDNVPSEEVVKKMKNYWRQLLNAKLITQRKFDNLTKAERGGLSELDKAGFIKRQLVETRQITKHVAQILDSRMNTKYDENDKLIREVKVITLKSKLVSDFRKDFQFYKVREINNYHHAHDAYLNAVVGTALIKKYPKLESEFVYGDYKVYDVRKMIAKSEQEIGKATAKYFFYSNIMNFFKTEITLANGEIRKRPLIETNGETGEIVWDKGRDFATVRKVLSMPQVNIVKKTEVQTGGFSKESILPKRNSDKLIARKKDWDPKKYGGFDSPTVAYSVLVVAKVEKGKSKKLKSVKELLGITIMERSSFEKNPIDFLEAKGYKEVKKDLIIKLPKYSLFELENGRKRMLASAGELQKGNELALPSKYVNFLYLASHYEKLKGSPEDNEQKQLFVEQHKHYLDEIIEQISEFSKRVILADANLDKVLSAYNKHRDKPIREQAENIIHLFTLTNLGAPAAFKYFDTTIDRKRYTSTKEVLDATLIHQSITGLYETRIDLSQLGGDGGEAAAKGSSGGTLNLEDEYRLYETSAEPEVSPGSTWLSDFPQAWAETGGMGLAVRQAPLIIPLKATSTPVSIKQYPMSQEAKLGIKPHIQRLLDQGILVPCQSPWNTPLLPVKKPGTNDYRPVQDLREVNKRVEDIHPTVPNPYNLLSGLPPSHRWYTVLDLKDAFFCLRLHPTSQPLFAFEWRDPGMGISGQLTWTRLPQGFKNSPTLFNEALHRDLADFRIQHPDLILLQYVDDILLAATSELDCQQGTRALLLTLGNLGYRASAKKAQLCQKQVKYLGYLLKEGQRWLTEARKETVMGQPTPKTPRQLREFLGKAGFCRLFIPGFAEMAAPLYPLTKPGTLFNWGPDQQKAYQEIKQALLTAPALGLPDLTKPFELFVDEKQGYAKGVLTQKLGPWRRPVAYLSKKLDPVAAGWPPCLRMVAAIAVLRKDAGKLTMGQPLVILAPHAVEALVKQPPDRWLSNARMTHYQAMLLDTDRVQFGPVVALNPATLLPLPEEGAPHDCLEILAETHGTRPDLTDQPIPDADHTWYTDGSSFLQEGQRKAGAAVTTETEVIWARALPAGTSAQRAELIALTQALKMAEGKRLNVYTDSRYAFATAHIHGEIYRRRGWLTSEGREIKNKSEILALLKALFLPKRLSIIHCLGHQKGDSAEARGNRLADQAAREAAIKTPPDTSTLLAGKRTADGSEFEKRTADGSEFESPKKKAKVE

SEQ ID NO: 1899 - protein, 2094 aa, synthetic construct
  source 1..2094: note = Description of Artificial Sequence: Synthetic polypeptide
MPAAKRVKLDGGDKKYSIGLDIGTNSVGWAVITDEYKVPSKKFKVLGNTDRHSIKKNLIGALLFDSGETAEATRLKRTARRRYTRRKNRICYLQEIFSNEMAKVDDSFFHRLEESFLVEEDKKHERHPIFGNIVDEVAYHEKYPTIYHLRKKLVDSTDKADLRLIYLALAHMIKFRGHFLIEGDLNPDNSDVDKLFIQLVQTYNQLFEENPINASGVDAKAILSARLSKSRRLENLIAQLPGEKKNGLFGNLIALSLGLTPNFKSNFDLAEDAKLQLSKDTYDDDLDNLLAQIGDQYADLFLAAKNLSDAILLSDILRVNTEITKAPLSASMIKRYDEHHQDLTLLKALVRQQLPEKYKEIFFDQSKNGYAGYIDGGASQEEFYKFIKPILEKMDGTEELLVKLNREDLLRKQRTFDNGSIPHQIHLGELHAILRRQEDFYPFLKDNREKIEKILTFRIPYYVGPLARGNSRFAWMTRKSEETITPWNFEEVVDKGASAQSFIERMTNFDKNLPNEKVLPKHSLLYEYFTVYNELTKVKYVTEGMRKPAFLSGEQKKAIVDLLFKTNRKVTVKQLKEDYFKKIECFDSVEISGVEDRFNASLGTYHDLLKIIKDKDFLDNEENEDILEDIVLTLTLFEDREMIEERLKTYAHLFDDKVMKQLKRRRYTGWGRLSRKLINGIRDKQSGKTILDFLKSDGFANRNFMQLIHDDSLTFKEDIQKAQVSGQGDSLHEHIANLAGSPAIKKGILQTVKVVDELVKVMGRHKPENIVIEMARENQTTQKGQKNSRERMKRIEEGIKELGSQILKEHPVENTQLQNEKLYLYYLQNGRDMYVDQELDINRLSDYDVDHIVPQSFLKDDSIDNKVLTRSDKARGKSDNVPSEEVVKKMKNYWRQLLNAKLITQRKFDNLTKAERGGLSELDKAGFIKRQLVETRQITKHVAQILDSRMNTKYDENDKLIREVKVITLKSKLVSDFRKDFQFYKVREINNYHHAHDAYLNAVVGTALIKKYPKLESEFVYGDYKVYDVRKMIAKSEQEIGKATAKYFFYSNIMNFFKTEITLANGEIRKRPLIETNGETGEIVWDKGRDFATVRKVLSMPQVNIVKKTEVQTGGFSKESILPKRNSDKLIARKKDWDPKKYGGFDSPTVAYSVLVVAKVEKGKSKKLKSVKELLGITIMERSSFEKNPIDFLEAKGYKEVKKDLIIKLPKYSLFELENGRKRMLASAGELQKGNELALPSKYVNFLYLASHYEKLKGSPEDNEQKQLFVEQHKHYLDEIIEQISEFSKRVILADANLDKVLSAYNKHRDKPIREQAENIIHLFTLTNLGAPAAFKYFDTTIDRKRYTSTKEVLDATLIHQSITGLYETRIDLSQLGGDGGGGSPAPGGGGGTLNLEDEYRLYETSAEPEVSPGSTWLSDFPQAWAETGGMGLAVRQAPLIIPLKATSTPVSIKQYPMSQEAKLGIKPHIQRLLDQGILVPCQSPWNTPLLPVKKPGTNDYRPVQDLREVNKRVEDIHPTVPNPYNLLSGLPPSHRWYTVLDLKDAFFCLRLHPTSQPLFAFEWRDPGMGISGQLTWTRLPQGFKNSPTLFNEALHRDLADFRIQHPDLILLQYVDDILLAATSELDCQQGTRALLLTLGNLGYRASAKKAQLCQKQVKYLGYLLKEGQRWLTEARKETVMGQPTPKTPRQLREFLGKAGFCRLFIPGFAEMAAPLYPLTKPGTLFNWGPDQQKAYQEIKQALLTAPALGLPDLTKPFELFVDEKQGYAKGVLTQKLGPWRRPVAYLSKKLDPVAAGWPPCLRMVAAIAVLRKDAGKLTMGQPLVILAPHAVEALVKQPPDRWLSNARMTHYQAMLLDTDRVQFGPVVALNPATLLPLPEEGAPHDCLEILAETHGTRPDLTDQPIPDADHTWYTDGSSFLQEGQRKAGAAVTTETEVIWARALPAGTSAQRAELIALTQALKMAEGKRLNVYTDSRYAFATAHIHGEIYRRRGWLTSEGREIKNKSEILALLKALFLPKRLSIIHCLGHQKGDSAEARGNRLADQAAREAAIKTPPDTSTLLAGKRTADGSEFEKRTADGSEFESPKKKAKVE

SEQ ID NO: 1900 - protein, 2091 aa, synthetic construct
  source 1..2091: note = Description of Artificial Sequence: Synthetic polypeptide
MPAAKRVKLDGGDKKYSIGLDIGTNSVGWAVITDEYKVPSKKFKVLGNTDRHSIKKNLIGALLFDSGETAEATRLKRTARRRYTRRKNRICYLQEIFSNEMAKVDDSFFHRLEESFLVEEDKKHERHPIFGNIVDEVAYHEKYPTIYHLRKKLVDSTDKADLRLIYLALAHMIKFRGHFLIEGDLNPDNSDVDKLFIQLVQTYNQLFEENPINASGVDAKAILSARLSKSRRLENLIAQLPGEKKNGLFGNLIALSLGLTPNFKSNFDLAEDAKLQLSKDTYDDDLDNLLAQIGDQYADLFLAAKNLSDAILLSDILRVNTEITKAPLSASMIKRYDEHHQDLTLLKALVRQQLPEKYKEIFFDQSKNGYAGYIDGGASQEEFYKFIKPILEKMDGTEELLVKLNREDLLRKQRTFDNGSIPHQIHLGELHAILRRQEDFYPFLKDNREKIEKILTFRIPYYVGPLARGNSRFAWMTRKSEETITPWNFEEVVDKGASAQSFIERMTNFDKNLPNEKVLPKHSLLYEYFTVYNELTKVKYVTEGMRKPAFLSGEQKKAIVDLLFKTNRKVTVKQLKEDYFKKIECFDSVEISGVEDRFNASLGTYHDLLKIIKDKDFLDNEENEDILEDIVLTLTLFEDREMIEERLKTYAHLFDDKVMKQLKRRRYTGWGRLSRKLINGIRDKQSGKTILDFLKSDGFANRNFMQLIHDDSLTFKEDIQKAQVSGQGDSLHEHIANLAGSPAIKKGILQTVKVVDELVKVMGRHKPENIVIEMARENQTTQKGQKNSRERMKRIEEGIKELGSQILKEHPVENTQLQNEKLYLYYLQNGRDMYVDQELDINRLSDYDVDHIVPQSFLKDDSIDNKVLTRSDKARGKSDNVPSEEVVKKMKNYWRQLLNAKLITQRKFDNLTKAERGGLSELDKAGFIKRQLVETRQITKHVAQILDSRMNTKYDENDKLIREVKVITLKSKLVSDFRKDFQFYKVREINNYHHAHDAYLNAVVGTALIKKYPKLESEFVYGDYKVYDVRKMIAKSEQEIGKATAKYFFYSNIMNFFKTEITLANGEIRKRPLIETNGETGEIVWDKGRDFATVRKVLSMPQVNIVKKTEVQTGGFSKESILPKRNSDKLIARKKDWDPKKYGGFDSPTVAYSVLVVAKVEKGKSKKLKSVKELLGITIMERSSFEKNPIDFLEAKGYKEVKKDLIIKLPKYSLFELENGRKRMLASAGELQKGNELALPSKYVNFLYLASHYEKLKGSPEDNEQKQLFVEQHKHYLDEIIEQISEFSKRVILADANLDKVLSAYNKHRDKPIREQAENIIHLFTLTNLGAPAAFKYFDTTIDRKRYTSTKEVLDATLIHQSITGLYETRIDLSQLGGDGGPAPGSSGGTLNLEDEYRLYETSAEPEVSPGSTWLSDFPQAWAETGGMGLAVRQAPLIIPLKATSTPVSIKQYPMSQEAKLGIKPHIQRLLDQGILVPCQSPWNTPLLPVKKPGTNDYRPVQDLREVNKRVEDIHPTVPNPYNLLSGLPPSHRWYTVLDLKDAFFCLRLHPTSQPLFAFEWRDPGMGISGQLTWTRLPQGFKNSPTLFNEALHRDLADFRIQHPDLILLQYVDDILLAATSELDCQQGTRALLLTLGNLGYRASAKKAQLCQKQVKYLGYLLKEGQRWLTEARKETVMGQPTPKTPRQLREFLGKAGFCRLFIPGFAEMAAPLYPLTKPGTLFNWGPDQQKAYQEIKQALLTAPALGLPDLTKPFELFVDEKQGYAKGVLTQKLGPWRRPVAYLSKKLDPVAAGWPPCLRMVAAIAVLRKDAGKLTMGQPLVILAPHAVEALVKQPPDRWLSNARMTHYQAMLLDTDRVQFGPVVALNPATLLPLPEEGAPHDCLEILAETHGTRPDLTDQPIPDADHTWYTDGSSFLQEGQRKAGAAVTTETEVIWARALPAGTSAQRAELIALTQALKMAEGKRLNVYTDSRYAFATAHIHGEIYRRRGWLTSEGREIKNKSEILALLKALFLPKRLSIIHCLGHQKGDSAEARGNRLADQAAREAAIKTPPDTSTLLAGKRTADGSEFEKRTADGSEFESPKKKAKVE

SEQ ID NO: 1901 - protein, 2096 aa, synthetic construct
  source 1..2096: note = Description of Artificial Sequence: Synthetic polypeptide
MPAAKRVKLDGGDKKYSIGLDIGTNSVGWAVITDEYKVPSKKFKVLGNTDRHSIKKNLIGALLFDSGETAEATRLKRTARRRYTRRKNRICYLQEIFSNEMAKVDDSFFHRLEESFLVEEDKKHERHPIFGNIVDEVAYHEKYPTIYHLRKKLVDSTDKADLRLIYLALAHMIKFRGHFLIEGDLNPDNSDVDKLFIQLVQTYNQLFEENPINASGVDAKAILSARLSKSRRLENLIAQLPGEKKNGLFGNLIALSLGLTPNFKSNFDLAEDAKLQLSKDTYDDDLDNLLAQIGDQYADLFLAAKNLSDAILLSDILRVNTEITKAPLSASMIKRYDEHHQDLTLLKALVRQQLPEKYKEIFFDQSKNGYAGYIDGGASQEEFYKFIKPILEKMDGTEELLVKLNREDLLRKQRTFDNGSIPHQIHLGELHAILRRQEDFYPFLKDNREKIEKILTFRIPYYVGPLARGNSRFAWMTRKSEETITPWNFEEVVDKGASAQSFIERMTNFDKNLPNEKVLPKHSLLYEYFTVYNELTKVKYVTEGMRKPAFLSGEQKKAIVDLLFKTNRKVTVKQLKEDYFKKIECFDSVEISGVEDRFNASLGTYHDLLKIIKDKDFLDNEENEDILEDIVLTLTLFEDREMIEERLKTYAHLFDDKVMKQLKRRRYTGWGRLSRKLINGIRDKQSGKTILDFLKSDGFANRNFMQLIHDDSLTFKEDIQKAQVSGQGDSLHEHIANLAGSPAIKKGILQTVKVVDELVKVMGRHKPENIVIEMARENQTTQKGQKNSRERMKRIEEGIKELGSQILKEHPVENTQLQNEKLYLYYLQNGRDMYVDQELDINRLSDYDVDHIVPQSFLKDDSIDNKVLTRSDKARGKSDNVPSEEVVKKMKNYWRQLLNAKLITQRKFDNLTKAERGGLSELDKAGFIKRQLVETRQITKHVAQILDSRMNTKYDENDKLIREVKVITLKSKLVSDFRKDFQFYKVREINNYHHAHDAYLNAVVGTALIKKYPKLESEFVYGDYKVYDVRKMIAKSEQEIGKATAKYFFYSNIMNFFKTEITLANGEIRKRPLIETNGETGEIVWDKGRDFATVRKVLSMPQVNIVKKTEVQTGGFSKESILPKRNSDKLIARKKDWDPKKYGGFDSPTVAYSVLVVAKVEKGKSKKLKSVKELLGITIMERSSFEKNPIDFLEAKGYKEVKKDLIIKLPKYSLFELENGRKRMLASAGELQKGNELALPSKYVNFLYLASHYEKLKGSPEDNEQKQLFVEQHKHYLDEIIEQISEFSKRVILADANLDKVLSAYNKHRDKPIREQAENIIHLFTLTNLGAPAAFKYFDTTIDRKRYTSTKEVLDATLIHQSITGLYETRIDLSQLGGDGGGSSGGSEAAAKGGTLNLEDEYRLYETSAEPEVSPGSTWLSDFPQAWAETGGMGLAVRQAPLIIPLKATSTPVSIKQYPMSQEAKLGIKPHIQRLLDQGILVPCQSPWNTPLLPVKKPGTNDYRPVQDLREVNKRVEDIHPTVPNPYNLLSGLPPSHRWYTVLDLKDAFFCLRLHPTSQPLFAFEWRDPGMGISGQLTWTRLPQGFKNSPTLFNEALHRDLADFRIQHPDLILLQYVDDILLAATSELDCQQGTRALLLTLGNLGYRASAKKAQLCQKQVKYLGYLLKEGQRWLTEARKETVMGQPTPKTPRQLREFLGKAGFCRLFIPGFAEMAAPLYPLTKPGTLFNWGPDQQKAYQEIKQALLTAPALGLPDLTKPFELFVDEKQGYAKGVLTQKLGPWRRPVAYLSKKLDPVAAGWPPCLRMVAAIAVLRKDAGKLTMGQPLVILAPHAVEALVKQPPDRWLSNARMTHYQAMLLDTDRVQFGPVVALNPATLLPLPEEGAPHDCLEILAETHGTRPDLTDQPIPDADHTWYTDGSSFLQEGQRKAGAAVTTETEVIWARALPAGTSAQRAELIALTQALKMAEGKRLNVYTDSRYAFATAHIHGEIYRRRGWLTSEGREIKNKSEILALLKALFLPKRLSIIHCLGHQKGDSAEARGNRLADQAAREAAIKTPPDTSTLLAGKRTADGSEFEKRTADGSEFESPKKKAKVE

SEQ ID NO: 1902 - protein, 2094 aa, synthetic construct
  source 1..2094: note = Description of Artificial Sequence: Synthetic polypeptide
MPAAKRVKLDGGDKKYSIGLDIGTNSVGWAVITDEYKVPSKKFKVLGNTDRHSIKKNLIGALLFDSGETAEATRLKRTARRRYTRRKNRICYLQEIFSNEMAKVDDSFFHRLEESFLVEEDKKHERHPIFGNIVDEVAYHEKYPTIYHLRKKLVDSTDKADLRLIYLALAHMIKFRGHFLIEGDLNPDNSDVDKLFIQLVQTYNQLFEENPINASGVDAKAILSARLSKSRRLENLIAQLPGEKKNGLFGNLIALSLGLTPNFKSNFDLAEDAKLQLSKDTYDDDLDNLLAQIGDQYADLFLAAKNLSDAILLSDILRVNTEITKAPLSASMIKRYDEHHQDLTLLKALVRQQLPEKYKEIFFDQSKNGYAGYIDGGASQEEFYKFIKPILEKMDGTEELLVKLNREDLLRKQRTFDNGSIPHQIHLGELHAILRRQEDFYPFLKDNREKIEKILTFRIPYYVGPLARGNSRFAWMTRKSEETITPWNFEEVVDKGASAQSFIERMTNFDKNLPNEKVLPKHSLLYEYFTVYNELTKVKYVTEGMRKPAFLSGEQKKAIVDLLFKTNRKVTVKQLKEDYFKKIECFDSVEISGVEDRFNASLGTYHDLLKIIKDKDFLDNEENEDILEDIVLTLTLFEDREMIEERLKTYAHLFDDKVMKQLKRRRYTGWGRLSRKLINGIRDKQSGKTILDFLKSDGFANRNFMQLIHDDSLTFKEDIQKAQVSGQGDSLHEHIANLAGSPAIKKGILQTVKVVDELVKVMGRHKPENIVIEMARENQTTQKGQKNSRERMKRIEEGIKELGSQILKEHPVENTQLQNEKLYLYYLQNGRDMYVDQELDINRLSDYDVDHIVPQSFLKDDSIDNKVLTRSDKARGKSDNVPSEEVVKKMKNYWRQLLNAKLITQRKFDNLTKAERGGLSELDKAGFIKRQLVETRQITKHVAQILDSRMNTKYDENDKLIREVKVITLKSKLVSDFRKDFQFYKVREINNYHHAHDAYLNAVVGTALIKKYPKLESEFVYGDYKVYDVRKMIAKSEQEIGKATAKYFFYSNIMNFFKTEITLANGEIRKRPLIETNGETGEIVWDKGRDFATVRKVLSMPQVNIVKKTEVQTGGFSKESILPKRNSDKLIARKKDWDPKKYGGFDSPTVAYSVLVVAKVEKGKSKKLKSVKELLGITIMERSSFEKNPIDFLEAKGYKEVKKDLIIKLPKYSLFELENGRKRMLASAGELQKGNELALPSKYVNFLYLASHYEKLKGSPEDNEQKQLFVEQHKHYLDEIIEQISEFSKRVILADANLDKVLSAYNKHRDKPIREQAENIIHLFTLTNLGAPAAFKYFDTTIDRKRYTSTKEVLDATLIHQSITGLYETRIDLSQLGGDGGPAPGGSGSSGGTLNLEDEYRLYETSAEPEVSPGSTWLSDFPQAWAETGGMGLAVRQAPLIIPLKATSTPVSIKQYPMSQEAKLGIKPHIQRLLDQGILVPCQSPWNTPLLPVKKPGTNDYRPVQDLREVNKRVEDIHPTVPNPYNLLSGLPPSHRWYTVLDLKDAFFCLRLHPTSQPLFAFEWRDPGMGISGQLTWTRLPQGFKNSPTLFNEALHRDLADFRIQHPDLILLQYVDDILLAATSELDCQQGTRALLLTLGNLGYRASAKKAQLCQKQVKYLGYLLKEGQRWLTEARKETVMGQPTPKTPRQLREFLGKAGFCRLFIPGFAEMAAPLYPLTKPGTLFNWGPDQQKAYQEIKQALLTAPALGLPDLTKPFELFVDEKQGYAKGVLTQKLGPWRRPVAYLSKKLDPVAAGWPPCLRMVAAIAVLRKDAGKLTMGQPLVILAPHAVEALVKQPPDRWLSNARMTHYQAMLLDTDRVQFGPVVALNPATLLPLPEEGAPHDCLEILAETHGTRPDLTDQPIPDADHTWYTDGSSFLQEGQRKAGAAVTTETEVIWARALPAGTSAQRAELIALTQALKMAEGKRLNVYTDSRYAFATAHIHGEIYRRRGWLTSEGREIKNKSEILALLKALFLPKRLSIIHCLGHQKGDSAEARGNRLADQAAREAAIKTPPDTSTLLAGKRTADGSEFEKRTADGSEFESPKKKAKVE

SEQ ID NO: 1903 - protein, 2094 aa, synthetic construct
  source 1..2094: note = Description of Artificial Sequence: Synthetic polypeptide
MPAAKRVKLDGGDKKYSIGLDIGTNSVGWAVITDEYKVPSKKFKVLGNTDRHSIKKNLIGALLFDSGETAEATRLKRTARRRYTRRKNRICYLQEIFSNEMAKVDDSFFHRLEESFLVEEDKKHERHPIFGNIVDEVAYHEKYPTIYHLRKKLVDSTDKADLRLIYLALAHMIKFRGHFLIEGDLNPDNSDVDKLFIQLVQTYNQLFEENPINASGVDAKAILSARLSKSRRLENLIAQLPGEKKNGLFGNLIALSLGLTPNFKSNFDLAEDAKLQLSKDTYDDDLDNLLAQIGDQYADLFLAAKNLSDAILLSDILRVNTEITKAPLSASMIKRYDEHHQDLTLLKALVRQQLPEKYKEIFFDQSKNGYAGYIDGGASQEEFYKFIKPILEKMDGTEELLVKLNREDLLRKQRTFDNGSIPHQIHLGELHAILRRQEDFYPFLKDNREKIEKILTFRIPYYVGPLARGNSRFAWMTRKSEETITPWNFEEVVDKGASAQSFIERMTNFDKNLPNEKVLPKHSLLYEYFTVYNELTKVKYVTEGMRKPAFLSGEQKKAIVDLLFKTNRKVTVKQLKEDYFKKIECFDSVEISGVEDRFNASLGTYHDLLKIIKDKDFLDNEENEDILEDIVLTLTLFEDREMIEERLKTYAHLFDDKVMKQLKRRRYTGWGRLSRKLINGIRDKQSGKTILDFLKSDGFANRNFMQLIHDDSLTFKEDIQKAQVSGQGDSLHEHIANLAGSPAIKKGILQTVKVVDELVKVMGRHKPENIVIEMARENQTTQKGQKNSRERMKRIEEGIKELGSQILKEHPVENTQLQNEKLYLYYLQNGRDMYVDQELDINRLSDYDVDHIVPQSFLKDDSIDNKVLTRSDKARGKSDNVPSEEVVKKMKNYWRQLLNAKLITQRKFDNLTKAERGGLSELDKAGFIKRQLVETRQITKHVAQILDSRMNTKYDENDKLIREVKVITLKSKLVSDFRKDFQFYKVREINNYHHAHDAYLNAVVGTALIKKYPKLESEFVYGDYKVYDVRKMIAKSEQEIGKATAKYFFYSNIMNFFKTEITLANGEIRKRPLIETNGETGEIVWDKGRDFATVRKVLSMPQVNIVKKTEVQTGGFSKESILPKRNSDKLIARKKDWDPKKYGGFDSPTVAYSVLVVAKVEKGKSKKLKSVKELLGITIMERSSFEKNPIDFLEAKGYKEVKKDLIIKLPKYSLFELENGRKRMLASAGELQKGNELALPSKYVNFLYLASHYEKLKGSPEDNEQKQLFVEQHKHYLDEIIEQISEFSKRVILADANLDKVLSAYNKHRDKPIREQAENIIHLFTLTNLGAPAAFKYFDTTIDRKRYTSTKEVLDATLIHQSITGLYETRIDLSQLGGDGGGGSPAPGSSGGTLNLEDEYRLYETSAEPEVSPGSTWLSDFPQAWAETGGMGLAVRQAPLIIPLKATSTPVSIKQYPMSQEAKLGIKPHIQRLLDQGILVPCQSPWNTPLLPVKKPGTNDYRPVQDLREVNKRVEDIHPTVPNPYNLLSGLPPSHRWYTVLDLKDAFFCLRLHPTSQPLFAFEWRDPGMGISGQLTWTRLPQGFKNSPTLFNEALHRDLADFRIQHPDLILLQYVDDILLAATSELDCQQGTRALLLTLGNLGYRASAKKAQLCQKQVKYLGYLLKEGQRWLTEARKETVMGQPTPKTPRQLREFLGKAGFCRLFIPGFAEMAAPLYPLTKPGTLFNWGPDQQKAYQEIKQALLTAPALGLPDLTKPFELFVDEKQGYAKGVLTQKLGPWRRPVAYLSKKLDPVAAGWPPCLRMVAAIAVLRKDAGKLTMGQPLVILAPHAVEALVKQPPDRWLSNARMTHYQAMLLDTDRVQFGPVVALNPATLLPLPEEGAPHDCLEILAETHGTRPDLTDQPIPDADHTWYTDGSSFLQEGQRKAGAAVTTETEVIWARALPAGTSAQRAELIALTQALKMAEGKRLNVYTDSRYAFATAHIHGEIYRRRGWLTSEGREIKNKSEILALLKALFLPKRLSIIHCLGHQKGDSAEARGNRLADQAAREAAIKTPPDTSTLLAGKRTADGSEFEKRTADGSEFESPKKKAKVE

SEQ ID NO: 1904 - protein, 2091 aa, synthetic construct
  source 1..2091: note = Description of Artificial Sequence: Synthetic polypeptide
MPAAKRVKLDGGDKKYSIGLDIGTNSVGWAVITDEYKVPSKKFKVLGNTDRHSIKKNLIGALLFDSGETAEATRLKRTARRRYTRRKNRICYLQEIFSNEMAKVDDSFFHRLEESFLVEEDKKHERHPIFGNIVDEVAYHEKYPTIYHLRKKLVDSTDKADLRLIYLALAHMIKFRGHFLIEGDLNPDNSDVDKLFIQLVQTYNQLFEENPINASGVDAKAILSARLSKSRRLENLIAQLPGEKKNGLFGNLIALSLGLTPNFKSNFDLAEDAKLQLSKDTYDDDLDNLLAQIGDQYADLFLAAKNLSDAILLSDILRVNTEITKAPLSASMIKRYDEHHQDLTLLKALVRQQLPEKYKEIFFDQSKNGYAGYIDGGASQEEFYKFIKPILEKMDGTEELLVKLNREDLLRKQRTFDNGSIPHQIHLGELHAILRRQEDFYPFLKDNREKIEKILTFRIPYYVGPLARGNSRFAWMTRKSEETITPWNFEEVVDKGASAQSFIERMTNFDKNLPNEKVLPKHSLLYEYFTVYNELTKVKYVTEGMRKPAFLSGEQKKAIVDLLFKTNRKVTVKQLKEDYFKKIECFDSVEISGVEDRFNASLGTYHDLLKIIKDKDFLDNEENEDILEDIVLTLTLFEDREMIEERLKTYAHLFDDKVMKQLKRRRYTGWGRLSRKLINGIRDKQSGKTILDFLKSDGFANRNFMQLIHDDSLTFKEDIQKAQVSGQGDSLHEHIANLAGSPAIKKGILQTVKVVDELVKVMGRHKPENIVIEMARENQTTQKGQKNSRERMKRIEEGIKELGSQILKEHPVENTQLQNEKLYLYYLQNGRDMYVDQELDINRLSDYDVDHIVPQSFLKDDSIDNKVLTRSDKARGKSDNVPSEEVVKKMKNYWRQLLNAKLITQRKFDNLTKAERGGLSELDKAGFIKRQLVETRQITKHVAQILDSRMNTKYDENDKLIREVKVITLKSKLVSDFRKDFQFYKVREINNYHHAHDAYLNAVVGTALIKKYPKLESEFVYGDYKVYDVRKMIAKSEQEIGKATAKYFFYSNIMNFFKTEITLANGEIRKRPLIETNGETGEIVWDKGRDFATVRKVLSMPQVNIVKKTEVQTGGFSKESILPKRNSDKLIARKKDWDPKKYGGFDSPTVAYSVLVVAKVEKGKSKKLKSVKELLGITIMERSSFEKNPIDFLEAKGYKEVKKDLIIKLPKYSLFELENGRKRMLASAGELQKGNELALPSKYVNFLYLASHYEKLKGSPEDNEQKQLFVEQHKHYLDEIIEQISEFSKRVILADANLDKVLSAYNKHRDKPIREQAENIIHLFTLTNLGAPAAFKYFDTTIDRKRYTSTKEVLDATLIHQSITGLYETRIDLSQLGGDGGGSSGGGGGTLNLEDEYRLYETSAEPEVSPGSTWLSDFPQAWAETGGMGLAVRQAPLIIPLKATSTPVSIKQYPMSQEAKLGIKPHIQRLLDQGILVPCQSPWNTPLLPVKKPGTNDYRPVQDLREVNKRVEDIHPTVPNPYNLLSGLPPSHRWYTVLDLKDAFFCLRLHPTSQPLFAFEWRDPGMGISGQLTWTRLPQGFKNSPTLFNEALHRDLADFRIQHPDLILLQYVDDILLAATSELDCQQGTRALLLTLGNLGYRASAKKAQLCQKQVKYLGYLLKEGQRWLTEARKETVMGQPTPKTPRQLREFLGKAGFCRLFIPGFAEMAAPLYPLTKPGTLFNWGPDQQKAYQEIKQALLTAPALGLPDLTKPFELFVDEKQGYAKGVLTQKLGPWRRPVAYLSKKLDPVAAGWPPCLRMVAAIAVLRKDAGKLTMGQPLVILAPHAVEALVKQPPDRWLSNARMTHYQAMLLDTDRVQFGPVVALNPATLLPLPEEGAPHDCLEILAETHGTRPDLTDQPIPDADHTWYTDGSSFLQEGQRKAGAAVTTETEVIWARALPAGTSAQRAELIALTQALKMAEGKRLNVYTDSRYAFATAHIHGEIYRRRGWLTSEGREIKNKSEILALLKALFLPKRLSIIHCLGHQKGDSAEARGNRLADQAAREAAIKTPPDTSTLLAGKRTADGSEFEKRTADGSEFESPKKKAKVE

SEQ ID NO: 1905 - protein, 2094 aa, synthetic construct
  source 1..2094: note = Description of Artificial Sequence: Synthetic polypeptide
MPAAKRVKLDGGDKKYSIGLDIGTNSVGWAVITDEYKVPSKKFKVLGNTDRHSIKKNLIGALLFDSGETAEATRLKRTARRRYTRRKNRICYLQEIFSNEMAKVDDSFFHRLEESFLVEEDKKHERHPIFGNIVDEVAYHEKYPTIYHLRKKLVDSTDKADLRLIYLALAHMIKFRGHFLIEGDLNPDNSDVDKLFIQLVQTYNQLFEENPINASGVDAKAILSARLSKSRRLENLIAQLPGEKKNGLFGNLIALSLGLTPNFKSNFDLAEDAKLQLSKDTYDDDLDNLLAQIGDQYADLFLAAKNLSDAILLSDILRVNTEITKAPLSASMIKRYDEHHQDLTLLKALVRQQLPEKYKEIFFDQSKNGYAGYIDGGASQEEFYKFIKPILEKMDGTEELLVKLNREDLLRKQRTFDNGSIPHQIHLGELHAILRRQEDFYPFLKDNREKIEKILTFRIPYYVGPLARGNSRFAWMTRKSEETITPWNFEEVVDKGASAQSFIERMTNFDKNLPNEKVLPKHSLLYEYFTVYNELTKVKYVTEGMRKPAFLSGEQKKAIVDLLFKTNRKVTVKQLKEDYFKKIECFDSVEISGVEDRFNASLGTYHDLLKIIKDKDFLDNEENEDILEDIVLTLTLFEDREMIEERLKTYAHLFDDKVMKQLKRRRYTGWGRLSRKLINGIRDKQSGKTILDFLKSDGFANRNFMQLIHDDSLTFKEDIQKAQVSGQGDSLHEHIANLAGSPAIKKGILQTVKVVDELVKVMGRHKPENIVIEMARENQTTQKGQKNSRERMKRIEEGIKELGSQILKEHPVENTQLQNEKLYLYYLQNGRDMYVDQELDINRLSDYDVDHIVPQSFLKDDSIDNKVLTRSDKARGKSDNVPSEEVVKKMKNYWRQLLNAKLITQRKFDNLTKAERGGLSELDKAGFIKRQLVETRQITKHVAQILDSRMNTKYDENDKLIREVKVITLKSKLVSDFRKDFQFYKVREINNYHHAHDAYLNAVVGTALIKKYPKLESEFVYGDYKVYDVRKMIAKSEQEIGKATAKYFFYSNIMNFFKTEITLANGEIRKRPLIETNGETGEIVWDKGRDFATVRKVLSMPQVNIVKKTEVQTGGFSKESILPKRNSDKLIARKKDWDPKKYGGFDSPTVAYSVLVVAKVEKGKSKKLKSVKELLGITIMERSSFEKNPIDFLEAKGYKEVKKDLIIKLPKYSLFELENGRKRMLASAGELQKGNELALPSKYVNFLYLASHYEKLKGSPEDNEQKQLFVEQHKHYLDEIIEQISEFSKRVILADANLDKVLSAYNKHRDKPIREQAENIIHLFTLTNLGAPAAFKYFDTTIDRKRYTSTKEVLDATLIHQSITGLYETRIDLSQLGGDGGGGGGSSPAPGGTLNLEDEYRLYETSAEPEVSPGSTWLSDFPQAWAETGGMGLAVRQAPLIIPLKATSTPVSIKQYPMSQEAKLGIKPHIQRLLDQGILVPCQSPWNTPLLPVKKPGTNDYRPVQDLREVNKRVEDIHPTVPNPYNLLSGLPPSHRWYTVLDLKDAFFCLRLHPTSQPLFAFEWRDPGMGISGQLTWTRLPQGFKNSPTLFNEALHRDLADFRIQHPDLILLQYVDDILLAATSELDCQQGTRALLLTLGNLGYRASAKKAQLCQKQVKYLGYLLKEGQRWLTEARKETVMGQPTPKTPRQLREFLGKAGFCRLFIPGFAEMAAPLYPLTKPGTLFNWGPDQQKAYQEIKQALLTAPALGLPDLTKPFELFVDEKQGYAKGVLTQKLGPWRRPVAYLSKKLDPVAAGWPPCLRMVAAIAVLRKDAGKLTMGQPLVILAPHAVEALVKQPPDRWLSNARMTHYQAMLLDTDRVQFGPVVALNPATLLPLPEEGAPHDCLEILAETHGTRPDLTDQPIPDADHTWYTDGSSFLQEGQRKAGAAVTTETEVIWARALPAGTSAQRAELIALTQALKMAEGKRLNVYTDSRYAFATAHIHGEIYRRRGWLTSEGREIKNKSEILALLKALFLPKRLSIIHCLGHQKGDSAEARGNRLADQAAREAAIKTPPDTSTLLAGKRTADGSEFEKRTADGSEFESPKKKAKVE

SEQ ID NO: 1906 - protein, 2096 aa, synthetic construct
  source 1..2096: note = Description of Artificial Sequence: Synthetic polypeptide
MPAAKRVKLDGGDKKYSIGLDIGTNSVGWAVITDEYKVPSKKFKVLGNTDRHSIKKNLIGALLFDSGETAEATRLKRTARRRYTRRKNRICYLQEIFSNEMAKVDDSFFHRLEESFLVEEDKKHERHPIFGNIVDEVAYHEKYPTIYHLRKKLVDSTDKADLRLIYLALAHMIKFRGHFLIEGDLNPDNSDVDKLFIQLVQTYNQLFEENPINASGVDAKAILSARLSKSRRLENLIAQLPGEKKNGLFGNLIALSLGLTPNFKSNFDLAEDAKLQLSKDTYDDDLDNLLAQIGDQYADLFLAAKNLSDAILLSDILRVNTEITKAPLSASMIKRYDEHHQDLTLLKALVRQQLPEKYKEIFFDQSKNGYAGYIDGGASQEEFYKFIKPILEKMDGTEELLVKLNREDLLRKQRTFDNGSIPHQIHLGELHAILRRQEDFYPFLKDNREKIEKILTFRIPYYVGPLARGNSRFAWMTRKSEETITPWNFEEVVDKGASAQSFIERMTNFDKNLPNEKVLPKHSLLYEYFTVYNELTKVKYVTEGMRKPAFLSGEQKKAIVDLLFKTNRKVTVKQLKEDYFKKIECFDSVEISGVEDRFNASLGTYHDLLKIIKDKDFLDNEENEDILEDIVLTLTLFEDREMIEERLKTYAHLFDDKVMKQLKRRRYTGWGRLSRKLINGIRDKQSGKTILDFLKSDGFANRNFMQLIHDDSLTFKEDIQKAQVSGQGDSLHEHIANLAGSPAIKKGILQTVKVVDELVKVMGRHKPENIVIEMARENQTTQKGQKNSRERMKRIEEGIKELGSQILKEHPVENTQLQNEKLYLYYLQNGRDMYVDQELDINRLSDYDVDHIVPQSFLKDDSIDNKVLTRSDKARGKSDNVPSEEVVKKMKNYWRQLLNAKLITQRKFDNLTKAERGGLSELDKAGFIKRQLVETRQITKHVAQILDSRMNTKYDENDKLIREVKVITLKSKLVSDFRKDFQFYKVREINNYHHAHDAYLNAVVGTALIKKYPKLESEFVYGDYKVYDVRKMIAKSEQEIGKATAKYFFYSNIMNFFKTEITLANGEIRKRPLIETNGETGEIVWDKGRDFATVRKVLSMPQVNIVKKTEVQTGGFSKESILPKRNSDKLIARKKDWDPKKYGGFDSPTVAYSVLVVAKVEKGKSKKLKSVKELLGITIMERSSFEKNPIDFLEAKGYKEVKKDLIIKLPKYSLFELENGRKRMLASAGELQKGNELALPSKYVNFLYLASHYEKLKGSPEDNEQKQLFVEQHKHYLDEIIEQISEFSKRVILADANLDKVLSAYNKHRDKPIREQAENIIHLFTLTNLGAPAAFKYFDTTIDRKRYTSTKEVLDATLIHQSITGLYETRIDLSQLGGDGGGGGGGSEAAAKGGTLNLEDEYRLYETSAEPEVSPGSTWLSDFPQAWAETGGMGLAVRQAPLIIPLKATSTPVSIKQYPMSQEAKLGIKPHIQRLLDQGILVPCQSPWNTPLLPVKKPGTNDYRPVQDLREVNKRVEDIHPTVPNPYNLLSGLPPSHRWYTVLDLKDAFFCLRLHPTSQPLFAFEWRDPGMGISGQLTWTRLPQGFKNSPTLFNEALHRDLADFRIQHPDLILLQYVDDILLAATSELDCQQGTRALLLTLGNLGYRASAKKAQLCQKQVKYLGYLLKEGQRWLTEARKETVMGQPTPKTPRQLREFLGKAGFCRLFIPGFAEMAAPLYPLTKPGTLFNWGPDQQKAYQEIKQALLTAPALGLPDLTKPFELFVDEKQGYAKGVLTQKLGPWRRPVAYLSKKLDPVAAGWPPCLRMVAAIAVLRKDAGKLTMGQPLVILAPHAVEALVKQPPDRWLSNARMTHYQAMLLDTDRVQFGPVVALNPATLLPLPEEGAPHDCLEILAETHGTRPDLTDQPIPDADHTWYTDGSSFLQEGQRKAGAAVTTETEVIWARALPAGTSAQRAELIALTQALKMAEGKRLNVYTDSRYAFATAHIHGEIYRRRGWLTSEGREIKNKSEILALLKALFLPKRLSIIHCLGHQKGDSAEARGNRLADQAAREAAIKTPPDTSTLLAGKRTADGSEFEKRTADGSEFESPKKKAKVE

SEQ ID NO: 1907 - protein, 2096 aa, synthetic construct
  source 1..2096: note = Description of Artificial Sequence: Synthetic polypeptide
MPAAKRVKLDGGDKKYSIGLDIGTNSVGWAVITDEYKVPSKKFKVLGNTDRHSIKKNLIGALLFDSGETAEATRLKRTARRRYTRRKNRICYLQEIFSNEMAKVDDSFFHRLEESFLVEEDKKHERHPIFGNIVDEVAYHEKYPTIYHLRKKLVDSTDKADLRLIYLALAHMIKFRGHFLIEGDLNPDNSDVDKLFIQLVQTYNQLFEENPINASGVDAKAILSARLSKSRRLENLIAQLPGEKKNGLFGNLIALSLGLTPNFKSNFDLAEDAKLQLSKDTYDDDLDNLLAQIGDQYADLFLAAKNLSDAILLSDILRVNTEITKAPLSASMIKRYDEHHQDLTLLKALVRQQLPEKYKEIFFDQSKNGYAGYIDGGASQEEFYKFIKPILEKMDGTEELLVKLNREDLLRKQRTFDNGSIPHQIHLGELHAILRRQEDFYPFLKDNREKIEKILTFRIPYYVGPLARGNSRFAWMTRKSEETITPWNFEEVVDKGASAQSFIERMTNFDKNLPNEKVLPKHSLLYEYFTVYNELTKVKYVTEGMRKPAFLSGEQKKAIVDLLFKTNRKVTVKQLKEDYFKKIECFDSVEISGVEDRFNASLGTYHDLLKIIKDKDFLDNEENEDILEDIVLTLTLFEDREMIEERLKTYAHLFDDKVMKQLKRRRYTGWGRLSRKLINGIRDKQSGKTILDFLKSDGFANRNFMQLIHDDSLTFKEDIQKAQVSGQGDSLHEHIANLAGSPAIKKGILQTVKVVDELVKVMGRHKPENIVIEMARENQTTQKGQKNSRERMKRIEEGIKELGSQILKEHPVENTQLQNEKLYLYYLQNGRDMYVDQELDINRLSDYDVDHIVPQSFLKDDSIDNKVLTRSDKARGKSDNVPSEEVVKKMKNYWRQLLNAKLITQRKFDNLTKAERGGLSELDKAGFIKRQLVETRQITKHVAQILDSRMNTKYDENDKLIREVKVITLKSKLVSDFRKDFQFYKVREINNYHHAHDAYLNAVVGTALIKKYPKLESEFVYGDYKVYDVRKMIAKSEQEIGKATAKYFFYSNIMNFFKTEITLANGEIRKRPLIETNGETGEIVWDKGRDFATVRKVLSMPQVNIVKKTEVQTGGFSKESILPKRNSDKLIARKKDWDPKKYGGFDSPTVAYSVLVVAKVEKGKSKKLKSVKELLGITIMERSSFEKNPIDFLEAKGYKEVKKDLIIKLPKYSLFELENGRKRMLASAGELQKGNELALPSKYVNFLYLASHYEKLKGSPEDNEQKQLFVEQHKHYLDEIIEQISEFSKRVILADANLDKVLSAYNKHRDKPIREQAENIIHLFTLTNLGAPAAFKYFDTTIDRKRYTSTKEVLDATLIHQSITGLYETRIDLSQLGGDGGEAAAKGGSGGGGGTLNLEDEYRLYETSAEPEVSPGSTWLSDFPQAWAETGGMGLAVRQAPLIIPLKATSTPVSIKQYPMSQEAKLGIKPHIQRLLDQGILVPCQSPWNTPLLPVKKPGTNDYRPVQDLREVNKRVEDIHPTVPNPYNLLSGLPPSHRWYTVLDLKDAFFCLRLHPTSQPLFAFEWRDPGMGISGQLTWTRLPQGFKNSPTLFNEALHRDLADFRIQHPDLILLQYVDDILLAATSELDCQQGTRALLLTLGNLGYRASAKKAQLCQKQVKYLGYLLKEGQRWLTEARKETVMGQPTPKTPRQLREFLGKAGFCRLFIPGFAEMAAPLYPLTKPGTLFNWGPDQQKAYQEIKQALLTAPALGLPDLTKPFELFVDEKQGYAKGVLTQKLGPWRRPVAYLSKKLDPVAAGWPPCLRMVAAIAVLRKDAGKLTMGQPLVILAPHAVEALVKQPPDRWLSNARMTHYQAMLLDTDRVQFGPVVALNPATLLPLPEEGAPHDCLEILAETHGTRPDLTDQPIPDADHTWYTDGSSFLQEGQRKAGAAVTTETEVIWARALPAGTSAQRAELIALTQALKMAEGKRLNVYTDSRYAFATAHIHGEIYRRRGWLTSEGREIKNKSEILALLKALFLPKRLSIIHCLGHQKGDSAEARGNRLADQAAREAAIKTPPDTSTLLAGKRTADGSEFEKRTADGSEFESPKKKAKVE

SEQ ID NO: 1908 - protein, 2096 aa, synthetic construct
  source 1..2096: note = Description of Artificial Sequence: Synthetic polypeptide
MPAAKRVKLDGGDKKYSIGLDIGTNSVGWAVITDEYKVPSKKFKVLGNTDRHSIKKNLIGALLFDSGETAEATRLKRTARRRYTRRKNRICYLQEIFSNEMAKVDDSFFHRLEESFLVEEDKKHERHPIFGNIVDEVAYHEKYPTIYHLRKKLVDSTDKADLRLIYLALAHMIKFRGHFLIEGDLNPDNSDVDKLFIQLVQTYNQLFEENPINASGVDAKAILSARLSKSRRLENLIAQLPGEKKNGLFGNLIALSLGLTPNFKSNFDLAEDAKLQLSKDTYDDDLDNLLAQIGDQYADLFLAAKNLSDAILLSDILRVNTEITKAPLSASMIKRYDEHHQDLTLLKALVRQQLPEKYKEIFFDQSKNGYAGYIDGGASQEEFYKFIKPILEKMDGTEELLVKLNREDLLRKQRTFDNGSIPHQIHLGELHAILRRQEDFYPFLKDNREKIEKILTFRIPYYVGPLARGNSRFAWMTRKSEETITPWNFEEVVDKGASAQSFIERMTNFDKNLPNEKVLPKHSLLYEYFTVYNELTKVKYVTEGMRKPAFLSGEQKKAIVDLLFKTNRKVTVKQLKEDYFKKIECFDSVEISGVEDRFNASLGTYHDLLKIIKDKDFLDNEENEDILEDIVLTLTLFEDREMIEERLKTYAHLFDDKVMKQLKRRRYTGWGRLSRKLINGIRDKQSGKTILDFLKSDGFANRNFMQLIHDDSLTFKEDIQKAQVSGQGDSLHEHIANLAGSPAIKKGILQTVKVVDELVKVMGRHKPENIVIEMARENQTTQKGQKNSRERMKRIEEGIKELGSQILKEHPVENTQLQNEKLYLYYLQNGRDMYVDQELDINRLSDYDVDHIVPQSFLKDDSIDNKVLTRSDKARGKSDNVPSEEVVKKMKNYWRQLLNAKLITQRKFDNLTKAERGGLSELDKAGFIKRQLVETRQITKHVAQILDSRMNTKYDENDKLIREVKVITLKSKLVSDFRKDFQFYKVREINNYHHAHDAYLNAVVGTALIKKYPKLESEFVYGDYKVYDVRKMIAKSEQEIGKATAKYFFYSNIMNFFKTEITLANGEIRKRPLIETNGETGEIVWDKGRDFATVRKVLSMPQVNIVKKTEVQTGGFSKESILPKRNSDKLIARKKDWDPKKYGGFDSPTVAYSVLVVAKVEKGKSKKLKSVKELLGITIMERSSFEKNPIDFLEAKGYKEVKKDLIIKLPKYSLFELENGRKRMLASAGELQKGNELALPSKYVNFLYLASHYEKLKGSPEDNEQKQLFVEQHKHYLDEIIEQISEFSKRVILADANLDKVLSAYNKHRDKPIREQAENIIHLFTLTNLGAPAAFKYFDTTIDRKRYTSTKEVLDATLIHQSITGLYETRIDLSQLGGDGGGGSPAPEAAAKGGTLNLEDEYRLYETSAEPEVSPGSTWLSDFPQAWAETGGMGLAVRQAPLIIPLKATSTPVSIKQYPMSQEAKLGIKPHIQRLLDQGILVPCQSPWNTPLLPVKKPGTNDYRPVQDLREVNKRVEDIHPTVPNPYNLLSGLPPSHRWYTVLDLKDAFFCLRLHPTSQPLFAFEWRDPGMGISGQLTWTRLPQGFKNSPTLFNEALHRDLADFRIQHPDLILLQYVDDILLAATSELDCQQGTRALLLTLGNLGYRASAKKAQLCQKQVKYLGYLLKEGQRWLTEARKETVMGQPTPKTPRQLREFLGKAGFCRLFIPGFAEMAAPLYPLTKPGTLFNWGPDQQKAYQEIKQALLTAPALGLPDLTKPFELFVDEKQGYAKGVLTQKLGPWRRPVAYLSKKLDPVAAGWPPCLRMVAAIAVLRKDAGKLTMGQPLVILAPHAVEALVKQPPDRWLSNARMTHYQAMLLDTDRVQFGPVVALNPATLLPLPEEGAPHDCLEILAETHGTRPDLTDQPIPDADHTWYTDGSSFLQEGQRKAGAAVTTETEVIWARALPAGTSAQRAELIALTQALKMAEGKRLNVYTDSRYAFATAHIHGEIYRRRGWLTSEGREIKNKSEILALLKALFLPKRLSIIHCLGHQKGDSAEARGNRLADQAAREAAIKTPPDTSTLLAGKRTADGSEFEKRTADGSEFESPKKKAKVE

SEQ ID NO: 1909 - protein, 2094 aa, synthetic construct
  source 1..2094: note = Description of Artificial Sequence: Synthetic polypeptide
MPAAKRVKLDGGDKKYSIGLDIGTNSVGWAVITDEYKVPSKKFKVLGNTDRHSIKKNLIGALLFDSGETAEATRLKRTARRRYTRRKNRICYLQEIFSNEMAKVDDSFFHRLEESFLVEEDKKHERHPIFGNIVDEVAYHEKYPTIYHLRKKLVDSTDKADLRLIYLALAHMIKFRGHFLIEGDLNPDNSDVDKLFIQLVQTYNQLFEENPINASGVDAKAILSARLSKSRRLENLIAQLPGEKKNGLFGNLIALSLGLTPNFKSNFDLAEDAKLQLSKDTYDDDLDNLLAQIGDQYADLFLAAKNLSDAILLSDILRVNTEITKAPLSASMIKRYDEHHQDLTLLKALVRQQLPEKYKEIFFDQSKNGYAGYIDGGASQEEFYKFIKPILEKMDGTEELLVKLNREDLLRKQRTFDNGSIPHQIHLGELHAILRRQEDFYPFLKDNREKIEKILTFRIPYYVGPLARGNSRFAWMTRKSEETITPWNFEEVVDKGASAQSFIERMTNFDKNLPNEKVLPKHSLLYEYFTVYNELTKVKYVTEGMRKPAFLSGEQKKAIVDLLFKTNRKVTVKQLKEDYFKKIECFDSVEISGVEDRFNASLGTYHDLLKIIKDKDFLDNEENEDILEDIVLTLTLFEDREMIEERLKTYAHLFDDKVMKQLKRRRYTGWGRLSRKLINGIRDKQSGKTILDFLKSDGFANRNFMQLIHDDSLTFKEDIQKAQVSGQGDSLHEHIANLAGSPAIKKGILQTVKVVDELVKVMGRHKPENIVIEMARENQTTQKGQKNSRERMKRIEEGIKELGSQILKEHPVENTQLQNEKLYLYYLQNGRDMYVDQELDINRLSDYDVDHIVPQSFLKDDSIDNKVLTRSDKARGKSDNVPSEEVVKKMKNYWRQLLNAKLITQRKFDNLTKAERGGLSELDKAGFIKRQLVETRQITKHVAQILDSRMNTKYDENDKLIREVKVITLKSKLVSDFRKDFQFYKVREINNYHHAHDAYLNAVVGTALIKKYPKLESEFVYGDYKVYDVRKMIAKSEQEIGKATAKYFFYSNIMNFFKTEITLANGEIRKRPLIETNGETGEIVWDKGRDFATVRKVLSMPQVNIVKKTEVQTGGFSKESILPKRNSDKLIARKKDWDPKKYGGFDSPTVAYSVLVVAKVEKGKSKKLKSVKELLGITIMERSSFEKNPIDFLEAKGYKEVKKDLIIKLPKYSLFELENGRKRMLASAGELQKGNELALPSKYVNFLYLASHYEKLKGSPEDNEQKQLFVEQHKHYLDEIIEQISEFSKRVILADANLDKVLSAYNKHRDKPIREQAENIIHLFTLTNLGAPAAFKYFDTTIDRKRYTSTKEVLDATLIHQSITGLYETRIDLSQLGGDGGGSSGGGGGSGGTLNLEDEYRLYETSAEPEVSPGSTWLSDFPQAWAETGGMGLAVRQAPLIIPLKATSTPVSIKQYPMSQEAKLGIKPHIQRLLDQGILVPCQSPWNTPLLPVKKPGTNDYRPVQDLREVNKRVEDIHPTVPNPYNLLSGLPPSHRWYTVLDLKDAFFCLRLHPTSQPLFAFEWRDPGMGISGQLTWTRLPQGFKNSPTLFNEALHRDLADFRIQHPDLILLQYVDDILLAATSELDCQQGTRALLLTLGNLGYRASAKKAQLCQKQVKYLGYLLKEGQRWLTEARKETVMGQPTPKTPRQLREFLGKAGFCRLFIPGFAEMAAPLYPLTKPGTLFNWGPDQQKAYQEIKQALLTAPALGLPDLTKPFELFVDEKQGYAKGVLTQKLGPWRRPVAYLSKKLDPVAAGWPPCLRMVAAIAVLRKDAGKLTMGQPLVILAPHAVEALVKQPPDRWLSNARMTHYQAMLLDTDRVQFGPVVALNPATLLPLPEEGAPHDCLEILAETHGTRPDLTDQPIPDADHTWYTDGSSFLQEGQRKAGAAVTTETEVIWARALPAGTSAQRAELIALTQALKMAEGKRLNVYTDSRYAFATAHIHGEIYRRRGWLTSEGREIKNKSEILALLKALFLPKRLSIIHCLGHQKGDSAEARGNRLADQAAREAAIKTPPDTSTLLAGKRTADGSEFEKRTADGSEFESPKKKAKVE

SEQ ID NO: 1910 - protein, 2096 aa, synthetic construct
  source 1..2096: note = Description of Artificial Sequence: Synthetic polypeptide
MPAAKRVKLDGGDKKYSIGLDIGTNSVGWAVITDEYKVPSKKFKVLGNTDRHSIKKNLIGALLFDSGETAEATRLKRTARRRYTRRKNRICYLQEIFSNEMAKVDDSFFHRLEESFLVEEDKKHERHPIFGNIVDEVAYHEKYPTIYHLRKKLVDSTDKADLRLIYLALAHMIKFRGHFLIEGDLNPDNSDVDKLFIQLVQTYNQLFEENPINASGVDAKAILSARLSKSRRLENLIAQLPGEKKNGLFGNLIALSLGLTPNFKSNFDLAEDAKLQLSKDTYDDDLDNLLAQIGDQYADLFLAAKNLSDAILLSDILRVNTEITKAPLSASMIKRYDEHHQDLTLLKALVRQQLPEKYKEIFFDQSKNGYAGYIDGGASQEEFYKFIKPILEKMDGTEELLVKLNREDLLRKQRTFDNGSIPHQIHLGELHAILRRQEDFYPFLKDNREKIEKILTFRIPYYVGPLARGNSRFAWMTRKSEETITPWNFEEVVDKGASAQSFIERMTNFDKNLPNEKVLPKHSLLYEYFTVYNELTKVKYVTEGMRKPAFLSGEQKKAIVDLLFKTNRKVTVKQLKEDYFKKIECFDSVEISGVEDRFNASLGTYHDLLKIIKDKDFLDNEENEDILEDIVLTLTLFEDREMIEERLKTYAHLFDDKVMKQLKRRRYTGWGRLSRKLINGIRDKQSGKTILDFLKSDGFANRNFMQLIHDDSLTFKEDIQKAQVSGQGDSLHEHIANLAGSPAIKKGILQTVKVVDELVKVMGRHKPENIVIEMARENQTTQKGQKNSRERMKRIEEGIKELGSQILKEHPVENTQLQNEKLYLYYLQNGRDMYVDQELDINRLSDYDVDHIVPQSFLKDDSIDNKVLTRSDKARGKSDNVPSEEVVKKMKNYWRQLLNAKLITQRKFDNLTKAERGGLSELDKAGFIKRQLVETRQITKHVAQILDSRMNTKYDENDKLIREVKVITLKSKLVSDFRKDFQFYKVREINNYHHAHDAYLNAVVGTALIKKYPKLESEFVYGDYKVYDVRKMIAKSEQEIGKATAKYFFYSNIMNFFKTEITLANGEIRKRPLIETNGETGEIVWDKGRDFATVRKVLSMPQVNIVKKTEVQTGGFSKESILPKRNSDKLIARKKDWDPKKYGGFDSPTVAYSVLVVAKVEKGKSKKLKSVKELLGITIMERSSFEKNPIDFLEAKGYKEVKKDLIIKLPKYSLFELENGRKRMLASAGELQKGNELALPSKYVNFLYLASHYEKLKGSPEDNEQKQLFVEQHKHYLDEIIEQISEFSKRVILADANLDKVLSAYNKHRDKPIREQAENIIHLFTLTNLGAPAAFKYFDTTIDRKRYTSTKEVLDATLIHQSITGLYETRIDLSQLGGDGGGSSEAAAKGGSGGTLNLEDEYRLYETSAEPEVSPGSTWLSDFPQAWAETGGMGLAVRQAPLIIPLKATSTPVSIKQYPMSQEAKLGIKPHIQRLLDQGILVPCQSPWNTPLLPVKKPGTNDYRPVQDLREVNKRVEDIHPTVPNPYNLLSGLPPSHRWYTVLDLKDAFFCLRLHPTSQPLFAFEWRDPGMGISGQLTWTRLPQGFKNSPTLFNEALHRDLADFRIQHPDLILLQYVDDILLAATSELDCQQGTRALLLTLGNLGYRASAKKAQLCQKQVKYLGYLLKEGQRWLTEARKETVMGQPTPKTPRQLREFLGKAGFCRLFIPGFAEMAAPLYPLTKPGTLFNWGPDQQKAYQEIKQALLTAPALGLPDLTKPFELFVDEKQGYAKGVLTQKLGPWRRPVAYLSKKLDPVAAGWPPCLRMVAAIAVLRKDAGKLTMGQPLVILAPHAVEALVKQPPDRWLSNARMTHYQAMLLDTDRVQFGPVVALNPATLLPLPEEGAPHDCLEILAETHGTRPDLTDQPIPDADHTWYTDGSSFLQEGQRKAGAAVTTETEVIWARALPAGTSAQRAELIALTQALKMAEGKRLNVYTDSRYAFATAHIHGEIYRRRGWLTSEGREIKNKSEILALLKALFLPKRLSIIHCLGHQKGDSAEARGNRLADQAAREAAIKTPPDTSTLLAGKRTADGSEFEKRTADGSEFESPKKKAKVE

SEQ ID NO: 1911 - protein, 2091 aa, synthetic construct
  source 1..2091: note = Description of Artificial Sequence: Synthetic polypeptide
MPAAKRVKLDGGDKKYSIGLDIGTNSVGWAVITDEYKVPSKKFKVLGNTDRHSIKKNLIGALLFDSGETAEATRLKRTARRRYTRRKNRICYLQEIFSNEMAKVDDSFFHRLEESFLVEEDKKHERHPIFGNIVDEVAYHEKYPTIYHLRKKLVDSTDKADLRLIYLALAHMIKFRGHFLIEGDLNPDNSDVDKLFIQLVQTYNQLFEENPINASGVDAKAILSARLSKSRRLENLIAQLPGEKKNGLFGNLIALSLGLTPNFKSNFDLAEDAKLQLSKDTYDDDLDNLLAQIGDQYADLFLAAKNLSDAILLSDILRVNTEITKAPLSASMIKRYDEHHQDLTLLKALVRQQLPEKYKEIFFDQSKNGYAGYIDGGASQEEFYKFIKPILEKMDGTEELLVKLNREDLLRKQRTFDNGSIPHQIHLGELHAILRRQEDFYPFLKDNREKIEKILTFRIPYYVGPLARGNSRFAWMTRKSEETITPWNFEEVVDKGASAQSFIERMTNFDKNLPNEKVLPKHSLLYEYFTVYNELTKVKYVTEGMRKPAFLSGEQKKAIVDLLFKTNRKVTVKQLKEDYFKKIECFDSVEISGVEDRFNASLGTYHDLLKIIKDKDFLDNEENEDILEDIVLTLTLFEDREMIEERLKTYAHLFDDKVMKQLKRRRYTGWGRLSRKLINGIRDKQSGKTILDFLKSDGFANRNFMQLIHDDSLTFKEDIQKAQVSGQGDSLHEHIANLAGSPAIKKGILQTVKVVDELVKVMGRHKPENIVIEMARENQTTQKGQKNSRERMKRIEEGIKELGSQILKEHPVENTQLQNEKLYLYYLQNGRDMYVDQELDINRLSDYDVDHIVPQSFLKDDSIDNKVLTRSDKARGKSDNVPSEEVVKKMKNYWRQLLNAKLITQRKFDNLTKAERGGLSELDKAGFIKRQLVETRQITKHVAQILDSRMNTKYDENDKLIREVKVITLKSKLVSDFRKDFQFYKVREINNYHHAHDAYLNAVVGTALIKKYPKLESEFVYGDYKVYDVRKMIAKSEQEIGKATAKYFFYSNIMNFFKTEITLANGEIRKRPLIETNGETGEIVWDKGRDFATVRKVLSMPQVNIVKKTEVQTGGFSKESILPKRNSDKLIARKKDWDPKKYGGFDSPTVAYSVLVVAKVEKGKSKKLKSVKELLGITIMERSSFEKNPIDFLEAKGYKEVKKDLIIKLPKYSLFELENGRKRMLASAGELQKGNELALPSKYVNFLYLASHYEKLKGSPEDNEQKQLFVEQHKHYLDEIIEQISEFSKRVILADANLDKVLSAYNKHRDKPIREQAENIIHLFTLTNLGAPAAFKYFDTTIDRKRYTSTKEVLDATLIHQSITGLYETRIDLSQLGGDGGGGSGSSGGTLNLEDEYRLYETSAEPEVSPGSTWLSDFPQAWAETGGMGLAVRQAPLIIPLKATSTPVSIKQYPMSQEAKLGIKPHIQRLLDQGILVPCQSPWNTPLLPVKKPGTNDYRPVQDLREVNKRVEDIHPTVPNPYNLLSGLPPSHRWYTVLDLKDAFFCLRLHPTSQPLFAFEWRDPGMGISGQLTWTRLPQGFKNSPTLFNEALHRDLADFRIQHPDLILLQYVDDILLAATSELDCQQGTRALLLTLGNLGYRASAKKAQLCQKQVKYLGYLLKEGQRWLTEARKETVMGQPTPKTPRQLREFLGKAGFCRLFIPGFAEMAAPLYPLTKPGTLFNWGPDQQKAYQEIKQALLTAPALGLPDLTKPFELFVDEKQGYAKGVLTQKLGPWRRPVAYLSKKLDPVAAGWPPCLRMVAAIAVLRKDAGKLTMGQPLVILAPHAVEALVKQPPDRWLSNARMTHYQAMLLDTDRVQFGPVVALNPATLLPLPEEGAPHDCLEILAETHGTRPDLTDQPIPDADHTWYTDGSSFLQEGQRKAGAAVTTETEVIWARALPAGTSAQRAELIALTQALKMAEGKRLNVYTDSRYAFATAHIHGEIYRRRGWLTSEGREIKNKSEILALLKALFLPKRLSIIHCLGHQKGDSAEARGNRLADQAAREAAIKTPPDTSTLLAGKRTADGSEFEKRTADGSEFESPKKKAKVE

SEQ ID NO: 1912 - protein, 2096 aa, synthetic construct
  source 1..2096: note = Description of Artificial Sequence: Synthetic polypeptide
MPAAKRVKLDGGDKKYSIGLDIGTNSVGWAVITDEYKVPSKKFKVLGNTDRHSIKKNLIGALLFDSGETAEATRLKRTARRRYTRRKNRICYLQEIFSNEMAKVDDSFFHRLEESFLVEEDKKHERHPIFGNIVDEVAYHEKYPTIYHLRKKLVDSTDKADLRLIYLALAHMIKFRGHFLIEGDLNPDNSDVDKLFIQLVQTYNQLFEENPINASGVDAKAILSARLSKSRRLENLIAQLPGEKKNGLFGNLIALSLGLTPNFKSNFDLAEDAKLQLSKDTYDDDLDNLLAQIGDQYADLFLAAKNLSDAILLSDILRVNTEITKAPLSASMIKRYDEHHQDLTLLKALVRQQLPEKYKEIFFDQSKNGYAGYIDGGASQEEFYKFIKPILEKMDGTEELLVKLNREDLLRKQRTFDNGSIPHQIHLGELHAILRRQEDFYPFLKDNREKIEKILTFRIPYYVGPLARGNSRFAWMTRKSEETITPWNFEEVVDKGASAQSFIERMTNFDKNLPNEKVLPKHSLLYEYFTVYNELTKVKYVTEGMRKPAFLSGEQKKAIVDLLFKTNRKVTVKQLKEDYFKKIECFDSVEISGVEDRFNASLGTYHDLLKIIKDKDFLDNEENEDILEDIVLTLTLFEDREMIEERLKTYAHLFDDKVMKQLKRRRYTGWGRLSRKLINGIRDKQSGKTILDFLKSDGFANRNFMQLIHDDSLTFKEDIQKAQVSGQGDSLHEHIANLAGSPAIKKGILQTVKVVDELVKVMGRHKPENIVIEMARENQTTQKGQKNSRERMKRIEEGIKELGSQILKEHPVENTQLQNEKLYLYYLQNGRDMYVDQELDINRLSDYDVDHIVPQSFLKDDSIDNKVLTRSDKARGKSDNVPSEEVVKKMKNYWRQLLNAKLITQRKFDNLTKAERGGLSELDKAGFIKRQLVETRQITKHVAQILDSRMNTKYDENDKLIREVKVITLKSKLVSDFRKDFQFYKVREINNYHHAHDAYLNAVVGTALIKKYPKLESEFVYGDYKVYDVRKMIAKSEQEIGKATAKYFFYSNIMNFFKTEITLANGEIRKRPLIETNGETGEIVWDKGRDFATVRKVLSMPQVNIVKKTEVQTGGFSKESILPKRNSDKLIARKKDWDPKKYGGFDSPTVAYSVLVVAKVEKGKSKKLKSVKELLGITIMERSSFEKNPIDFLEAKGYKEVKKDLIIKLPKYSLFELENGRKRMLASAGELQKGNELALPSKYVNFLYLASHYEKLKGSPEDNEQKQLFVEQHKHYLDEIIEQISEFSKRVILADANLDKVLSAYNKHRDKPIREQAENIIHLFTLTNLGAPAAFKYFDTTIDRKRYTSTKEVLDATLIHQSITGLYETRIDLSQLGGDGGPAPGSSEAAAKGGTLNLEDEYRLYETSAEPEVSPGSTWLSDFPQAWAETGGMGLAVRQAPLIIPLKATSTPVSIKQYPMSQEAKLGIKPHIQRLLDQGILVPCQSPWNTPLLPVKKPGTNDYRPVQDLREVNKRVEDIHPTVPNPYNLLSGLPPSHRWYTVLDLKDAFFCLRLHPTSQPLFAFEWRDPGMGISGQLTWTRLPQGFKNSPTLFNEALHRDLADFRIQHPDLILLQYVDDILLAATSELDCQQGTRALLLTLGNLGYRASAKKAQLCQKQVKYLGYLLKEGQRWLTEARKETVMGQPTPKTPRQLREFLGKAGFCRLFIPGFAEMAAPLYPLTKPGTLFNWGPDQQKAYQEIKQALLTAPALGLPDLTKPFELFVDEKQGYAKGVLTQKLGPWRRPVAYLSKKLDPVAAGWPPCLRMVAAIAVLRKDAGKLTMGQPLVILAPHAVEALVKQPPDRWLSNARMTHYQAMLLDTDRVQFGPVVALNPATLLPLPEEGAPHDCLEILAETHGTRPDLTDQPIPDADHTWYTDGSSFLQEGQRKAGAAVTTETEVIWARALPAGTSAQRAELIALTQALKMAEGKRLNVYTDSRYAFATAHIHGEIYRRRGWLTSEGREIKNKSEILALLKALFLPKRLSIIHCLGHQKGDSAEARGNRLADQAAREAAIKTPPDTSTLLAGKRTADGSEFEKRTADGSEFESPKKKAKVE

SEQ ID NO: 1913 - protein, 2096 aa, synthetic construct
  source 1..2096: note = Description of Artificial Sequence: Synthetic polypeptide
MPAAKRVKLDGGDKKYSIGLDIGTNSVGWAVITDEYKVPSKKFKVLGNTDRHSIKKNLIGALLFDSGETAEATRLKRTARRRYTRRKNRICYLQEIFSNEMAKVDDSFFHRLEESFLVEEDKKHERHPIFGNIVDEVAYHEKYPTIYHLRKKLVDSTDKADLRLIYLALAHMIKFRGHFLIEGDLNPDNSDVDKLFIQLVQTYNQLFEENPINASGVDAKAILSARLSKSRRLENLIAQLPGEKKNGLFGNLIALSLGLTPNFKSNFDLAEDAKLQLSKDTYDDDLDNLLAQIGDQYADLFLAAKNLSDAILLSDILRVNTEITKAPLSASMIKRYDEHHQDLTLLKALVRQQLPEKYKEIFFDQSKNGYAGYIDGGASQEEFYKFIKPILEKMDGTEELLVKLNREDLLRKQRTFDNGSIPHQIHLGELHAILRRQEDFYPFLKDNREKIEKILTFRIPYYVGPLARGNSRFAWMTRKSEETITPWNFEEVVDKGASAQSFIERMTNFDKNLPNEKVLPKHSLLYEYFTVYNELTKVKYVTEGMRKPAFLSGEQKKAIVDLLFKTNRKVTVKQLKEDYFKKIECFDSVEISGVEDRFNASLGTYHDLLKIIKDKDFLDNEENEDILEDIVLTLTLFEDREMIEERLKTYAHLFDDKVMKQLKRRRYTGWGRLSRKLINGIRDKQSGKTILDFLKSDGFANRNFMQLIHDDSLTFKEDIQKAQVSGQGDSLHEHIANLAGSPAIKKGILQTVKVVDELVKVMGRHKPENIVIEMARENQTTQKGQKNSRERMKRIEEGIKELGSQILKEHPVENTQLQNEKLYLYYLQNGRDMYVDQELDINRLSDYDVDHIVPQSFLKDDSIDNKVLTRSDKARGKSDNVPSEEVVKKMKNYWRQLLNAKLITQRKFDNLTKAERGGLSELDKAGFIKRQLVETRQITKHVAQILDSRMNTKYDENDKLIREVKVITLKSKLVSDFRKDFQFYKVREINNYHHAHDAYLNAVVGTALIKKYPKLESEFVYGDYKVYDVRKMIAKSEQEIGKATAKYFFYSNIMNFFKTEITLANGEIRKRPLIETNGETGEIVWDKGRDFATVRKVLSMPQVNIVKKTEVQTGGFSKESILPKRNSDKLIARKKDWDPKKYGGFDSPTVAYSVLVVAKVEKGKSKKLKSVKELLGITIMERSSFEKNPIDFLEAKGYKEVKKDLIIKLPKYSLFELENGRKRMLASAGELQKGNELALPSKYVNFLYLASHYEKLKGSPEDNEQKQLFVEQHKHYLDEIIEQISEFSKRVILADANLDKVLSAYNKHRDKPIREQAENIIHLFTLTNLGAPAAFKYFDTTIDRKRYTSTKEVLDATLIHQSITGLYETRIDLSQLGGDGGEAAAKGSSGGSGGTLNLEDEYRLYETSAEPEVSPGSTWLSDFPQAWAETGGMGLAVRQAPLIIPLKATSTPVSIKQYPMSQEAKLGIKPHIQRLLDQGILVPCQSPWNTPLLPVKKPGTNDYRPVQDLREVNKRVEDIHPTVPNPYNLLSGLPPSHRWYTVLDLKDAFFCLRLHPTSQPLFAFEWRDPGMGISGQLTWTRLPQGFKNSPTLFNEALHRDLADFRIQHPDLILLQYVDDILLAATSELDCQQGTRALLLTLGNLGYRASAKKAQLCQKQVKYLGYLLKEGQRWLTEARKETVMGQPTPKTPRQLREFLGKAGFCRLFIPGFAEMAAPLYPLTKPGTLFNWGPDQQKAYQEIKQALLTAPALGLPDLTKPFELFVDEKQGYAKGVLTQKLGPWRRPVAYLSKKLDPVAAGWPPCLRMVAAIAVLRKDAGKLTMGQPLVILAPHAVEALVKQPPDRWLSNARMTHYQAMLLDTDRVQFGPVVALNPATLLPLPEEGAPHDCLEILAETHGTRPDLTDQPIPDADHTWYTDGSSFLQEGQRKAGAAVTTETEVIWARALPAGTSAQRAELIALTQALKMAEGKRLNVYTDSRYAFATAHIHGEIYRRRGWLTSEGREIKNKSEILALLKALFLPKRLSIIHCLGHQKGDSAEARGNRLADQAAREAAIKTPPDTSTLLAGKRTADGSEFEKRTADGSEFESPKKKAKVE

SEQ ID NO: 1914 - protein, 2091 aa, synthetic construct
  source 1..2091: note = Description of Artificial Sequence: Synthetic polypeptide
MPAAKRVKLDGGDKKYSIGLDIGTNSVGWAVITDEYKVPSKKFKVLGNTDRHSIKKNLIGALLFDSGETAEATRLKRTARRRYTRRKNRICYLQEIFSNEMAKVDDSFFHRLEESFLVEEDKKHERHPIFGNIVDEVAYHEKYPTIYHLRKKLVDSTDKADLRLIYLALAHMIKFRGHFLIEGDLNPDNSDVDKLFIQLVQTYNQLFEENPINASGVDAKAILSARLSKSRRLENLIAQLPGEKKNGLFGNLIALSLGLTPNFKSNFDLAEDAKLQLSKDTYDDDLDNLLAQIGDQYADLFLAAKNLSDAILLSDILRVNTEITKAPLSASMIKRYDEHHQDLTLLKALVRQQLPEKYKEIFFDQSKNGYAGYIDGGASQEEFYKFIKPILEKMDGTEELLVKLNREDLLRKQRTFDNGSIPHQIHLGELHAILRRQEDFYPFLKDNREKIEKILTFRIPYYVGPLARGNSRFAWMTRKSEETITPWNFEEVVDKGASAQSFIERMTNFDKNLPNEKVLPKHSLLYEYFTVYNELTKVKYVTEGMRKPAFLSGEQKKAIVDLLFKTNRKVTVKQLKEDYFKKIECFDSVEISGVEDRFNASLGTYHDLLKIIKDKDFLDNEENEDILEDIVLTLTLFEDREMIEERLKTYAHLFDDKVMKQLKRRRYTGWGRLSRKLINGIRDKQSGKTILDFLKSDGFANRNFMQLIHDDSLTFKEDIQKAQVSGQGDSLHEHIANLAGSPAIKKGILQTVKVVDELVKVMGRHKPENIVIEMARENQTTQKGQKNSRERMKRIEEGIKELGSQILKEHPVENTQLQNEKLYLYYLQNGRDMYVDQELDINRLSDYDVDHIVPQSFLKDDSIDNKVLTRSDKARGKSDNVPSEEVVKKMKNYWRQLLNAKLITQRKFDNLTKAERGGLSELDKAGFIKRQLVETRQITKHVAQILDSRMNTKYDENDKLIREVKVITLKSKLVSDFRKDFQFYKVREINNYHHAHDAYLNAVVGTALIKKYPKLESEFVYGDYKVYDVRKMIAKSEQEIGKATAKYFFYSNIMNFFKTEITLANGEIRKRPLIETNGETGEIVWDKGRDFATVRKVLSMPQVNIVKKTEVQTGGFSKESILPKRNSDKLIARKKDWDPKKYGGFDSPTVAYSVLVVAKVEKGKSKKLKSVKELLGITIMERSSFEKNPIDFLEAKGYKEVKKDLIIKLPKYSLFELENGRKRMLASAGELQKGNELALPSKYVNFLYLASHYEKLKGSPEDNEQKQLFVEQHKHYLDEIIEQISEFSKRVILADANLDKVLSAYNKHRDKPIREQAENIIHLFTLTNLGAPAAFKYFDTTIDRKRYTSTKEVLDATLIHQSITGLYETRIDLSQLGGDGGGGSPAPGGTLNLEDEYRLYETSAEPEVSPGSTWLSDFPQAWAETGGMGLAVRQAPLIIPLKATSTPVSIKQYPMSQEAKLGIKPHIQRLLDQGILVPCQSPWNTPLLPVKKPGTNDYRPVQDLREVNKRVEDIHPTVPNPYNLLSGLPPSHRWYTVLDLKDAFFCLRLHPTSQPLFAFEWRDPGMGISGQLTWTRLPQGFKNSPTLFNEALHRDLADFRIQHPDLILLQYVDDILLAATSELDCQQGTRALLLTLGNLGYRASAKKAQLCQKQVKYLGYLLKEGQRWLTEARKETVMGQPTPKTPRQLREFLGKAGFCRLFIPGFAEMAAPLYPLTKPGTLFNWGPDQQKAYQEIKQALLTAPALGLPDLTKPFELFVDEKQGYAKGVLTQKLGPWRRPVAYLSKKLDPVAAGWPPCLRMVAAIAVLRKDAGKLTMGQPLVILAPHAVEALVKQPPDRWLSNARMTHYQAMLLDTDRVQFGPVVALNPATLLPLPEEGAPHDCLEILAETHGTRPDLTDQPIPDADHTWYTDGSSFLQEGQRKAGAAVTTETEVIWARALPAGTSAQRAELIALTQALKMAEGKRLNVYTDSRYAFATAHIHGEIYRRRGWLTSEGREIKNKSEILALLKALFLPKRLSIIHCLGHQKGDSAEARGNRLADQAAREAAIKTPPDTSTLLAGKRTADGSEFEKRTADGSEFESPKKKAKVE

SEQ ID NO: 1915 - protein, 2096 aa, synthetic construct
  source 1..2096: note = Description of Artificial Sequence: Synthetic polypeptide
MPAAKRVKLDGGDKKYSIGLDIGTNSVGWAVITDEYKVPSKKFKVLGNTDRHSIKKNLIGALLFDSGETAEATRLKRTARRRYTRRKNRICYLQEIFSNEMAKVDDSFFHRLEESFLVEEDKKHERHPIFGNIVDEVAYHEKYPTIYHLRKKLVDSTDKADLRLIYLALAHMIKFRGHFLIEGDLNPDNSDVDKLFIQLVQTYNQLFEENPINASGVDAKAILSARLSKSRRLENLIAQLPGEKKNGLFGNLIALSLGLTPNFKSNFDLAEDAKLQLSKDTYDDDLDNLLAQIGDQYADLFLAAKNLSDAILLSDILRVNTEITKAPLSASMIKRYDEHHQDLTLLKALVRQQLPEKYKEIFFDQSKNGYAGYIDGGASQEEFYKFIKPILEKMDGTEELLVKLNREDLLRKQRTFDNGSIPHQIHLGELHAILRRQEDFYPFLKDNREKIEKILTFRIPYYVGPLARGNSRFAWMTRKSEETITPWNFEEVVDKGASAQSFIERMTNFDKNLPNEKVLPKHSLLYEYFTVYNELTKVKYVTEGMRKPAFLSGEQKKAIVDLLFKTNRKVTVKQLKEDYFKKIECFDSVEISGVEDRFNASLGTYHDLLKIIKDKDFLDNEENEDILEDIVLTLTLFEDREMIEERLKTYAHLFDDKVMKQLKRRRYTGWGRLSRKLINGIRDKQSGKTILDFLKSDGFANRNFMQLIHDDSLTFKEDIQKAQVSGQGDSLHEHIANLAGSPAIKKGILQTVKVVDELVKVMGRHKPENIVIEMARENQTTQKGQKNSRERMKRIEEGIKELGSQILKEHPVENTQLQNEKLYLYYLQNGRDMYVDQELDINRLSDYDVDHIVPQSFLKDDSIDNKVLTRSDKARGKSDNVPSEEVVKKMKNYWRQLLNAKLITQRKFDNLTKAERGGLSELDKAGFIKRQLVETRQITKHVAQILDSRMNTKYDENDKLIREVKVITLKSKLVSDFRKDFQFYKVREINNYHHAHDAYLNAVVGTALIKKYPKLESEFVYGDYKVYDVRKMIAKSEQEIGKATAKYFFYSNIMNFFKTEITLANGEIRKRPLIETNGETGEIVWDKGRDFATVRKVLSMPQVNIVKKTEVQTGGFSKESILPKRNSDKLIARKKDWDPKKYGGFDSPTVAYSVLVVAKVEKGKSKKLKSVKELLGITIMERSSFEKNPIDFLEAKGYKEVKKDLIIKLPKYSLFELENGRKRMLASAGELQKGNELALPSKYVNFLYLASHYEKLKGSPEDNEQKQLFVEQHKHYLDEIIEQISEFSKRVILADANLDKVLSAYNKHRDKPIREQAENIIHLFTLTNLGAPAAFKYFDTTIDRKRYTSTKEVLDATLIHQSITGLYETRIDLSQLGGDGGGGSEAAAKGGGGGTLNLEDEYRLYETSAEPEVSPGSTWLSDFPQAWAETGGMGLAVRQAPLIIPLKATSTPVSIKQYPMSQEAKLGIKPHIQRLLDQGILVPCQSPWNTPLLPVKKPGTNDYRPVQDLREVNKRVEDIHPTVPNPYNLLSGLPPSHRWYTVLDLKDAFFCLRLHPTSQPLFAFEWRDPGMGISGQLTWTRLPQGFKNSPTLFNEALHRDLADFRIQHPDLILLQYVDDILLAATSELDCQQGTRALLLTLGNLGYRASAKKAQLCQKQVKYLGYLLKEGQRWLTEARKETVMGQPTPKTPRQLREFLGKAGFCRLFIPGFAEMAAPLYPLTKPGTLFNWGPDQQKAYQEIKQALLTAPALGLPDLTKPFELFVDEKQGYAKGVLTQKLGPWRRPVAYLSKKLDPVAAGWPPCLRMVAAIAVLRKDAGKLTMGQPLVILAPHAVEALVKQPPDRWLSNARMTHYQAMLLDTDRVQFGPVVALNPATLLPLPEEGAPHDCLEILAETHGTRPDLTDQPIPDADHTWYTDGSSFLQEGQRKAGAAVTTETEVIWARALPAGTSAQRAELIALTQALKMAEGKRLNVYTDSRYAFATAHIHGEIYRRRGWLTSEGREIKNKSEILALLKALFLPKRLSIIHCLGHQKGDSAEARGNRLADQAAREAAIKTPPDTSTLLAGKRTADGSEFEKRTADGSEFESPKKKAKVE

SEQ ID NO: 1916 - protein, 2097 aa, synthetic construct
  source 1..2097: note = Description of Artificial Sequence: Synthetic polypeptide
MPAAKRVKLDGGDKKYSIGLDIGTNSVGWAVITDEYKVPSKKFKVLGNTDRHSIKKNLIGALLFDSGETAEATRLKRTARRRYTRRKNRICYLQEIFSNEMAKVDDSFFHRLEESFLVEEDKKHERHPIFGNIVDEVAYHEKYPTIYHLRKKLVDSTDKADLRLIYLALAHMIKFRGHFLIEGDLNPDNSDVDKLFIQLVQTYNQLFEENPINASGVDAKAILSARLSKSRRLENLIAQLPGEKKNGLFGNLIALSLGLTPNFKSNFDLAEDAKLQLSKDTYDDDLDNLLAQIGDQYADLFLAAKNLSDAILLSDILRVNTEITKAPLSASMIKRYDEHHQDLTLLKALVRQQLPEKYKEIFFDQSKNGYAGYIDGGASQEEFYKFIKPILEKMDGTEELLVKLNREDLLRKQRTFDNGSIPHQIHLGELHAILRRQEDFYPFLKDNREKIEKILTFRIPYYVGPLARGNSRFAWMTRKSEETITPWNFEEVVDKGASAQSFIERMTNFDKNLPNEKVLPKHSLLYEYFTVYNELTKVKYVTEGMRKPAFLSGEQKKAIVDLLFKTNRKVTVKQLKEDYFKKIECFDSVEISGVEDRFNASLGTYHDLLKIIKDKDFLDNEENEDILEDIVLTLTLFEDREMIEERLKTYAHLFDDKVMKQLKRRRYTGWGRLSRKLINGIRDKQSGKTILDFLKSDGFANRNFMQLIHDDSLTFKEDIQKAQVSGQGDSLHEHIANLAGSPAIKKGILQTVKVVDELVKVMGRHKPENIVIEMARENQTTQKGQKNSRERMKRIEEGIKELGSQILKEHPVENTQLQNEKLYLYYLQNGRDMYVDQELDINRLSDYDVDHIVPQSFLKDDSIDNKVLTRSDKARGKSDNVPSEEVVKKMKNYWRQLLNAKLITQRKFDNLTKAERGGLSELDKAGFIKRQLVETRQITKHVAQILDSRMNTKYDENDKLIREVKVITLKSKLVSDFRKDFQFYKVREINNYHHAHDAYLNAVVGTALIKKYPKLESEFVYGDYKVYDVRKMIAKSEQEIGKATAKYFFYSNIMNFFKTEITLANGEIRKRPLIETNGETGEIVWDKGRDFATVRKVLSMPQVNIVKKTEVQTGGFSKESILPKRNSDKLIARKKDWDPKKYGGFDSPTVAYSVLVVAKVEKGKSKKLKSVKELLGITIMERSSFEKNPIDFLEAKGYKEVKKDLIIKLPKYSLFELENGRKRMLASAGELQKGNELALPSKYVNFLYLASHYEKLKGSPEDNEQKQLFVEQHKHYLDEIIEQISEFSKRVILADANLDKVLSAYNKHRDKPIREQAENIIHLFTLTNLGAPAAFKYFDTTIDRKRYTSTKEVLDATLIHQSITGLYETRIDLSQLGGDGGGGSGGSGGSGGSGGTLNLEDEYRLYETSAEPEVSPGSTWLSDFPQAWAETGGMGLAVRQAPLIIPLKATSTPVSIKQYPMSQEAKLGIKPHIQRLLDQGILVPCQSPWNTPLLPVKKPGTNDYRPVQDLREVNKRVEDIHPTVPNPYNLLSGLPPSHRWYTVLDLKDAFFCLRLHPTSQPLFAFEWRDPGMGISGQLTWTRLPQGFKNSPTLFNEALHRDLADFRIQHPDLILLQYVDDILLAATSELDCQQGTRALLLTLGNLGYRASAKKAQLCQKQVKYLGYLLKEGQRWLTEARKETVMGQPTPKTPRQLREFLGKAGFCRLFIPGFAEMAAPLYPLTKPGTLFNWGPDQQKAYQEIKQALLTAPALGLPDLTKPFELFVDEKQGYAKGVLTQKLGPWRRPVAYLSKKLDPVAAGWPPCLRMVAAIAVLRKDAGKLTMGQPLVILAPHAVEALVKQPPDRWLSNARMTHYQAMLLDTDRVQFGPVVALNPATLLPLPEEGAPHDCLEILAETHGTRPDLTDQPIPDADHTWYTDGSSFLQEGQRKAGAAVTTETEVIWARALPAGTSAQRAELIALTQALKMAEGKRLNVYTDSRYAFATAHIHGEIYRRRGWLTSEGREIKNKSEILALLKALFLPKRLSIIHCLGHQKGDSAEARGNRLADQAAREAAIKTPPDTSTLLAGKRTADGSEFEKRTADGSEFESPKKKAKVE

SEQ ID NO: 1917 - protein, 2090 aa, synthetic construct
  source 1..2090: note = Description of Artificial Sequence: Synthetic polypeptide
MPAAKRVKLDGGDKKYSIGLDIGTNSVGWAVITDEYKVPSKKFKVLGNTDRHSIKKNLIGALLFDSGETAEATRLKRTARRRYTRRKNRICYLQEIFSNEMAKVDDSFFHRLEESFLVEEDKKHERHPIFGNIVDEVAYHEKYPTIYHLRKKLVDSTDKADLRLIYLALAHMIKFRGHFLIEGDLNPDNSDVDKLFIQLVQTYNQLFEENPINASGVDAKAILSARLSKSRRLENLIAQLPGEKKNGLFGNLIALSLGLTPNFKSNFDLAEDAKLQLSKDTYDDDLDNLLAQIGDQYADLFLAAKNLSDAILLSDILRVNTEITKAPLSASMIKRYDEHHQDLTLLKALVRQQLPEKYKEIFFDQSKNGYAGYIDGGASQEEFYKFIKPILEKMDGTEELLVKLNREDLLRKQRTFDNGSIPHQIHLGELHAILRRQEDFYPFLKDNREKIEKILTFRIPYYVGPLARGNSRFAWMTRKSEETITPWNFEEVVDKGASAQSFIERMTNFDKNLPNEKVLPKHSLLYEYFTVYNELTKVKYVTEGMRKPAFLSGEQKKAIVDLLFKTNRKVTVKQLKEDYFKKIECFDSVEISGVEDRFNASLGTYHDLLKIIKDKDFLDNEENEDILEDIVLTLTLFEDREMIEERLKTYAHLFDDKVMKQLKRRRYTGWGRLSRKLINGIRDKQSGKTILDFLKSDGFANRNFMQLIHDDSLTFKEDIQKAQVSGQGDSLHEHIANLAGSPAIKKGILQTVKVVDELVKVMGRHKPENIVIEMARENQTTQKGQKNSRERMKRIEEGIKELGSQILKEHPVENTQLQNEKLYLYYLQNGRDMYVDQELDINRLSDYDVDHIVPQSFLKDDSIDNKVLTRSDKARGKSDNVPSEEVVKKMKNYWRQLLNAKLITQRKFDNLTKAERGGLSELDKAGFIKRQLVETRQITKHVAQILDSRMNTKYDENDKLIREVKVITLKSKLVSDFRKDFQFYKVREINNYHHAHDAYLNAVVGTALIKKYPKLESEFVYGDYKVYDVRKMIAKSEQEIGKATAKYFFYSNIMNFFKTEITLANGEIRKRPLIETNGETGEIVWDKGRDFATVRKVLSMPQVNIVKKTEVQTGGFSKESILPKRNSDKLIARKKDWDPKKYGGFDSPTVAYSVLVVAKVEKGKSKKLKSVKELLGITIMERSSFEKNPIDFLEAKGYKEVKKDLIIKLPKYSLFELENGRKRMLASAGELQKGNELALPSKYVNFLYLASHYEKLKGSPEDNEQKQLFVEQHKHYLDEIIEQISEFSKRVILADANLDKVLSAYNKHRDKPIREQAENIIHLFTLTNLGAPAAFKYFDTTIDRKRYTSTKEVLDATLIHQSITGLYETRIDLSQLGGDGGGGGGGGGTLNLEDEYRLYETSAEPEVSPGSTWLSDFPQAWAETGGMGLAVRQAPLIIPLKATSTPVSIKQYPMSQEAKLGIKPHIQRLLDQGILVPCQSPWNTPLLPVKKPGTNDYRPVQDLREVNKRVEDIHPTVPNPYNLLSGLPPSHRWYTVLDLKDAFFCLRLHPTSQPLFAFEWRDPGMGISGQLTWTRLPQGFKNSPTLFNEALHRDLADFRIQHPDLILLQYVDDILLAATSELDCQQGTRALLLTLGNLGYRASAKKAQLCQKQVKYLGYLLKEGQRWLTEARKETVMGQPTPKTPRQLREFLGKAGFCRLFIPGFAEMAAPLYPLTKPGTLFNWGPDQQKAYQEIKQALLTAPALGLPDLTKPFELFVDEKQGYAKGVLTQKLGPWRRPVAYLSKKLDPVAAGWPPCLRMVAAIAVLRKDAGKLTMGQPLVILAPHAVEALVKQPPDRWLSNARMTHYQAMLLDTDRVQFGPVVALNPATLLPLPEEGAPHDCLEILAETHGTRPDLTDQPIPDADHTWYTDGSSFLQEGQRKAGAAVTTETEVIWARALPAGTSAQRAELIALTQALKMAEGKRLNVYTDSRYAFATAHIHGEIYRRRGWLTSEGREIKNKSEILALLKALFLPKRLSIIHCLGHQKGDSAEARGNRLADQAAREAAIKTPPDTSTLLAGKRTADGSEFEKRTADGSEFESPKKKAKVE

SEQ ID NO: 1918 - protein, 2131 aa, synthetic construct
  source 1..2131: note = Description of Artificial Sequence: Synthetic polypeptide
MPAAKRVKLDGGDKKYSIGLDIGTNSVGWAVITDEYKVPSKKFKVLGNTDRHSIKKNLIGALLFDSGETAEATRLKRTARRRYTRRKNRICYLQEIFSNEMAKVDDSFFHRLEESFLVEEDKKHERHPIFGNIVDEVAYHEKYPTIYHLRKKLVDSTDKADLRLIYLALAHMIKFRGHFLIEGDLNPDNSDVDKLFIQLVQTYNQLFEENPINASGVDAKAILSARLSKSRRLENLIAQLPGEKKNGLFGNLIALSLGLTPNFKSNFDLAEDAKLQLSKDTYDDDLDNLLAQIGDQYADLFLAAKNLSDAILLSDILRVNTEITKAPLSASMIKRYDEHHQDLTLLKALVRQQLPEKYKEIFFDQSKNGYAGYIDGGASQEEFYKFIKPILEKMDGTEELLVKLNREDLLRKQRTFDNGSIPHQIHLGELHAILRRQEDFYPFLKDNREKIEKILTFRIPYYVGPLARGNSRFAWMTRKSEETITPWNFEEVVDKGASAQSFIERMTNFDKNLPNEKVLPKHSLLYEYFTVYNELTKVKYVTEGMRKPAFLSGEQKKAIVDLLFKTNRKVTVKQLKEDYFKKIECFDSVEISGVEDRFNASLGTYHDLLKIIKDKDFLDNEENEDILEDIVLTLTLFEDREMIEERLKTYAHLFDDKVMKQLKRRRYTGWGRLSRKLINGIRDKQSGKTILDFLKSDGFANRNFMQLIHDDSLTFKEDIQKAQVSGQGDSLHEHIANLAGSPAIKKGILQTVKVVDELVKVMGRHKPENIVIEMARENQTTQKGQKNSRERMKRIEEGIKELGSQILKEHPVENTQLQNEKLYLYYLQNGRDMYVDQELDINRLSDYDVDHIVPQSFLKDDSIDNKVLTRSDKARGKSDNVPSEEVVKKMKNYWRQLLNAKLITQRKFDNLTKAERGGLSELDKAGFIKRQLVETRQITKHVAQILDSRMNTKYDENDKLIREVKVITLKSKLVSDFRKDFQFYKVREINNYHHAHDAYLNAVVGTALIKKYPKLESEFVYGDYKVYDVRKMIAKSEQEIGKATAKYFFYSNIMNFFKTEITLANGEIRKRPLIETNGETGEIVWDKGRDFATVRKVLSMPQVNIVKKTEVQTGGFSKESILPKRNSDKLIARKKDWDPKKYGGFDSPTVAYSVLVVAKVEKGKSKKLKSVKELLGITIMERSSFEKNPIDFLEAKGYKEVKKDLIIKLPKYSLFELENGRKRMLASAGELQKGNELALPSKYVNFLYLASHYEKLKGSPEDNEQKQLFVEQHKHYLDEIIEQISEFSKRVILADANLDKVLSAYNKHRDKPIREQAENIIHLFTLTNLGAPAAFKYFDTTIDRKRYTSTKEVLDATLIHQSITGLYETRIDLSQLGGDGGAEAAAKEAAAKEAAAKEAAAKALEAEAAAKEAAAKEAAAKEAAAKAGGTLNLEDEYRLYETSAEPEVSPGSTWLSDFPQAWAETGGMGLAVRQAPLIIPLKATSTPVSIKQYPMSQEAKLGIKPHIQRLLDQGILVPCQSPWNTPLLPVKKPGTNDYRPVQDLREVNKRVEDIHPTVPNPYNLLSGLPPSHRWYTVLDLKDAFFCLRLHPTSQPLFAFEWRDPGMGISGQLTWTRLPQGFKNSPTLFNEALHRDLADFRIQHPDLILLQYVDDILLAATSELDCQQGTRALLLTLGNLGYRASAKKAQLCQKQVKYLGYLLKEGQRWLTEARKETVMGQPTPKTPRQLREFLGKAGFCRLFIPGFAEMAAPLYPLTKPGTLFNWGPDQQKAYQEIKQALLTAPALGLPDLTKPFELFVDEKQGYAKGVLTQKLGPWRRPVAYLSKKLDPVAAGWPPCLRMVAAIAVLRKDAGKLTMGQPLVILAPHAVEALVKQPPDRWLSNARMTHYQAMLLDTDRVQFGPVVALNPATLLPLPEEGAPHDCLEILAETHGTRPDLTDQPIPDADHTWYTDGSSFLQEGQRKAGAAVTTETEVIWARALPAGTSAQRAELIALTQALKMAEGKRLNVYTDSRYAFATAHIHGEIYRRRGWLTSEGREIKNKSEILALLKALFLPKRLSIIHCLGHQKGDSAEARGNRLADQAAREAAIKTPPDTSTLLAGKRTADGSEFEKRTADGSEFESPKKKAKVE

SEQ ID NO: 1919 - protein, 2096 aa, synthetic construct
  source 1..2096: note = Description of Artificial Sequence: Synthetic polypeptide
MPAAKRVKLDGGDKKYSIGLDIGTNSVGWAVITDEYKVPSKKFKVLGNTDRHSIKKNLIGALLFDSGETAEATRLKRTARRRYTRRKNRICYLQEIFSNEMAKVDDSFFHRLEESFLVEEDKKHERHPIFGNIVDEVAYHEKYPTIYHLRKKLVDSTDKADLRLIYLALAHMIKFRGHFLIEGDLNPDNSDVDKLFIQLVQTYNQLFEENPINASGVDAKAILSARLSKSRRLENLIAQLPGEKKNGLFGNLIALSLGLTPNFKSNFDLAEDAKLQLSKDTYDDDLDNLLAQIGDQYADLFLAAKNLSDAILLSDILRVNTEITKAPLSASMIKRYDEHHQDLTLLKALVRQQLPEKYKEIFFDQSKNGYAGYIDGGASQEEFYKFIKPILEKMDGTEELLVKLNREDLLRKQRTFDNGSIPHQIHLGELHAILRRQEDFYPFLKDNREKIEKILTFRIPYYVGPLARGNSRFAWMTRKSEETITPWNFEEVVDKGASAQSFIERMTNFDKNLPNEKVLPKHSLLYEYFTVYNELTKVKYVTEGMRKPAFLSGEQKKAIVDLLFKTNRKVTVKQLKEDYFKKIECFDSVEISGVEDRFNASLGTYHDLLKIIKDKDFLDNEENEDILEDIVLTLTLFEDREMIEERLKTYAHLFDDKVMKQLKRRRYTGWGRLSRKLINGIRDKQSGKTILDFLKSDGFANRNFMQLIHDDSLTFKEDIQKAQVSGQGDSLHEHIANLAGSPAIKKGILQTVKVVDELVKVMGRHKPENIVIEMARENQTTQKGQKNSRERMKRIEEGIKELGSQILKEHPVENTQLQNEKLYLYYLQNGRDMYVDQELDINRLSDYDVDHIVPQSFLKDDSIDNKVLTRSDKARGKSDNVPSEEVVKKMKNYWRQLLNAKLITQRKFDNLTKAERGGLSELDKAGFIKRQLVETRQITKHVAQILDSRMNTKYDENDKLIREVKVITLKSKLVSDFRKDFQFYKVREINNYHHAHDAYLNAVVGTALIKKYPKLESEFVYGDYKVYDVRKMIAKSEQEIGKATAKYFFYSNIMNFFKTEITLANGEIRKRPLIETNGETGEIVWDKGRDFATVRKVLSMPQVNIVKKTEVQTGGFSKESILPKRNSDKLIARKKDWDPKKYGGFDSPTVAYSVLVVAKVEKGKSKKLKSVKELLGITIMERSSFEKNPIDFLEAKGYKEVKKDLIIKLPKYSLFELENGRKRMLASAGELQKGNELALPSKYVNFLYLASHYEKLKGSPEDNEQKQLFVEQHKHYLDEIIEQISEFSKRVILADANLDKVLSAYNKHRDKPIREQAENIIHLFTLTNLGAPAAFKYFDTTIDRKRYTSTKEVLDATLIHQSITGLYETRIDLSQLGGDGGPAPEAAAKGSSGGTLNLEDEYRLYETSAEPEVSPGSTWLSDFPQAWAETGGMGLAVRQAPLIIPLKATSTPVSIKQYPMSQEAKLGIKPHIQRLLDQGILVPCQSPWNTPLLPVKKPGTNDYRPVQDLREVNKRVEDIHPTVPNPYNLLSGLPPSHRWYTVLDLKDAFFCLRLHPTSQPLFAFEWRDPGMGISGQLTWTRLPQGFKNSPTLFNEALHRDLADFRIQHPDLILLQYVDDILLAATSELDCQQGTRALLLTLGNLGYRASAKKAQLCQKQVKYLGYLLKEGQRWLTEARKETVMGQPTPKTPRQLREFLGKAGFCRLFIPGFAEMAAPLYPLTKPGTLFNWGPDQQKAYQEIKQALLTAPALGLPDLTKPFELFVDEKQGYAKGVLTQKLGPWRRPVAYLSKKLDPVAAGWPPCLRMVAAIAVLRKDAGKLTMGQPLVILAPHAVEALVKQPPDRWLSNARMTHYQAMLLDTDRVQFGPVVALNPATLLPLPEEGAPHDCLEILAETHGTRPDLTDQPIPDADHTWYTDGSSFLQEGQRKAGAAVTTETEVIWARALPAGTSAQRAELIALTQALKMAEGKRLNVYTDSRYAFATAHIHGEIYRRRGWLTSEGREIKNKSEILALLKALFLPKRLSIIHCLGHQKGDSAEARGNRLADQAAREAAIKTPPDTSTLLAGKRTADGSEFEKRTADGSEFESPKKKAKVE

SEQ ID NO: 1920 - protein, 2096 aa, synthetic construct
  source 1..2096: note = Description of Artificial Sequence: Synthetic polypeptide
MPAAKRVKLDGGDKKYSIGLDIGTNSVGWAVITDEYKVPSKKFKVLGNTDRHSIKKNLIGALLFDSGETAEATRLKRTARRRYTRRKNRICYLQEIFSNEMAKVDDSFFHRLEESFLVEEDKKHERHPIFGNIVDEVAYHEKYPTIYHLRKKLVDSTDKADLRLIYLALAHMIKFRGHFLIEGDLNPDNSDVDKLFIQLVQTYNQLFEENPINASGVDAKAILSARLSKSRRLENLIAQLPGEKKNGLFGNLIALSLGLTPNFKSNFDLAEDAKLQLSKDTYDDDLDNLLAQIGDQYADLFLAAKNLSDAILLSDILRVNTEITKAPLSASMIKRYDEHHQDLTLLKALVRQQLPEKYKEIFFDQSKNGYAGYIDGGASQEEFYKFIKPILEKMDGTEELLVKLNREDLLRKQRTFDNGSIPHQIHLGELHAILRRQEDFYPFLKDNREKIEKILTFRIPYYVGPLARGNSRFAWMTRKSEETITPWNFEEVVDKGASAQSFIERMTNFDKNLPNEKVLPKHSLLYEYFTVYNELTKVKYVTEGMRKPAFLSGEQKKAIVDLLFKTNRKVTVKQLKEDYFKKIECFDSVEISGVEDRFNASLGTYHDLLKIIKDKDFLDNEENEDILEDIVLTLTLFEDREMIEERLKTYAHLFDDKVMKQLKRRRYTGWGRLSRKLINGIRDKQSGKTILDFLKSDGFANRNFMQLIHDDSLTFKEDIQKAQVSGQGDSLHEHIANLAGSPAIKKGILQTVKVVDELVKVMGRHKPENIVIEMARENQTTQKGQKNSRERMKRIEEGIKELGSQILKEHPVENTQLQNEKLYLYYLQNGRDMYVDQELDINRLSDYDVDHIVPQSFLKDDSIDNKVLTRSDKARGKSDNVPSEEVVKKMKNYWRQLLNAKLITQRKFDNLTKAERGGLSELDKAGFIKRQLVETRQITKHVAQILDSRMNTKYDENDKLIREVKVITLKSKLVSDFRKDFQFYKVREINNYHHAHDAYLNAVVGTALIKKYPKLESEFVYGDYKVYDVRKMIAKSEQEIGKATAKYFFYSNIMNFFKTEITLANGEIRKRPLIETNGETGEIVWDKGRDFATVRKVLSMPQVNIVKKTEVQTGGFSKESILPKRNSDKLIARKKDWDPKKYGGFDSPTVAYSVLVVAKVEKGKSKKLKSVKELLGITIMERSSFEKNPIDFLEAKGYKEVKKDLIIKLPKYSLFELENGRKRMLASAGELQKGNELALPSKYVNFLYLASHYEKLKGSPEDNEQKQLFVEQHKHYLDEIIEQISEFSKRVILADANLDKVLSAYNKHRDKPIREQAENIIHLFTLTNLGAPAAFKYFDTTIDRKRYTSTKEVLDATLIHQSITGLYETRIDLSQLGGDGGGGGEAAAKGGSGGTLNLEDEYRLYETSAEPEVSPGSTWLSDFPQAWAETGGMGLAVRQAPLIIPLKATSTPVSIKQYPMSQEAKLGIKPHIQRLLDQGILVPCQSPWNTPLLPVKKPGTNDYRPVQDLREVNKRVEDIHPTVPNPYNLLSGLPPSHRWYTVLDLKDAFFCLRLHPTSQPLFAFEWRDPGMGISGQLTWTRLPQGFKNSPTLFNEALHRDLADFRIQHPDLILLQYVDDILLAATSELDCQQGTRALLLTLGNLGYRASAKKAQLCQKQVKYLGYLLKEGQRWLTEARKETVMGQPTPKTPRQLREFLGKAGFCRLFIPGFAEMAAPLYPLTKPGTLFNWGPDQQKAYQEIKQALLTAPALGLPDLTKPFELFVDEKQGYAKGVLTQKLGPWRRPVAYLSKKLDPVAAGWPPCLRMVAAIAVLRKDAGKLTMGQPLVILAPHAVEALVKQPPDRWLSNARMTHYQAMLLDTDRVQFGPVVALNPATLLPLPEEGAPHDCLEILAETHGTRPDLTDQPIPDADHTWYTDGSSFLQEGQRKAGAAVTTETEVIWARALPAGTSAQRAELIALTQALKMAEGKRLNVYTDSRYAFATAHIHGEIYRRRGWLTSEGREIKNKSEILALLKALFLPKRLSIIHCLGHQKGDSAEARGNRLADQAAREAAIKTPPDTSTLLAGKRTADGSEFEKRTADGSEFESPKKKAKVE

SEQ ID NO: 1921 - protein, 2096 aa, synthetic construct
  source 1..2096: note = Description of Artificial Sequence: Synthetic polypeptide
MPAAKRVKLDGGDKKYSIGLDIGTNSVGWAVITDEYKVPSKKFKVLGNTDRHSIKKNLIGALLFDSGETAEATRLKRTARRRYTRRKNRICYLQEIFSNEMAKVDDSFFHRLEESFLVEEDKKHERHPIFGNIVDEVAYHEKYPTIYHLRKKLVDSTDKADLRLIYLALAHMIKFRGHFLIEGDLNPDNSDVDKLFIQLVQTYNQLFEENPINASGVDAKAILSARLSKSRRLENLIAQLPGEKKNGLFGNLIALSLGLTPNFKSNFDLAEDAKLQLSKDTYDDDLDNLLAQIGDQYADLFLAAKNLSDAILLSDILRVNTEITKAPLSASMIKRYDEHHQDLTLLKALVRQQLPEKYKEIFFDQSKNGYAGYIDGGASQEEFYKFIKPILEKMDGTEELLVKLNREDLLRKQRTFDNGSIPHQIHLGELHAILRRQEDFYPFLKDNREKIEKILTFRIPYYVGPLARGNSRFAWMTRKSEETITPWNFEEVVDKGASAQSFIERMTNFDKNLPNEKVLPKHSLLYEYFTVYNELTKVKYVTEGMRKPAFLSGEQKKAIVDLLFKTNRKVTVKQLKEDYFKKIECFDSVEISGVEDRFNASLGTYHDLLKIIKDKDFLDNEENEDILEDIVLTLTLFEDREMIEERLKTYAHLFDDKVMKQLKRRRYTGWGRLSRKLINGIRDKQSGKTILDFLKSDGFANRNFMQLIHDDSLTFKEDIQKAQVSGQGDSLHEHIANLAGSPAIKKGILQTVKVVDELVKVMGRHKPENIVIEMARENQTTQKGQKNSRERMKRIEEGIKELGSQILKEHPVENTQLQNEKLYLYYLQNGRDMYVDQELDINRLSDYDVDHIVPQSFLKDDSIDNKVLTRSDKARGKSDNVPSEEVVKKMKNYWRQLLNAKLITQRKFDNLTKAERGGLSELDKAGFIKRQLVETRQITKHVAQILDSRMNTKYDENDKLIREVKVITLKSKLVSDFRKDFQFYKVREINNYHHAHDAYLNAVVGTALIKKYPKLESEFVYGDYKVYDVRKMIAKSEQEIGKATAKYFFYSNIMNFFKTEITLANGEIRKRPLIETNGETGEIVWDKGRDFATVRKVLSMPQVNIVKKTEVQTGGFSKESILPKRNSDKLIARKKDWDPKKYGGFDSPTVAYSVLVVAKVEKGKSKKLKSVKELLGITIMERSSFEKNPIDFLEAKGYKEVKKDLIIKLPKYSLFELENGRKRMLASAGELQKGNELALPSKYVNFLYLASHYEKLKGSPEDNEQKQLFVEQHKHYLDEIIEQISEFSKRVILADANLDKVLSAYNKHRDKPIREQAENIIHLFTLTNLGAPAAFKYFDTTIDRKRYTSTKEVLDATLIHQSITGLYETRIDLSQLGGDGGEAAAKGSSGGGGGTLNLEDEYRLYETSAEPEVSPGSTWLSDFPQAWAETGGMGLAVRQAPLIIPLKATSTPVSIKQYPMSQEAKLGIKPHIQRLLDQGILVPCQSPWNTPLLPVKKPGTNDYRPVQDLREVNKRVEDIHPTVPNPYNLLSGLPPSHRWYTVLDLKDAFFCLRLHPTSQPLFAFEWRDPGMGISGQLTWTRLPQGFKNSPTLFNEALHRDLADFRIQHPDLILLQYVDDILLAATSELDCQQGTRALLLTLGNLGYRASAKKAQLCQKQVKYLGYLLKEGQRWLTEARKETVMGQPTPKTPRQLREFLGKAGFCRLFIPGFAEMAAPLYPLTKPGTLFNWGPDQQKAYQEIKQALLTAPALGLPDLTKPFELFVDEKQGYAKGVLTQKLGPWRRPVAYLSKKLDPVAAGWPPCLRMVAAIAVLRKDAGKLTMGQPLVILAPHAVEALVKQPPDRWLSNARMTHYQAMLLDTDRVQFGPVVALNPATLLPLPEEGAPHDCLEILAETHGTRPDLTDQPIPDADHTWYTDGSSFLQEGQRKAGAAVTTETEVIWARALPAGTSAQRAELIALTQALKMAEGKRLNVYTDSRYAFATAHIHGEIYRRRGWLTSEGREIKNKSEILALLKALFLPKRLSIIHCLGHQKGDSAEARGNRLADQAAREAAIKTPPDTSTLLAGKRTADGSEFEKRTADGSEFESPKKKAKVE

SEQ ID NO: 1922 - protein, 2093 aa, synthetic construct
  source 1..2093: note = Description of Artificial Sequence: Synthetic polypeptide
MPAAKRVKLDGGDKKYSIGLDIGTNSVGWAVITDEYKVPSKKFKVLGNTDRHSIKKNLIGALLFDSGETAEATRLKRTARRRYTRRKNRICYLQEIFSNEMAKVDDSFFHRLEESFLVEEDKKHERHPIFGNIVDEVAYHEKYPTIYHLRKKLVDSTDKADLRLIYLALAHMIKFRGHFLIEGDLNPDNSDVDKLFIQLVQTYNQLFEENPINASGVDAKAILSARLSKSRRLENLIAQLPGEKKNGLFGNLIALSLGLTPNFKSNFDLAEDAKLQLSKDTYDDDLDNLLAQIGDQYADLFLAAKNLSDAILLSDILRVNTEITKAPLSASMIKRYDEHHQDLTLLKALVRQQLPEKYKEIFFDQSKNGYAGYIDGGASQEEFYKFIKPILEKMDGTEELLVKLNREDLLRKQRTFDNGSIPHQIHLGELHAILRRQEDFYPFLKDNREKIEKILTFRIPYYVGPLARGNSRFAWMTRKSEETITPWNFEEVVDKGASAQSFIERMTNFDKNLPNEKVLPKHSLLYEYFTVYNELTKVKYVTEGMRKPAFLSGEQKKAIVDLLFKTNRKVTVKQLKEDYFKKIECFDSVEISGVEDRFNASLGTYHDLLKIIKDKDFLDNEENEDILEDIVLTLTLFEDREMIEERLKTYAHLFDDKVMKQLKRRRYTGWGRLSRKLINGIRDKQSGKTILDFLKSDGFANRNFMQLIHDDSLTFKEDIQKAQVSGQGDSLHEHIANLAGSPAIKKGILQTVKVVDELVKVMGRHKPENIVIEMARENQTTQKGQKNSRERMKRIEEGIKELGSQILKEHPVENTQLQNEKLYLYYLQNGRDMYVDQELDINRLSDYDVDHIVPQSFLKDDSIDNKVLTRSDKARGKSDNVPSEEVVKKMKNYWRQLLNAKLITQRKFDNLTKAERGGLSELDKAGFIKRQLVETRQITKHVAQILDSRMNTKYDENDKLIREVKVITLKSKLVSDFRKDFQFYKVREINNYHHAHDAYLNAVVGTALIKKYPKLESEFVYGDYKVYDVRKMIAKSEQEIGKATAKYFFYSNIMNFFKTEITLANGEIRKRPLIETNGETGEIVWDKGRDFATVRKVLSMPQVNIVKKTEVQTGGFSKESILPKRNSDKLIARKKDWDPKKYGGFDSPTVAYSVLVVAKVEKGKSKKLKSVKELLGITIMERSSFEKNPIDFLEAKGYKEVKKDLIIKLPKYSLFELENGRKRMLASAGELQKGNELALPSKYVNFLYLASHYEKLKGSPEDNEQKQLFVEQHKHYLDEIIEQISEFSKRVILADANLDKVLSAYNKHRDKPIREQAENIIHLFTLTNLGAPAAFKYFDTTIDRKRYTSTKEVLDATLIHQSITGLYETRIDLSQLGGDGGGGSEAAAKGGTLNLEDEYRLYETSAEPEVSPGSTWLSDFPQAWAETGGMGLAVRQAPLIIPLKATSTPVSIKQYPMSQEAKLGIKPHIQRLLDQGILVPCQSPWNTPLLPVKKPGTNDYRPVQDLREVNKRVEDIHPTVPNPYNLLSGLPPSHRWYTVLDLKDAFFCLRLHPTSQPLFAFEWRDPGMGISGQLTWTRLPQGFKNSPTLFNEALHRDLADFRIQHPDLILLQYVDDILLAATSELDCQQGTRALLLTLGNLGYRASAKKAQLCQKQVKYLGYLLKEGQRWLTEARKETVMGQPTPKTPRQLREFLGKAGFCRLFIPGFAEMAAPLYPLTKPGTLFNWGPDQQKAYQEIKQALLTAPALGLPDLTKPFELFVDEKQGYAKGVLTQKLGPWRRPVAYLSKKLDPVAAGWPPCLRMVAAIAVLRKDAGKLTMGQPLVILAPHAVEALVKQPPDRWLSNARMTHYQAMLLDTDRVQFGPVVALNPATLLPLPEEGAPHDCLEILAETHGTRPDLTDQPIPDADHTWYTDGSSFLQEGQRKAGAAVTTETEVIWARALPAGTSAQRAELIALTQALKMAEGKRLNVYTDSRYAFATAHIHGEIYRRRGWLTSEGREIKNKSEILALLKALFLPKRLSIIHCLGHQKGDSAEARGNRLADQAAREAAIKTPPDTSTLLAGKRTADGSEFEKRTADGSEFESPKKKAKVE

SEQ ID NO: 1923 - protein, 2100 aa, synthetic construct
  source 1..2100: note = Description of Artificial Sequence: Synthetic polypeptide
MPAAKRVKLDGGDKKYSIGLDIGTNSVGWAVITDEYKVPSKKFKVLGNTDRHSIKKNLIGALLFDSGETAEATRLKRTARRRYTRRKNRICYLQEIFSNEMAKVDDSFFHRLEESFLVEEDKKHERHPIFGNIVDEVAYHEKYPTIYHLRKKLVDSTDKADLRLIYLALAHMIKFRGHFLIEGDLNPDNSDVDKLFIQLVQTYNQLFEENPINASGVDAKAILSARLSKSRRLENLIAQLPGEKKNGLFGNLIALSLGLTPNFKSNFDLAEDAKLQLSKDTYDDDLDNLLAQIGDQYADLFLAAKNLSDAILLSDILRVNTEITKAPLSASMIKRYDEHHQDLTLLKALVRQQLPEKYKEIFFDQSKNGYAGYIDGGASQEEFYKFIKPILEKMDGTEELLVKLNREDLLRKQRTFDNGSIPHQIHLGELHAILRRQEDFYPFLKDNREKIEKILTFRIPYYVGPLARGNSRFAWMTRKSEETITPWNFEEVVDKGASAQSFIERMTNFDKNLPNEKVLPKHSLLYEYFTVYNELTKVKYVTEGMRKPAFLSGEQKKAIVDLLFKTNRKVTVKQLKEDYFKKIECFDSVEISGVEDRFNASLGTYHDLLKIIKDKDFLDNEENEDILEDIVLTLTLFEDREMIEERLKTYAHLFDDKVMKQLKRRRYTGWGRLSRKLINGIRDKQSGKTILDFLKSDGFANRNFMQLIHDDSLTFKEDIQKAQVSGQGDSLHEHIANLAGSPAIKKGILQTVKVVDELVKVMGRHKPENIVIEMARENQTTQKGQKNSRERMKRIEEGIKELGSQILKEHPVENTQLQNEKLYLYYLQNGRDMYVDQELDINRLSDYDVDHIVPQSFLKDDSIDNKVLTRSDKARGKSDNVPSEEVVKKMKNYWRQLLNAKLITQRKFDNLTKAERGGLSELDKAGFIKRQLVETRQITKHVAQILDSRMNTKYDENDKLIREVKVITLKSKLVSDFRKDFQFYKVREINNYHHAHDAYLNAVVGTALIKKYPKLESEFVYGDYKVYDVRKMIAKSEQEIGKATAKYFFYSNIMNFFKTEITLANGEIRKRPLIETNGETGEIVWDKGRDFATVRKVLSMPQVNIVKKTEVQTGGFSKESILPKRNSDKLIARKKDWDPKKYGGFDSPTVAYSVLVVAKVEKGKSKKLKSVKELLGITIMERSSFEKNPIDFLEAKGYKEVKKDLIIKLPKYSLFELENGRKRMLASAGELQKGNELALPSKYVNFLYLASHYEKLKGSPEDNEQKQLFVEQHKHYLDEIIEQISEFSKRVILADANLDKVLSAYNKHRDKPIREQAENIIHLFTLTNLGAPAAFKYFDTTIDRKRYTSTKEVLDATLIHQSITGLYETRIDLSQLGGDGGGSSGSSGSSGSSGSSGGTLNLEDEYRLYETSAEPEVSPGSTWLSDFPQAWAETGGMGLAVRQAPLIIPLKATSTPVSIKQYPMSQEAKLGIKPHIQRLLDQGILVPCQSPWNTPLLPVKKPGTNDYRPVQDLREVNKRVEDIHPTVPNPYNLLSGLPPSHRWYTVLDLKDAFFCLRLHPTSQPLFAFEWRDPGMGISGQLTWTRLPQGFKNSPTLFNEALHRDLADFRIQHPDLILLQYVDDILLAATSELDCQQGTRALLLTLGNLGYRASAKKAQLCQKQVKYLGYLLKEGQRWLTEARKETVMGQPTPKTPRQLREFLGKAGFCRLFIPGFAEMAAPLYPLTKPGTLFNWGPDQQKAYQEIKQALLTAPALGLPDLTKPFELFVDEKQGYAKGVLTQKLGPWRRPVAYLSKKLDPVAAGWPPCLRMVAAIAVLRKDAGKLTMGQPLVILAPHAVEALVKQPPDRWLSNARMTHYQAMLLDTDRVQFGPVVALNPATLLPLPEEGAPHDCLEILAETHGTRPDLTDQPIPDADHTWYTDGSSFLQEGQRKAGAAVTTETEVIWARALPAGTSAQRAELIALTQALKMAEGKRLNVYTDSRYAFATAHIHGEIYRRRGWLTSEGREIKNKSEILALLKALFLPKRLSIIHCLGHQKGDSAEARGNRLADQAAREAAIKTPPDTSTLLAGKRTADGSEFEKRTADGSEFESPKKKAKVE

SEQ ID NO: 1924 - protein, 2096 aa, synthetic construct
  source 1..2096: note = Description of Artificial Sequence: Synthetic polypeptide
MPAAKRVKLDGGDKKYSIGLDIGTNSVGWAVITDEYKVPSKKFKVLGNTDRHSIKKNLIGALLFDSGETAEATRLKRTARRRYTRRKNRICYLQEIFSNEMAKVDDSFFHRLEESFLVEEDKKHERHPIFGNIVDEVAYHEKYPTIYHLRKKLVDSTDKADLRLIYLALAHMIKFRGHFLIEGDLNPDNSDVDKLFIQLVQTYNQLFEENPINASGVDAKAILSARLSKSRRLENLIAQLPGEKKNGLFGNLIALSLGLTPNFKSNFDLAEDAKLQLSKDTYDDDLDNLLAQIGDQYADLFLAAKNLSDAILLSDILRVNTEITKAPLSASMIKRYDEHHQDLTLLKALVRQQLPEKYKEIFFDQSKNGYAGYIDGGASQEEFYKFIKPILEKMDGTEELLVKLNREDLLRKQRTFDNGSIPHQIHLGELHAILRRQEDFYPFLKDNREKIEKILTFRIPYYVGPLARGNSRFAWMTRKSEETITPWNFEEVVDKGASAQSFIERMTNFDKNLPNEKVLPKHSLLYEYFTVYNELTKVKYVTEGMRKPAFLSGEQKKAIVDLLFKTNRKVTVKQLKEDYFKKIECFDSVEISGVEDRFNASLGTYHDLLKIIKDKDFLDNEENEDILEDIVLTLTLFEDREMIEERLKTYAHLFDDKVMKQLKRRRYTGWGRLSRKLINGIRDKQSGKTILDFLKSDGFANRNFMQLIHDDSLTFKEDIQKAQVSGQGDSLHEHIANLAGSPAIKKGILQTVKVVDELVKVMGRHKPENIVIEMARENQTTQKGQKNSRERMKRIEEGIKELGSQILKEHPVENTQLQNEKLYLYYLQNGRDMYVDQELDINRLSDYDVDHIVPQSFLKDDSIDNKVLTRSDKARGKSDNVPSEEVVKKMKNYWRQLLNAKLITQRKFDNLTKAERGGLSELDKAGFIKRQLVETRQITKHVAQILDSRMNTKYDENDKLIREVKVITLKSKLVSDFRKDFQFYKVREINNYHHAHDAYLNAVVGTALIKKYPKLESEFVYGDYKVYDVRKMIAKSEQEIGKATAKYFFYSNIMNFFKTEITLANGEIRKRPLIETNGETGEIVWDKGRDFATVRKVLSMPQVNIVKKTEVQTGGFSKESILPKRNSDKLIARKKDWDPKKYGGFDSPTVAYSVLVVAKVEKGKSKKLKSVKELLGITIMERSSFEKNPIDFLEAKGYKEVKKDLIIKLPKYSLFELENGRKRMLASAGELQKGNELALPSKYVNFLYLASHYEKLKGSPEDNEQKQLFVEQHKHYLDEIIEQISEFSKRVILADANLDKVLSAYNKHRDKPIREQAENIIHLFTLTNLGAPAAFKYFDTTIDRKRYTSTKEVLDATLIHQSITGLYETRIDLSQLGGDGGPAPAPAPAPAPGGTLNLEDEYRLYETSAEPEVSPGSTWLSDFPQAWAETGGMGLAVRQAPLIIPLKATSTPVSIKQYPMSQEAKLGIKPHIQRLLDQGILVPCQSPWNTPLLPVKKPGTNDYRPVQDLREVNKRVEDIHPTVPNPYNLLSGLPPSHRWYTVLDLKDAFFCLRLHPTSQPLFAFEWRDPGMGISGQLTWTRLPQGFKNSPTLFNEALHRDLADFRIQHPDLILLQYVDDILLAATSELDCQQGTRALLLTLGNLGYRASAKKAQLCQKQVKYLGYLLKEGQRWLTEARKETVMGQPTPKTPRQLREFLGKAGFCRLFIPGFAEMAAPLYPLTKPGTLFNWGPDQQKAYQEIKQALLTAPALGLPDLTKPFELFVDEKQGYAKGVLTQKLGPWRRPVAYLSKKLDPVAAGWPPCLRMVAAIAVLRKDAGKLTMGQPLVILAPHAVEALVKQPPDRWLSNARMTHYQAMLLDTDRVQFGPVVALNPATLLPLPEEGAPHDCLEILAETHGTRPDLTDQPIPDADHTWYTDGSSFLQEGQRKAGAAVTTETEVIWARALPAGTSAQRAELIALTQALKMAEGKRLNVYTDSRYAFATAHIHGEIYRRRGWLTSEGREIKNKSEILALLKALFLPKRLSIIHCLGHQKGDSAEARGNRLADQAAREAAIKTPPDTSTLLAGKRTADGSEFEKRTADGSEFESPKKKAKVE

SEQ ID NO: 1925 - protein, 2094 aa, synthetic construct
  source 1..2094: note = Description of Artificial Sequence: Synthetic polypeptide
MPAAKRVKLDGGDKKYSIGLDIGTNSVGWAVITDEYKVPSKKFKVLGNTDRHSIKKNLIGALLFDSGETAEATRLKRTARRRYTRRKNRICYLQEIFSNEMAKVDDSFFHRLEESFLVEEDKKHERHPIFGNIVDEVAYHEKYPTIYHLRKKLVDSTDKADLRLIYLALAHMIKFRGHFLIEGDLNPDNSDVDKLFIQLVQTYNQLFEENPINASGVDAKAILSARLSKSRRLENLIAQLPGEKKNGLFGNLIALSLGLTPNFKSNFDLAEDAKLQLSKDTYDDDLDNLLAQIGDQYADLFLAAKNLSDAILLSDILRVNTEITKAPLSASMIKRYDEHHQDLTLLKALVRQQLPEKYKEIFFDQSKNGYAGYIDGGASQEEFYKFIKPILEKMDGTEELLVKLNREDLLRKQRTFDNGSIPHQIHLGELHAILRRQEDFYPFLKDNREKIEKILTFRIPYYVGPLARGNSRFAWMTRKSEETITPWNFEEVVDKGASAQSFIERMTNFDKNLPNEKVLPKHSLLYEYFTVYNELTKVKYVTEGMRKPAFLSGEQKKAIVDLLFKTNRKVTVKQLKEDYFKKIECFDSVEISGVEDRFNASLGTYHDLLKIIKDKDFLDNEENEDILEDIVLTLTLFEDREMIEERLKTYAHLFDDKVMKQLKRRRYTGWGRLSRKLINGIRDKQSGKTILDFLKSDGFANRNFMQLIHDDSLTFKEDIQKAQVSGQGDSLHEHIANLAGSPAIKKGILQTVKVVDELVKVMGRHKPENIVIEMARENQTTQKGQKNSRERMKRIEEGIKELGSQILKEHPVENTQLQNEKLYLYYLQNGRDMYVDQELDINRLSDYDVDHIVPQSFLKDDSIDNKVLTRSDKARGKSDNVPSEEVVKKMKNYWRQLLNAKLITQRKFDNLTKAERGGLSELDKAGFIKRQLVETRQITKHVAQILDSRMNTKYDENDKLIREVKVITLKSKLVSDFRKDFQFYKVREINNYHHAHDAYLNAVVGTALIKKYPKLESEFVYGDYKVYDVRKMIAKSEQEIGKATAKYFFYSNIMNFFKTEITLANGEIRKRPLIETNGETGEIVWDKGRDFATVRKVLSMPQVNIVKKTEVQTGGFSKESILPKRNSDKLIARKKDWDPKKYGGFDSPTVAYSVLVVAKVEKGKSKKLKSVKELLGITIMERSSFEKNPIDFLEAKGYKEVKKDLIIKLPKYSLFELENGRKRMLASAGELQKGNELALPSKYVNFLYLASHYEKLKGSPEDNEQKQLFVEQHKHYLDEIIEQISEFSKRVILADANLDKVLSAYNKHRDKPIREQAENIIHLFTLTNLGAPAAFKYFDTTIDRKRYTSTKEVLDATLIHQSITGLYETRIDLSQLGGDGGGSSGSSGSSGGTLNLEDEYRLYETSAEPEVSPGSTWLSDFPQAWAETGGMGLAVRQAPLIIPLKATSTPVSIKQYPMSQEAKLGIKPHIQRLLDQGILVPCQSPWNTPLLPVKKPGTNDYRPVQDLREVNKRVEDIHPTVPNPYNLLSGLPPSHRWYTVLDLKDAFFCLRLHPTSQPLFAFEWRDPGMGISGQLTWTRLPQGFKNSPTLFNEALHRDLADFRIQHPDLILLQYVDDILLAATSELDCQQGTRALLLTLGNLGYRASAKKAQLCQKQVKYLGYLLKEGQRWLTEARKETVMGQPTPKTPRQLREFLGKAGFCRLFIPGFAEMAAPLYPLTKPGTLFNWGPDQQKAYQEIKQALLTAPALGLPDLTKPFELFVDEKQGYAKGVLTQKLGPWRRPVAYLSKKLDPVAAGWPPCLRMVAAIAVLRKDAGKLTMGQPLVILAPHAVEALVKQPPDRWLSNARMTHYQAMLLDTDRVQFGPVVALNPATLLPLPEEGAPHDCLEILAETHGTRPDLTDQPIPDADHTWYTDGSSFLQEGQRKAGAAVTTETEVIWARALPAGTSAQRAELIALTQALKMAEGKRLNVYTDSRYAFATAHIHGEIYRRRGWLTSEGREIKNKSEILALLKALFLPKRLSIIHCLGHQKGDSAEARGNRLADQAAREAAIKTPPDTSTLLAGKRTADGSEFEKRTADGSEFESPKKKAKVE

SEQ ID NO: 1926 - protein, 2094 aa, synthetic construct
  source 1..2094: note = Description of Artificial Sequence: Synthetic polypeptide
MPAAKRVKLDGGDKKYSIGLDIGTNSVGWAVITDEYKVPSKKFKVLGNTDRHSIKKNLIGALLFDSGETAEATRLKRTARRRYTRRKNRICYLQEIFSNEMAKVDDSFFHRLEESFLVEEDKKHERHPIFGNIVDEVAYHEKYPTIYHLRKKLVDSTDKADLRLIYLALAHMIKFRGHFLIEGDLNPDNSDVDKLFIQLVQTYNQLFEENPINASGVDAKAILSARLSKSRRLENLIAQLPGEKKNGLFGNLIALSLGLTPNFKSNFDLAEDAKLQLSKDTYDDDLDNLLAQIGDQYADLFLAAKNLSDAILLSDILRVNTEITKAPLSASMIKRYDEHHQDLTLLKALVRQQLPEKYKEIFFDQSKNGYAGYIDGGASQEEFYKFIKPILEKMDGTEELLVKLNREDLLRKQRTFDNGSIPHQIHLGELHAILRRQEDFYPFLKDNREKIEKILTFRIPYYVGPLARGNSRFAWMTRKSEETITPWNFEEVVDKGASAQSFIERMTNFDKNLPNEKVLPKHSLLYEYFTVYNELTKVKYVTEGMRKPAFLSGEQKKAIVDLLFKTNRKVTVKQLKEDYFKKIECFDSVEISGVEDRFNASLGTYHDLLKIIKDKDFLDNEENEDILEDIVLTLTLFEDREMIEERLKTYAHLFDDKVMKQLKRRRYTGWGRLSRKLINGIRDKQSGKTILDFLKSDGFANRNFMQLIHDDSLTFKEDIQKAQVSGQGDSLHEHIANLAGSPAIKKGILQTVKVVDELVKVMGRHKPENIVIEMARENQTTQKGQKNSRERMKRIEEGIKELGSQILKEHPVENTQLQNEKLYLYYLQNGRDMYVDQELDINRLSDYDVDHIVPQSFLKDDSIDNKVLTRSDKARGKSDNVPSEEVVKKMKNYWRQLLNAKLITQRKFDNLTKAERGGLSELDKAGFIKRQLVETRQITKHVAQILDSRMNTKYDENDKLIREVKVITLKSKLVSDFRKDFQFYKVREINNYHHAHDAYLNAVVGTALIKKYPKLESEFVYGDYKVYDVRKMIAKSEQEIGKATAKYFFYSNIMNFFKTEITLANGEIRKRPLIETNGETGEIVWDKGRDFATVRKVLSMPQVNIVKKTEVQTGGFSKESILPKRNSDKLIARKKDWDPKKYGGFDSPTVAYSVLVVAKVEKGKSKKLKSVKELLGITIMERSSFEKNPIDFLEAKGYKEVKKDLIIKLPKYSLFELENGRKRMLASAGELQKGNELALPSKYVNFLYLASHYEKLKGSPEDNEQKQLFVEQHKHYLDEIIEQISEFSKRVILADANLDKVLSAYNKHRDKPIREQAENIIHLFTLTNLGAPAAFKYFDTTIDRKRYTSTKEVLDATLIHQSITGLYETRIDLSQLGGDGGGSSGGSPAPGGTLNLEDEYRLYETSAEPEVSPGSTWLSDFPQAWAETGGMGLAVRQAPLIIPLKATSTPVSIKQYPMSQEAKLGIKPHIQRLLDQGILVPCQSPWNTPLLPVKKPGTNDYRPVQDLREVNKRVEDIHPTVPNPYNLLSGLPPSHRWYTVLDLKDAFFCLRLHPTSQPLFAFEWRDPGMGISGQLTWTRLPQGFKNSPTLFNEALHRDLADFRIQHPDLILLQYVDDILLAATSELDCQQGTRALLLTLGNLGYRASAKKAQLCQKQVKYLGYLLKEGQRWLTEARKETVMGQPTPKTPRQLREFLGKAGFCRLFIPGFAEMAAPLYPLTKPGTLFNWGPDQQKAYQEIKQALLTAPALGLPDLTKPFELFVDEKQGYAKGVLTQKLGPWRRPVAYLSKKLDPVAAGWPPCLRMVAAIAVLRKDAGKLTMGQPLVILAPHAVEALVKQPPDRWLSNARMTHYQAMLLDTDRVQFGPVVALNPATLLPLPEEGAPHDCLEILAETHGTRPDLTDQPIPDADHTWYTDGSSFLQEGQRKAGAAVTTETEVIWARALPAGTSAQRAELIALTQALKMAEGKRLNVYTDSRYAFATAHIHGEIYRRRGWLTSEGREIKNKSEILALLKALFLPKRLSIIHCLGHQKGDSAEARGNRLADQAAREAAIKTPPDTSTLLAGKRTADGSEFEKRTADGSEFESPKKKAKVE

SEQ ID NO: 1927 - protein, 2091 aa, synthetic construct
  source 1..2091: note = Description of Artificial Sequence: Synthetic polypeptide
MPAAKRVKLDGGDKKYSIGLDIGTNSVGWAVITDEYKVPSKKFKVLGNTDRHSIKKNLIGALLFDSGETAEATRLKRTARRRYTRRKNRICYLQEIFSNEMAKVDDSFFHRLEESFLVEEDKKHERHPIFGNIVDEVAYHEKYPTIYHLRKKLVDSTDKADLRLIYLALAHMIKFRGHFLIEGDLNPDNSDVDKLFIQLVQTYNQLFEENPINASGVDAKAILSARLSKSRRLENLIAQLPGEKKNGLFGNLIALSLGLTPNFKSNFDLAEDAKLQLSKDTYDDDLDNLLAQIGDQYADLFLAAKNLSDAILLSDILRVNTEITKAPLSASMIKRYDEHHQDLTLLKALVRQQLPEKYKEIFFDQSKNGYAGYIDGGASQEEFYKFIKPILEKMDGTEELLVKLNREDLLRKQRTFDNGSIPHQIHLGELHAILRRQEDFYPFLKDNREKIEKILTFRIPYYVGPLARGNSRFAWMTRKSEETITPWNFEEVVDKGASAQSFIERMTNFDKNLPNEKVLPKHSLLYEYFTVYNELTKVKYVTEGMRKPAFLSGEQKKAIVDLLFKTNRKVTVKQLKEDYFKKIECFDSVEISGVEDRFNASLGTYHDLLKIIKDKDFLDNEENEDILEDIVLTLTLFEDREMIEERLKTYAHLFDDKVMKQLKRRRYTGWGRLSRKLINGIRDKQSGKTILDFLKSDGFANRNFMQLIHDDSLTFKEDIQKAQVSGQGDSLHEHIANLAGSPAIKKGILQTVKVVDELVKVMGRHKPENIVIEMARENQTTQKGQKNSRERMKRIEEGIKELGSQILKEHPVENTQLQNEKLYLYYLQNGRDMYVDQELDINRLSDYDVDHIVPQSFLKDDSIDNKVLTRSDKARGKSDNVPSEEVVKKMKNYWRQLLNAKLITQRKFDNLTKAERGGLSELDKAGFIKRQLVETRQITKHVAQILDSRMNTKYDENDKLIREVKVITLKSKLVSDFRKDFQFYKVREINNYHHAHDAYLNAVVGTALIKKYPKLESEFVYGDYKVYDVRKMIAKSEQEIGKATAKYFFYSNIMNFFKTEITLANGEIRKRPLIETNGETGEIVWDKGRDFATVRKVLSMPQVNIVKKTEVQTGGFSKESILPKRNSDKLIARKKDWDPKKYGGFDSPTVAYSVLVVAKVEKGKSKKLKSVKELLGITIMERSSFEKNPIDFLEAKGYKEVKKDLIIKLPKYSLFELENGRKRMLASAGELQKGNELALPSKYVNFLYLASHYEKLKGSPEDNEQKQLFVEQHKHYLDEIIEQISEFSKRVILADANLDKVLSAYNKHRDKPIREQAENIIHLFTLTNLGAPAAFKYFDTTIDRKRYTSTKEVLDATLIHQSITGLYETRIDLSQLGGDGGGSSGSSGGTLNLEDEYRLYETSAEPEVSPGSTWLSDFPQAWAETGGMGLAVRQAPLIIPLKATSTPVSIKQYPMSQEAKLGIKPHIQRLLDQGILVPCQSPWNTPLLPVKKPGTNDYRPVQDLREVNKRVEDIHPTVPNPYNLLSGLPPSHRWYTVLDLKDAFFCLRLHPTSQPLFAFEWRDPGMGISGQLTWTRLPQGFKNSPTLFNEALHRDLADFRIQHPDLILLQYVDDILLAATSELDCQQGTRALLLTLGNLGYRASAKKAQLCQKQVKYLGYLLKEGQRWLTEARKETVMGQPTPKTPRQLREFLGKAGFCRLFIPGFAEMAAPLYPLTKPGTLFNWGPDQQKAYQEIKQALLTAPALGLPDLTKPFELFVDEKQGYAKGVLTQKLGPWRRPVAYLSKKLDPVAAGWPPCLRMVAAIAVLRKDAGKLTMGQPLVILAPHAVEALVKQPPDRWLSNARMTHYQAMLLDTDRVQFGPVVALNPATLLPLPEEGAPHDCLEILAETHGTRPDLTDQPIPDADHTWYTDGSSFLQEGQRKAGAAVTTETEVIWARALPAGTSAQRAELIALTQALKMAEGKRLNVYTDSRYAFATAHIHGEIYRRRGWLTSEGREIKNKSEILALLKALFLPKRLSIIHCLGHQKGDSAEARGNRLADQAAREAAIKTPPDTSTLLAGKRTADGSEFEKRTADGSEFESPKKKAKVE

SEQ ID NO: 1928 - protein, 2091 aa, synthetic construct
  source 1..2091: note = Description of Artificial Sequence: Synthetic polypeptide
MPAAKRVKLDGGDKKYSIGLDIGTNSVGWAVITDEYKVPSKKFKVLGNTDRHSIKKNLIGALLFDSGETAEATRLKRTARRRYTRRKNRICYLQEIFSNEMAKVDDSFFHRLEESFLVEEDKKHERHPIFGNIVDEVAYHEKYPTIYHLRKKLVDSTDKADLRLIYLALAHMIKFRGHFLIEGDLNPDNSDVDKLFIQLVQTYNQLFEENPINASGVDAKAILSARLSKSRRLENLIAQLPGEKKNGLFGNLIALSLGLTPNFKSNFDLAEDAKLQLSKDTYDDDLDNLLAQIGDQYADLFLAAKNLSDAILLSDILRVNTEITKAPLSASMIKRYDEHHQDLTLLKALVRQQLPEKYKEIFFDQSKNGYAGYIDGGASQEEFYKFIKPILEKMDGTEELLVKLNREDLLRKQRTFDNGSIPHQIHLGELHAILRRQEDFYPFLKDNREKIEKILTFRIPYYVGPLARGNSRFAWMTRKSEETITPWNFEEVVDKGASAQSFIERMTNFDKNLPNEKVLPKHSLLYEYFTVYNELTKVKYVTEGMRKPAFLSGEQKKAIVDLLFKTNRKVTVKQLKEDYFKKIECFDSVEISGVEDRFNASLGTYHDLLKIIKDKDFLDNEENEDILEDIVLTLTLFEDREMIEERLKTYAHLFDDKVMKQLKRRRYTGWGRLSRKLINGIRDKQSGKTILDFLKSDGFANRNFMQLIHDDSLTFKEDIQKAQVSGQGDSLHEHIANLAGSPAIKKGILQTVKVVDELVKVMGRHKPENIVIEMARENQTTQKGQKNSRERMKRIEEGIKELGSQILKEHPVENTQLQNEKLYLYYLQNGRDMYVDQELDINRLSDYDVDHIVPQSFLKDDSIDNKVLTRSDKARGKSDNVPSEEVVKKMKNYWRQLLNAKLITQRKFDNLTKAERGGLSELDKAGFIKRQLVETRQITKHVAQILDSRMNTKYDENDKLIREVKVITLKSKLVSDFRKDFQFYKVREINNYHHAHDAYLNAVVGTALIKKYPKLESEFVYGDYKVYDVRKMIAKSEQEIGKATAKYFFYSNIMNFFKTEITLANGEIRKRPLIETNGETGEIVWDKGRDFATVRKVLSMPQVNIVKKTEVQTGGFSKESILPKRNSDKLIARKKDWDPKKYGGFDSPTVAYSVLVVAKVEKGKSKKLKSVKELLGITIMERSSFEKNPIDFLEAKGYKEVKKDLIIKLPKYSLFELENGRKRMLASAGELQKGNELALPSKYVNFLYLASHYEKLKGSPEDNEQKQLFVEQHKHYLDEIIEQISEFSKRVILADANLDKVLSAYNKHRDKPIREQAENIIHLFTLTNLGAPAAFKYFDTTIDRKRYTSTKEVLDATLIHQSITGLYETRIDLSQLGGDGGGGGGGSGGTLNLEDEYRLYETSAEPEVSPGSTWLSDFPQAWAETGGMGLAVRQAPLIIPLKATSTPVSIKQYPMSQEAKLGIKPHIQRLLDQGILVPCQSPWNTPLLPVKKPGTNDYRPVQDLREVNKRVEDIHPTVPNPYNLLSGLPPSHRWYTVLDLKDAFFCLRLHPTSQPLFAFEWRDPGMGISGQLTWTRLPQGFKNSPTLFNEALHRDLADFRIQHPDLILLQYVDDILLAATSELDCQQGTRALLLTLGNLGYRASAKKAQLCQKQVKYLGYLLKEGQRWLTEARKETVMGQPTPKTPRQLREFLGKAGFCRLFIPGFAEMAAPLYPLTKPGTLFNWGPDQQKAYQEIKQALLTAPALGLPDLTKPFELFVDEKQGYAKGVLTQKLGPWRRPVAYLSKKLDPVAAGWPPCLRMVAAIAVLRKDAGKLTMGQPLVILAPHAVEALVKQPPDRWLSNARMTHYQAMLLDTDRVQFGPVVALNPATLLPLPEEGAPHDCLEILAETHGTRPDLTDQPIPDADHTWYTDGSSFLQEGQRKAGAAVTTETEVIWARALPAGTSAQRAELIALTQALKMAEGKRLNVYTDSRYAFATAHIHGEIYRRRGWLTSEGREIKNKSEILALLKALFLPKRLSIIHCLGHQKGDSAEARGNRLADQAAREAAIKTPPDTSTLLAGKRTADGSEFEKRTADGSEFESPKKKAKVE

SEQ ID NO: 1929 - protein, 2096 aa, synthetic construct
  source 1..2096: note = Description of Artificial Sequence: Synthetic polypeptide
MPAAKRVKLDGGDKKYSIGLDIGTNSVGWAVITDEYKVPSKKFKVLGNTDRHSIKKNLIGALLFDSGETAEATRLKRTARRRYTRRKNRICYLQEIFSNEMAKVDDSFFHRLEESFLVEEDKKHERHPIFGNIVDEVAYHEKYPTIYHLRKKLVDSTDKADLRLIYLALAHMIKFRGHFLIEGDLNPDNSDVDKLFIQLVQTYNQLFEENPINASGVDAKAILSARLSKSRRLENLIAQLPGEKKNGLFGNLIALSLGLTPNFKSNFDLAEDAKLQLSKDTYDDDLDNLLAQIGDQYADLFLAAKNLSDAILLSDILRVNTEITKAPLSASMIKRYDEHHQDLTLLKALVRQQLPEKYKEIFFDQSKNGYAGYIDGGASQEEFYKFIKPILEKMDGTEELLVKLNREDLLRKQRTFDNGSIPHQIHLGELHAILRRQEDFYPFLKDNREKIEKILTFRIPYYVGPLARGNSRFAWMTRKSEETITPWNFEEVVDKGASAQSFIERMTNFDKNLPNEKVLPKHSLLYEYFTVYNELTKVKYVTEGMRKPAFLSGEQKKAIVDLLFKTNRKVTVKQLKEDYFKKIECFDSVEISGVEDRFNASLGTYHDLLKIIKDKDFLDNEENEDILEDIVLTLTLFEDREMIEERLKTYAHLFDDKVMKQLKRRRYTGWGRLSRKLINGIRDKQSGKTILDFLKSDGFANRNFMQLIHDDSLTFKEDIQKAQVSGQGDSLHEHIANLAGSPAIKKGILQTVKVVDELVKVMGRHKPENIVIEMARENQTTQKGQKNSRERMKRIEEGIKELGSQILKEHPVENTQLQNEKLYLYYLQNGRDMYVDQELDINRLSDYDVDHIVPQSFLKDDSIDNKVLTRSDKARGKSDNVPSEEVVKKMKNYWRQLLNAKLITQRKFDNLTKAERGGLSELDKAGFIKRQLVETRQITKHVAQILDSRMNTKYDENDKLIREVKVITLKSKLVSDFRKDFQFYKVREINNYHHAHDAYLNAVVGTALIKKYPKLESEFVYGDYKVYDVRKMIAKSEQEIGKATAKYFFYSNIMNFFKTEITLANGEIRKRPLIETNGETGEIVWDKGRDFATVRKVLSMPQVNIVKKTEVQTGGFSKESILPKRNSDKLIARKKDWDPKKYGGFDSPTVAYSVLVVAKVEKGKSKKLKSVKELLGITIMERSSFEKNPIDFLEAKGYKEVKKDLIIKLPKYSLFELENGRKRMLASAGELQKGNELALPSKYVNFLYLASHYEKLKGSPEDNEQKQLFVEQHKHYLDEIIEQISEFSKRVILADANLDKVLSAYNKHRDKPIREQAENIIHLFTLTNLGAPAAFKYFDTTIDRKRYTSTKEVLDATLIHQSITGLYETRIDLSQLGGDGGGGGPAPEAAAKGGTLNLEDEYRLYETSAEPEVSPGSTWLSDFPQAWAETGGMGLAVRQAPLIIPLKATSTPVSIKQYPMSQEAKLGIKPHIQRLLDQGILVPCQSPWNTPLLPVKKPGTNDYRPVQDLREVNKRVEDIHPTVPNPYNLLSGLPPSHRWYTVLDLKDAFFCLRLHPTSQPLFAFEWRDPGMGISGQLTWTRLPQGFKNSPTLFNEALHRDLADFRIQHPDLILLQYVDDILLAATSELDCQQGTRALLLTLGNLGYRASAKKAQLCQKQVKYLGYLLKEGQRWLTEARKETVMGQPTPKTPRQLREFLGKAGFCRLFIPGFAEMAAPLYPLTKPGTLFNWGPDQQKAYQEIKQALLTAPALGLPDLTKPFELFVDEKQGYAKGVLTQKLGPWRRPVAYLSKKLDPVAAGWPPCLRMVAAIAVLRKDAGKLTMGQPLVILAPHAVEALVKQPPDRWLSNARMTHYQAMLLDTDRVQFGPVVALNPATLLPLPEEGAPHDCLEILAETHGTRPDLTDQPIPDADHTWYTDGSSFLQEGQRKAGAAVTTETEVIWARALPAGTSAQRAELIALTQALKMAEGKRLNVYTDSRYAFATAHIHGEIYRRRGWLTSEGREIKNKSEILALLKALFLPKRLSIIHCLGHQKGDSAEARGNRLADQAAREAAIKTPPDTSTLLAGKRTADGSEFEKRTADGSEFESPKKKAKVE

SEQ ID NO: 1930 - protein, 2091 aa, synthetic construct
  source 1..2091: note = Description of Artificial Sequence: Synthetic polypeptide
MPAAKRVKLDGGDKKYSIGLDIGTNSVGWAVITDEYKVPSKKFKVLGNTDRHSIKKNLIGALLFDSGETAEATRLKRTARRRYTRRKNRICYLQEIFSNEMAKVDDSFFHRLEESFLVEEDKKHERHPIFGNIVDEVAYHEKYPTIYHLRKKLVDSTDKADLRLIYLALAHMIKFRGHFLIEGDLNPDNSDVDKLFIQLVQTYNQLFEENPINASGVDAKAILSARLSKSRRLENLIAQLPGEKKNGLFGNLIALSLGLTPNFKSNFDLAEDAKLQLSKDTYDDDLDNLLAQIGDQYADLFLAAKNLSDAILLSDILRVNTEITKAPLSASMIKRYDEHHQDLTLLKALVRQQLPEKYKEIFFDQSKNGYAGYIDGGASQEEFYKFIKPILEKMDGTEELLVKLNREDLLRKQRTFDNGSIPHQIHLGELHAILRRQEDFYPFLKDNREKIEKILTFRIPYYVGPLARGNSRFAWMTRKSEETITPWNFEEVVDKGASAQSFIERMTNFDKNLPNEKVLPKHSLLYEYFTVYNELTKVKYVTEGMRKPAFLSGEQKKAIVDLLFKTNRKVTVKQLKEDYFKKIECFDSVEISGVEDRFNASLGTYHDLLKIIKDKDFLDNEENEDILEDIVLTLTLFEDREMIEERLKTYAHLFDDKVMKQLKRRRYTGWGRLSRKLINGIRDKQSGKTILDFLKSDGFANRNFMQLIHDDSLTFKEDIQKAQVSGQGDSLHEHIANLAGSPAIKKGILQTVKVVDELVKVMGRHKPENIVIEMARENQTTQKGQKNSRERMKRIEEGIKELGSQILKEHPVENTQLQNEKLYLYYLQNGRDMYVDQELDINRLSDYDVDHIVPQSFLKDDSIDNKVLTRSDKARGKSDNVPSEEVVKKMKNYWRQLLNAKLITQRKFDNLTKAERGGLSELDKAGFIKRQLVETRQITKHVAQILDSRMNTKYDENDKLIREVKVITLKSKLVSDFRKDFQFYKVREINNYHHAHDAYLNAVVGTALIKKYPKLESEFVYGDYKVYDVRKMIAKSEQEIGKATAKYFFYSNIMNFFKTEITLANGEIRKRPLIETNGETGEIVWDKGRDFATVRKVLSMPQVNIVKKTEVQTGGFSKESILPKRNSDKLIARKKDWDPKKYGGFDSPTVAYSVLVVAKVEKGKSKKLKSVKELLGITIMERSSFEKNPIDFLEAKGYKEVKKDLIIKLPKYSLFELENGRKRMLASAGELQKGNELALPSKYVNFLYLASHYEKLKGSPEDNEQKQLFVEQHKHYLDEIIEQISEFSKRVILADANLDKVLSAYNKHRDKPIREQAENIIHLFTLTNLGAPAAFKYFDTTIDRKRYTSTKEVLDATLIHQSITGLYETRIDLSQLGGDGGGGGGSSGGTLNLEDEYRLYETSAEPEVSPGSTWLSDFPQAWAETGGMGLAVRQAPLIIPLKATSTPVSIKQYPMSQEAKLGIKPHIQRLLDQGILVPCQSPWNTPLLPVKKPGTNDYRPVQDLREVNKRVEDIHPTVPNPYNLLSGLPPSHRWYTVLDLKDAFFCLRLHPTSQPLFAFEWRDPGMGISGQLTWTRLPQGFKNSPTLFNEALHRDLADFRIQHPDLILLQYVDDILLAATSELDCQQGTRALLLTLGNLGYRASAKKAQLCQKQVKYLGYLLKEGQRWLTEARKETVMGQPTPKTPRQLREFLGKAGFCRLFIPGFAEMAAPLYPLTKPGTLFNWGPDQQKAYQEIKQALLTAPALGLPDLTKPFELFVDEKQGYAKGVLTQKLGPWRRPVAYLSKKLDPVAAGWPPCLRMVAAIAVLRKDAGKLTMGQPLVILAPHAVEALVKQPPDRWLSNARMTHYQAMLLDTDRVQFGPVVALNPATLLPLPEEGAPHDCLEILAETHGTRPDLTDQPIPDADHTWYTDGSSFLQEGQRKAGAAVTTETEVIWARALPAGTSAQRAELIALTQALKMAEGKRLNVYTDSRYAFATAHIHGEIYRRRGWLTSEGREIKNKSEILALLKALFLPKRLSIIHCLGHQKGDSAEARGNRLADQAAREAAIKTPPDTSTLLAGKRTADGSEFEKRTADGSEFESPKKKAKVE

SEQ ID NO: 1931 - protein, 2091 aa, synthetic construct
  source 1..2091: note = Description of Artificial Sequence: Synthetic polypeptide
MPAAKRVKLDGGDKKYSIGLDIGTNSVGWAVITDEYKVPSKKFKVLGNTDRHSIKKNLIGALLFDSGETAEATRLKRTARRRYTRRKNRICYLQEIFSNEMAKVDDSFFHRLEESFLVEEDKKHERHPIFGNIVDEVAYHEKYPTIYHLRKKLVDSTDKADLRLIYLALAHMIKFRGHFLIEGDLNPDNSDVDKLFIQLVQTYNQLFEENPINASGVDAKAILSARLSKSRRLENLIAQLPGEKKNGLFGNLIALSLGLTPNFKSNFDLAEDAKLQLSKDTYDDDLDNLLAQIGDQYADLFLAAKNLSDAILLSDILRVNTEITKAPLSASMIKRYDEHHQDLTLLKALVRQQLPEKYKEIFFDQSKNGYAGYIDGGASQEEFYKFIKPILEKMDGTEELLVKLNREDLLRKQRTFDNGSIPHQIHLGELHAILRRQEDFYPFLKDNREKIEKILTFRIPYYVGPLARGNSRFAWMTRKSEETITPWNFEEVVDKGASAQSFIERMTNFDKNLPNEKVLPKHSLLYEYFTVYNELTKVKYVTEGMRKPAFLSGEQKKAIVDLLFKTNRKVTVKQLKEDYFKKIECFDSVEISGVEDRFNASLGTYHDLLKIIKDKDFLDNEENEDILEDIVLTLTLFEDREMIEERLKTYAHLFDDKVMKQLKRRRYTGWGRLSRKLINGIRDKQSGKTILDFLKSDGFANRNFMQLIHDDSLTFKEDIQKAQVSGQGDSLHEHIANLAGSPAIKKGILQTVKVVDELVKVMGRHKPENIVIEMARENQTTQKGQKNSRERMKRIEEGIKELGSQILKEHPVENTQLQNEKLYLYYLQNGRDMYVDQELDINRLSDYDVDHIVPQSFLKDDSIDNKVLTRSDKARGKSDNVPSEEVVKKMKNYWRQLLNAKLITQRKFDNLTKAERGGLSELDKAGFIKRQLVETRQITKHVAQILDSRMNTKYDENDKLIREVKVITLKSKLVSDFRKDFQFYKVREINNYHHAHDAYLNAVVGTALIKKYPKLESEFVYGDYKVYDVRKMIAKSEQEIGKATAKYFFYSNIMNFFKTEITLANGEIRKRPLIETNGETGEIVWDKGRDFATVRKVLSMPQVNIVKKTEVQTGGFSKESILPKRNSDKLIARKKDWDPKKYGGFDSPTVAYSVLVVAKVEKGKSKKLKSVKELLGITIMERSSFEKNPIDFLEAKGYKEVKKDLIIKLPKYSLFELENGRKRMLASAGELQKGNELALPSKYVNFLYLASHYEKLKGSPEDNEQKQLFVEQHKHYLDEIIEQISEFSKRVILADANLDKVLSAYNKHRDKPIREQAENIIHLFTLTNLGAPAAFKYFDTTIDRKRYTSTKEVLDATLIHQSITGLYETRIDLSQLGGDGGGSSGGSGGTLNLEDEYRLYETSAEPEVSPGSTWLSDFPQAWAETGGMGLAVRQAPLIIPLKATSTPVSIKQYPMSQEAKLGIKPHIQRLLDQGILVPCQSPWNTPLLPVKKPGTNDYRPVQDLREVNKRVEDIHPTVPNPYNLLSGLPPSHRWYTVLDLKDAFFCLRLHPTSQPLFAFEWRDPGMGISGQLTWTRLPQGFKNSPTLFNEALHRDLADFRIQHPDLILLQYVDDILLAATSELDCQQGTRALLLTLGNLGYRASAKKAQLCQKQVKYLGYLLKEGQRWLTEARKETVMGQPTPKTPRQLREFLGKAGFCRLFIPGFAEMAAPLYPLTKPGTLFNWGPDQQKAYQEIKQALLTAPALGLPDLTKPFELFVDEKQGYAKGVLTQKLGPWRRPVAYLSKKLDPVAAGWPPCLRMVAAIAVLRKDAGKLTMGQPLVILAPHAVEALVKQPPDRWLSNARMTHYQAMLLDTDRVQFGPVVALNPATLLPLPEEGAPHDCLEILAETHGTRPDLTDQPIPDADHTWYTDGSSFLQEGQRKAGAAVTTETEVIWARALPAGTSAQRAELIALTQALKMAEGKRLNVYTDSRYAFATAHIHGEIYRRRGWLTSEGREIKNKSEILALLKALFLPKRLSIIHCLGHQKGDSAEARGNRLADQAAREAAIKTPPDTSTLLAGKRTADGSEFEKRTADGSEFESPKKKAKVE

SEQ ID NO: 1932 - protein, 2094 aa, synthetic construct
  source 1..2094: note = Description of Artificial Sequence: Synthetic polypeptide
MPAAKRVKLDGGDKKYSIGLDIGTNSVGWAVITDEYKVPSKKFKVLGNTDRHSIKKNLIGALLFDSGETAEATRLKRTARRRYTRRKNRICYLQEIFSNEMAKVDDSFFHRLEESFLVEEDKKHERHPIFGNIVDEVAYHEKYPTIYHLRKKLVDSTDKADLRLIYLALAHMIKFRGHFLIEGDLNPDNSDVDKLFIQLVQTYNQLFEENPINASGVDAKAILSARLSKSRRLENLIAQLPGEKKNGLFGNLIALSLGLTPNFKSNFDLAEDAKLQLSKDTYDDDLDNLLAQIGDQYADLFLAAKNLSDAILLSDILRVNTEITKAPLSASMIKRYDEHHQDLTLLKALVRQQLPEKYKEIFFDQSKNGYAGYIDGGASQEEFYKFIKPILEKMDGTEELLVKLNREDLLRKQRTFDNGSIPHQIHLGELHAILRRQEDFYPFLKDNREKIEKILTFRIPYYVGPLARGNSRFAWMTRKSEETITPWNFEEVVDKGASAQSFIERMTNFDKNLPNEKVLPKHSLLYEYFTVYNELTKVKYVTEGMRKPAFLSGEQKKAIVDLLFKTNRKVTVKQLKEDYFKKIECFDSVEISGVEDRFNASLGTYHDLLKIIKDKDFLDNEENEDILEDIVLTLTLFEDREMIEERLKTYAHLFDDKVMKQLKRRRYTGWGRLSRKLINGIRDKQSGKTILDFLKSDGFANRNFMQLIHDDSLTFKEDIQKAQVSGQGDSLHEHIANLAGSPAIKKGILQTVKVVDELVKVMGRHKPENIVIEMARENQTTQKGQKNSRERMKRIEEGIKELGSQILKEHPVENTQLQNEKLYLYYLQNGRDMYVDQELDINRLSDYDVDHIVPQSFLKDDSIDNKVLTRSDKARGKSDNVPSEEVVKKMKNYWRQLLNAKLITQRKFDNLTKAERGGLSELDKAGFIKRQLVETRQITKHVAQILDSRMNTKYDENDKLIREVKVITLKSKLVSDFRKDFQFYKVREINNYHHAHDAYLNAVVGTALIKKYPKLESEFVYGDYKVYDVRKMIAKSEQEIGKATAKYFFYSNIMNFFKTEITLANGEIRKRPLIETNGETGEIVWDKGRDFATVRKVLSMPQVNIVKKTEVQTGGFSKESILPKRNSDKLIARKKDWDPKKYGGFDSPTVAYSVLVVAKVEKGKSKKLKSVKELLGITIMERSSFEKNPIDFLEAKGYKEVKKDLIIKLPKYSLFELENGRKRMLASAGELQKGNELALPSKYVNFLYLASHYEKLKGSPEDNEQKQLFVEQHKHYLDEIIEQISEFSKRVILADANLDKVLSAYNKHRDKPIREQAENIIHLFTLTNLGAPAAFKYFDTTIDRKRYTSTKEVLDATLIHQSITGLYETRIDLSQLGGDGGGSSGGSGGGGGTLNLEDEYRLYETSAEPEVSPGSTWLSDFPQAWAETGGMGLAVRQAPLIIPLKATSTPVSIKQYPMSQEAKLGIKPHIQRLLDQGILVPCQSPWNTPLLPVKKPGTNDYRPVQDLREVNKRVEDIHPTVPNPYNLLSGLPPSHRWYTVLDLKDAFFCLRLHPTSQPLFAFEWRDPGMGISGQLTWTRLPQGFKNSPTLFNEALHRDLADFRIQHPDLILLQYVDDILLAATSELDCQQGTRALLLTLGNLGYRASAKKAQLCQKQVKYLGYLLKEGQRWLTEARKETVMGQPTPKTPRQLREFLGKAGFCRLFIPGFAEMAAPLYPLTKPGTLFNWGPDQQKAYQEIKQALLTAPALGLPDLTKPFELFVDEKQGYAKGVLTQKLGPWRRPVAYLSKKLDPVAAGWPPCLRMVAAIAVLRKDAGKLTMGQPLVILAPHAVEALVKQPPDRWLSNARMTHYQAMLLDTDRVQFGPVVALNPATLLPLPEEGAPHDCLEILAETHGTRPDLTDQPIPDADHTWYTDGSSFLQEGQRKAGAAVTTETEVIWARALPAGTSAQRAELIALTQALKMAEGKRLNVYTDSRYAFATAHIHGEIYRRRGWLTSEGREIKNKSEILALLKALFLPKRLSIIHCLGHQKGDSAEARGNRLADQAAREAAIKTPPDTSTLLAGKRTADGSEFEKRTADGSEFESPKKKAKVE

SEQ ID NO: 1933 - protein, 2092 aa, synthetic construct
  source 1..2092: note = Description of Artificial Sequence: Synthetic polypeptide
MPAAKRVKLDGGDKKYSIGLDIGTNSVGWAVITDEYKVPSKKFKVLGNTDRHSIKKNLIGALLFDSGETAEATRLKRTARRRYTRRKNRICYLQEIFSNEMAKVDDSFFHRLEESFLVEEDKKHERHPIFGNIVDEVAYHEKYPTIYHLRKKLVDSTDKADLRLIYLALAHMIKFRGHFLIEGDLNPDNSDVDKLFIQLVQTYNQLFEENPINASGVDAKAILSARLSKSRRLENLIAQLPGEKKNGLFGNLIALSLGLTPNFKSNFDLAEDAKLQLSKDTYDDDLDNLLAQIGDQYADLFLAAKNLSDAILLSDILRVNTEITKAPLSASMIKRYDEHHQDLTLLKALVRQQLPEKYKEIFFDQSKNGYAGYIDGGASQEEFYKFIKPILEKMDGTEELLVKLNREDLLRKQRTFDNGSIPHQIHLGELHAILRRQEDFYPFLKDNREKIEKILTFRIPYYVGPLARGNSRFAWMTRKSEETITPWNFEEVVDKGASAQSFIERMTNFDKNLPNEKVLPKHSLLYEYFTVYNELTKVKYVTEGMRKPAFLSGEQKKAIVDLLFKTNRKVTVKQLKEDYFKKIECFDSVEISGVEDRFNASLGTYHDLLKIIKDKDFLDNEENEDILEDIVLTLTLFEDREMIEERLKTYAHLFDDKVMKQLKRRRYTGWGRLSRKLINGIRDKQSGKTILDFLKSDGFANRNFMQLIHDDSLTFKEDIQKAQVSGQGDSLHEHIANLAGSPAIKKGILQTVKVVDELVKVMGRHKPENIVIEMARENQTTQKGQKNSRERMKRIEEGIKELGSQILKEHPVENTQLQNEKLYLYYLQNGRDMYVDQELDINRLSDYDVDHIVPQSFLKDDSIDNKVLTRSDKARGKSDNVPSEEVVKKMKNYWRQLLNAKLITQRKFDNLTKAERGGLSELDKAGFIKRQLVETRQITKHVAQILDSRMNTKYDENDKLIREVKVITLKSKLVSDFRKDFQFYKVREINNYHHAHDAYLNAVVGTALIKKYPKLESEFVYGDYKVYDVRKMIAKSEQEIGKATAKYFFYSNIMNFFKTEITLANGEIRKRPLIETNGETGEIVWDKGRDFATVRKVLSMPQVNIVKKTEVQTGGFSKESILPKRNSDKLIARKKDWDPKKYGGFDSPTVAYSVLVVAKVEKGKSKKLKSVKELLGITIMERSSFEKNPIDFLEAKGYKEVKKDLIIKLPKYSLFELENGRKRMLASAGELQKGNELALPSKYVNFLYLASHYEKLKGSPEDNEQKQLFVEQHKHYLDEIIEQISEFSKRVILADANLDKVLSAYNKHRDKPIREQAENIIHLFTLTNLGAPAAFKYFDTTIDRKRYTSTKEVLDATLIHQSITGLYETRIDLSQLGGDGGPAPAPAPGGTLNLEDEYRLYETSAEPEVSPGSTWLSDFPQAWAETGGMGLAVRQAPLIIPLKATSTPVSIKQYPMSQEAKLGIKPHIQRLLDQGILVPCQSPWNTPLLPVKKPGTNDYRPVQDLREVNKRVEDIHPTVPNPYNLLSGLPPSHRWYTVLDLKDAFFCLRLHPTSQPLFAFEWRDPGMGISGQLTWTRLPQGFKNSPTLFNEALHRDLADFRIQHPDLILLQYVDDILLAATSELDCQQGTRALLLTLGNLGYRASAKKAQLCQKQVKYLGYLLKEGQRWLTEARKETVMGQPTPKTPRQLREFLGKAGFCRLFIPGFAEMAAPLYPLTKPGTLFNWGPDQQKAYQEIKQALLTAPALGLPDLTKPFELFVDEKQGYAKGVLTQKLGPWRRPVAYLSKKLDPVAAGWPPCLRMVAAIAVLRKDAGKLTMGQPLVILAPHAVEALVKQPPDRWLSNARMTHYQAMLLDTDRVQFGPVVALNPATLLPLPEEGAPHDCLEILAETHGTRPDLTDQPIPDADHTWYTDGSSFLQEGQRKAGAAVTTETEVIWARALPAGTSAQRAELIALTQALKMAEGKRLNVYTDSRYAFATAHIHGEIYRRRGWLTSEGREIKNKSEILALLKALFLPKRLSIIHCLGHQKGDSAEARGNRLADQAAREAAIKTPPDTSTLLAGKRTADGSEFEKRTADGSEFESPKKKAKVE

SEQ ID NO: 1934 - protein, 2102 aa, synthetic construct
  source 1..2102: note = Description of Artificial Sequence: Synthetic polypeptide
MPAAKRVKLDGGDKKYSIGLDIGTNSVGWAVITDEYKVPSKKFKVLGNTDRHSIKKNLIGALLFDSGETAEATRLKRTARRRYTRRKNRICYLQEIFSNEMAKVDDSFFHRLEESFLVEEDKKHERHPIFGNIVDEVAYHEKYPTIYHLRKKLVDSTDKADLRLIYLALAHMIKFRGHFLIEGDLNPDNSDVDKLFIQLVQTYNQLFEENPINASGVDAKAILSARLSKSRRLENLIAQLPGEKKNGLFGNLIALSLGLTPNFKSNFDLAEDAKLQLSKDTYDDDLDNLLAQIGDQYADLFLAAKNLSDAILLSDILRVNTEITKAPLSASMIKRYDEHHQDLTLLKALVRQQLPEKYKEIFFDQSKNGYAGYIDGGASQEEFYKFIKPILEKMDGTEELLVKLNREDLLRKQRTFDNGSIPHQIHLGELHAILRRQEDFYPFLKDNREKIEKILTFRIPYYVGPLARGNSRFAWMTRKSEETITPWNFEEVVDKGASAQSFIERMTNFDKNLPNEKVLPKHSLLYEYFTVYNELTKVKYVTEGMRKPAFLSGEQKKAIVDLLFKTNRKVTVKQLKEDYFKKIECFDSVEISGVEDRFNASLGTYHDLLKIIKDKDFLDNEENEDILEDIVLTLTLFEDREMIEERLKTYAHLFDDKVMKQLKRRRYTGWGRLSRKLINGIRDKQSGKTILDFLKSDGFANRNFMQLIHDDSLTFKEDIQKAQVSGQGDSLHEHIANLAGSPAIKKGILQTVKVVDELVKVMGRHKPENIVIEMARENQTTQKGQKNSRERMKRIEEGIKELGSQILKEHPVENTQLQNEKLYLYYLQNGRDMYVDQELDINRLSDYDVDHIVPQSFLKDDSIDNKVLTRSDKARGKSDNVPSEEVVKKMKNYWRQLLNAKLITQRKFDNLTKAERGGLSELDKAGFIKRQLVETRQITKHVAQILDSRMNTKYDENDKLIREVKVITLKSKLVSDFRKDFQFYKVREINNYHHAHDAYLNAVVGTALIKKYPKLESEFVYGDYKVYDVRKMIAKSEQEIGKATAKYFFYSNIMNFFKTEITLANGEIRKRPLIETNGETGEIVWDKGRDFATVRKVLSMPQVNIVKKTEVQTGGFSKESILPKRNSDKLIARKKDWDPKKYGGFDSPTVAYSVLVVAKVEKGKSKKLKSVKELLGITIMERSSFEKNPIDFLEAKGYKEVKKDLIIKLPKYSLFELENGRKRMLASAGELQKGNELALPSKYVNFLYLASHYEKLKGSPEDNEQKQLFVEQHKHYLDEIIEQISEFSKRVILADANLDKVLSAYNKHRDKPIREQAENIIHLFTLTNLGAPAAFKYFDTTIDRKRYTSTKEVLDATLIHQSITGLYETRIDLSQLGGDGGPAPAPAPAPAPGGTVSLQDEHRLFDIPVTTSLPDVWLQDFPQAWAETGGLGRAKCQAPIIIDLKPTAVPVSIKQYPMSLEAHMGIRQHIIKFLELGVLRPCRSPWNTPLLPVKKPGTQDYRPVQDLREINKRTVDIHPTVPNPYNLLSTLKPDYSWYTVLDLKDAFFCLPLAPQSQELFAFEWKDPERGISGQLTWTRLPQGFKNSPTLFNEALHRDLTDFRTQHPEVTLLQYVDDLLLAAPTKKACTQGTRHLLQELGEKGYRASAKKAQICQTKVTYLGYILSEGKRWLTPGRIETVARIPPPRNPREVREFLGKAGFCRLFIPGFAELAAPLYALTKPSTPFTWQTEHQLAFEALKKALLSAPALGLPDTSKPFTLFLDERQGIAKGVLTQKLGPWKRPVAYLSKKLDPVAAGWPPCLRIMAATAMLVKDSAKLTLGQPLTVITPHTLEAIVRQPPDRWITNARLTHYQALLLDTDRVQFGPPVTLNPATLLPVPENQPSPHDCRQVLAETHGTREDLKDQELPDADHTWYTDGSSYLDSGTRRAGAAVVDGHNTIWAQSLPPGTSAQKAELIALTKALELSKGKKANIYTDSRYAFATAHTHGSIYERRGWLTSEGKEIKNKAEIIALLKALFLPQEVAIIHCPGHQKGQDPVAVGNRQADRVARQAAMAEVLTLATEPDNTSHITAGKRTADGSEFEKRTADGSEFESPKKKAKVE

SEQ ID NO: 1935 - protein, 2102 aa, synthetic construct
  source 1..2102: note = Description of Artificial Sequence: Synthetic polypeptide
MPAAKRVKLDGGDKKYSIGLDIGTNSVGWAVITDEYKVPSKKFKVLGNTDRHSIKKNLIGALLFDSGETAEATRLKRTARRRYTRRKNRICYLQEIFSNEMAKVDDSFFHRLEESFLVEEDKKHERHPIFGNIVDEVAYHEKYPTIYHLRKKLVDSTDKADLRLIYLALAHMIKFRGHFLIEGDLNPDNSDVDKLFIQLVQTYNQLFEENPINASGVDAKAILSARLSKSRRLENLIAQLPGEKKNGLFGNLIALSLGLTPNFKSNFDLAEDAKLQLSKDTYDDDLDNLLAQIGDQYADLFLAAKNLSDAILLSDILRVNTEITKAPLSASMIKRYDEHHQDLTLLKALVRQQLPEKYKEIFFDQSKNGYAGYIDGGASQEEFYKFIKPILEKMDGTEELLVKLNREDLLRKQRTFDNGSIPHQIHLGELHAILRRQEDFYPFLKDNREKIEKILTFRIPYYVGPLARGNSRFAWMTRKSEETITPWNFEEVVDKGASAQSFIERMTNFDKNLPNEKVLPKHSLLYEYFTVYNELTKVKYVTEGMRKPAFLSGEQKKAIVDLLFKTNRKVTVKQLKEDYFKKIECFDSVEISGVEDRFNASLGTYHDLLKIIKDKDFLDNEENEDILEDIVLTLTLFEDREMIEERLKTYAHLFDDKVMKQLKRRRYTGWGRLSRKLINGIRDKQSGKTILDFLKSDGFANRNFMQLIHDDSLTFKEDIQKAQVSGQGDSLHEHIANLAGSPAIKKGILQTVKVVDELVKVMGRHKPENIVIEMARENQTTQKGQKNSRERMKRIEEGIKELGSQILKEHPVENTQLQNEKLYLYYLQNGRDMYVDQELDINRLSDYDVDHIVPQSFLKDDSIDNKVLTRSDKARGKSDNVPSEEVVKKMKNYWRQLLNAKLITQRKFDNLTKAERGGLSELDKAGFIKRQLVETRQITKHVAQILDSRMNTKYDENDKLIREVKVITLKSKLVSDFRKDFQFYKVREINNYHHAHDAYLNAVVGTALIKKYPKLESEFVYGDYKVYDVRKMIAKSEQEIGKATAKYFFYSNIMNFFKTEITLANGEIRKRPLIETNGETGEIVWDKGRDFATVRKVLSMPQVNIVKKTEVQTGGFSKESILPKRNSDKLIARKKDWDPKKYGGFDSPTVAYSVLVVAKVEKGKSKKLKSVKELLGITIMERSSFEKNPIDFLEAKGYKEVKKDLIIKLPKYSLFELENGRKRMLASAGELQKGNELALPSKYVNFLYLASHYEKLKGSPEDNEQKQLFVEQHKHYLDEIIEQISEFSKRVILADANLDKVLSAYNKHRDKPIREQAENIIHLFTLTNLGAPAAFKYFDTTIDRKRYTSTKEVLDATLIHQSITGLYETRIDLSQLGGDGGEAAAKGGSGGGGGTVSLQDEHRLFDIPVTTSLPDVWLQDFPQAWAETGGLGRAKCQAPIIIDLKPTAVPVSIKQYPMSLEAHMGIRQHIIKFLELGVLRPCRSPWNTPLLPVKKPGTQDYRPVQDLREINKRTVDIHPTVPNPYNLLSTLKPDYSWYTVLDLKDAFFCLPLAPQSQELFAFEWKDPERGISGQLTWTRLPQGFKNSPTLFNEALHRDLTDFRTQHPEVTLLQYVDDLLLAAPTKKACTQGTRHLLQELGEKGYRASAKKAQICQTKVTYLGYILSEGKRWLTPGRIETVARIPPPRNPREVREFLGKAGFCRLFIPGFAELAAPLYALTKPSTPFTWQTEHQLAFEALKKALLSAPALGLPDTSKPFTLFLDERQGIAKGVLTQKLGPWKRPVAYLSKKLDPVAAGWPPCLRIMAATAMLVKDSAKLTLGQPLTVITPHTLEAIVRQPPDRWITNARLTHYQALLLDTDRVQFGPPVTLNPATLLPVPENQPSPHDCRQVLAETHGTREDLKDQELPDADHTWYTDGSSYLDSGTRRAGAAVVDGHNTIWAQSLPPGTSAQKAELIALTKALELSKGKKANIYTDSRYAFATAHTHGSIYERRGWLTSEGKEIKNKAEIIALLKALFLPQEVAIIHCPGHQKGQDPVAVGNRQADRVARQAAMAEVLTLATEPDNTSHITAGKRTADGSEFEKRTADGSEFESPKKKAKVE

SEQ ID NO: 1936 - protein, 2121 aa, synthetic construct
  source 1..2121: note = Description of Artificial Sequence: Synthetic polypeptide
MPAAKRVKLDGGDKKYSIGLDIGTNSVGWAVITDEYKVPSKKFKVLGNTDRHSIKKNLIGALLFDSGETAEATRLKRTARRRYTRRKNRICYLQEIFSNEMAKVDDSFFHRLEESFLVEEDKKHERHPIFGNIVDEVAYHEKYPTIYHLRKKLVDSTDKADLRLIYLALAHMIKFRGHFLIEGDLNPDNSDVDKLFIQLVQTYNQLFEENPINASGVDAKAILSARLSKSRRLENLIAQLPGEKKNGLFGNLIALSLGLTPNFKSNFDLAEDAKLQLSKDTYDDDLDNLLAQIGDQYADLFLAAKNLSDAILLSDILRVNTEITKAPLSASMIKRYDEHHQDLTLLKALVRQQLPEKYKEIFFDQSKNGYAGYIDGGASQEEFYKFIKPILEKMDGTEELLVKLNREDLLRKQRTFDNGSIPHQIHLGELHAILRRQEDFYPFLKDNREKIEKILTFRIPYYVGPLARGNSRFAWMTRKSEETITPWNFEEVVDKGASAQSFIERMTNFDKNLPNEKVLPKHSLLYEYFTVYNELTKVKYVTEGMRKPAFLSGEQKKAIVDLLFKTNRKVTVKQLKEDYFKKIECFDSVEISGVEDRFNASLGTYHDLLKIIKDKDFLDNEENEDILEDIVLTLTLFEDREMIEERLKTYAHLFDDKVMKQLKRRRYTGWGRLSRKLINGIRDKQSGKTILDFLKSDGFANRNFMQLIHDDSLTFKEDIQKAQVSGQGDSLHEHIANLAGSPAIKKGILQTVKVVDELVKVMGRHKPENIVIEMARENQTTQKGQKNSRERMKRIEEGIKELGSQILKEHPVENTQLQNEKLYLYYLQNGRDMYVDQELDINRLSDYDVDHIVPQSFLKDDSIDNKVLTRSDKARGKSDNVPSEEVVKKMKNYWRQLLNAKLITQRKFDNLTKAERGGLSELDKAGFIKRQLVETRQITKHVAQILDSRMNTKYDENDKLIREVKVITLKSKLVSDFRKDFQFYKVREINNYHHAHDAYLNAVVGTALIKKYPKLESEFVYGDYKVYDVRKMIAKSEQEIGKATAKYFFYSNIMNFFKTEITLANGEIRKRPLIETNGETGEIVWDKGRDFATVRKVLSMPQVNIVKKTEVQTGGFSKESILPKRNSDKLIARKKDWDPKKYGGFDSPTVAYSVLVVAKVEKGKSKKLKSVKELLGITIMERSSFEKNPIDFLEAKGYKEVKKDLIIKLPKYSLFELENGRKRMLASAGELQKGNELALPSKYVNFLYLASHYEKLKGSPEDNEQKQLFVEQHKHYLDEIIEQISEFSKRVILADANLDKVLSAYNKHRDKPIREQAENIIHLFTLTNLGAPAAFKYFDTTIDRKRYTSTKEVLDATLIHQSITGLYETRIDLSQLGGDGGGGGGSGGGGSGGGGSGGGGSGGGGSGGGGSGGTVSLQDEHRLFDIPVTTSLPDVWLQDFPQAWAETGGLGRAKCQAPIIIDLKPTAVPVSIKQYPMSLEAHMGIRQHIIKFLELGVLRPCRSPWNTPLLPVKKPGTQDYRPVQDLREINKRTVDIHPTVPNPYNLLSTLKPDYSWYTVLDLKDAFFCLPLAPQSQELFAFEWKDPERGISGQLTWTRLPQGFKNSPTLFNEALHRDLTDFRTQHPEVTLLQYVDDLLLAAPTKKACTQGTRHLLQELGEKGYRASAKKAQICQTKVTYLGYILSEGKRWLTPGRIETVARIPPPRNPREVREFLGKAGFCRLFIPGFAELAAPLYALTKPSTPFTWQTEHQLAFEALKKALLSAPALGLPDTSKPFTLFLDERQGIAKGVLTQKLGPWKRPVAYLSKKLDPVAAGWPPCLRIMAATAMLVKDSAKLTLGQPLTVITPHTLEAIVRQPPDRWITNARLTHYQALLLDTDRVQFGPPVTLNPATLLPVPENQPSPHDCRQVLAETHGTREDLKDQELPDADHTWYTDGSSYLDSGTRRAGAAVVDGHNTIWAQSLPPGTSAQKAELIALTKALELSKGKKANIYTDSRYAFATAHTHGSIYERRGWLTSEGKEIKNKAEIIALLKALFLPQEVAIIHCPGHQKGQDPVAVGNRQADRVARQAAMAEVLTLATEPDNTSHITAGKRTADGSEFEKRTADGSEFESPKKKAKVE

SEQ ID NO: 1937 - protein, 2102 aa, synthetic construct
  source 1..2102: note = Description of Artificial Sequence: Synthetic polypeptide
MPAAKRVKLDGGDKKYSIGLDIGTNSVGWAVITDEYKVPSKKFKVLGNTDRHSIKKNLIGALLFDSGETAEATRLKRTARRRYTRRKNRICYLQEIFSNEMAKVDDSFFHRLEESFLVEEDKKHERHPIFGNIVDEVAYHEKYPTIYHLRKKLVDSTDKADLRLIYLALAHMIKFRGHFLIEGDLNPDNSDVDKLFIQLVQTYNQLFEENPINASGVDAKAILSARLSKSRRLENLIAQLPGEKKNGLFGNLIALSLGLTPNFKSNFDLAEDAKLQLSKDTYDDDLDNLLAQIGDQYADLFLAAKNLSDAILLSDILRVNTEITKAPLSASMIKRYDEHHQDLTLLKALVRQQLPEKYKEIFFDQSKNGYAGYIDGGASQEEFYKFIKPILEKMDGTEELLVKLNREDLLRKQRTFDNGSIPHQIHLGELHAILRRQEDFYPFLKDNREKIEKILTFRIPYYVGPLARGNSRFAWMTRKSEETITPWNFEEVVDKGASAQSFIERMTNFDKNLPNEKVLPKHSLLYEYFTVYNELTKVKYVTEGMRKPAFLSGEQKKAIVDLLFKTNRKVTVKQLKEDYFKKIECFDSVEISGVEDRFNASLGTYHDLLKIIKDKDFLDNEENEDILEDIVLTLTLFEDREMIEERLKTYAHLFDDKVMKQLKRRRYTGWGRLSRKLINGIRDKQSGKTILDFLKSDGFANRNFMQLIHDDSLTFKEDIQKAQVSGQGDSLHEHIANLAGSPAIKKGILQTVKVVDELVKVMGRHKPENIVIEMARENQTTQKGQKNSRERMKRIEEGIKELGSQILKEHPVENTQLQNEKLYLYYLQNGRDMYVDQELDINRLSDYDVDHIVPQSFLKDDSIDNKVLTRSDKARGKSDNVPSEEVVKKMKNYWRQLLNAKLITQRKFDNLTKAERGGLSELDKAGFIKRQLVETRQITKHVAQILDSRMNTKYDENDKLIREVKVITLKSKLVSDFRKDFQFYKVREINNYHHAHDAYLNAVVGTALIKKYPKLESEFVYGDYKVYDVRKMIAKSEQEIGKATAKYFFYSNIMNFFKTEITLANGEIRKRPLIETNGETGEIVWDKGRDFATVRKVLSMPQVNIVKKTEVQTGGFSKESILPKRNSDKLIARKKDWDPKKYGGFDSPTVAYSVLVVAKVEKGKSKKLKSVKELLGITIMERSSFEKNPIDFLEAKGYKEVKKDLIIKLPKYSLFELENGRKRMLASAGELQKGNELALPSKYVNFLYLASHYEKLKGSPEDNEQKQLFVEQHKHYLDEIIEQISEFSKRVILADANLDKVLSAYNKHRDKPIREQAENIIHLFTLTNLGAPAAFKYFDTTIDRKRYTSTKEVLDATLIHQSITGLYETRIDLSQLGGDGGGGGGGSEAAAKGGTVSLQDEHRLFDIPVTTSLPDVWLQDFPQAWAETGGLGRAKCQAPIIIDLKPTAVPVSIKQYPMSLEAHMGIRQHIIKFLELGVLRPCRSPWNTPLLPVKKPGTQDYRPVQDLREINKRTVDIHPTVPNPYNLLSTLKPDYSWYTVLDLKDAFFCLPLAPQSQELFAFEWKDPERGISGQLTWTRLPQGFKNSPTLFNEALHRDLTDFRTQHPEVTLLQYVDDLLLAAPTKKACTQGTRHLLQELGEKGYRASAKKAQICQTKVTYLGYILSEGKRWLTPGRIETVARIPPPRNPREVREFLGKAGFCRLFIPGFAELAAPLYALTKPSTPFTWQTEHQLAFEALKKALLSAPALGLPDTSKPFTLFLDERQGIAKGVLTQKLGPWKRPVAYLSKKLDPVAAGWPPCLRIMAATAMLVKDSAKLTLGQPLTVITPHTLEAIVRQPPDRWITNARLTHYQALLLDTDRVQFGPPVTLNPATLLPVPENQPSPHDCRQVLAETHGTREDLKDQELPDADHTWYTDGSSYLDSGTRRAGAAVVDGHNTIWAQSLPPGTSAQKAELIALTKALELSKGKKANIYTDSRYAFATAHTHGSIYERRGWLTSEGKEIKNKAEIIALLKALFLPQEVAIIHCPGHQKGQDPVAVGNRQADRVARQAAMAEVLTLATEPDNTSHITAGKRTADGSEFEKRTADGSEFESPKKKAKVE

SEQ ID NO: 1938 - protein, 2102 aa, synthetic construct
  source 1..2102: note = Description of Artificial Sequence: Synthetic polypeptide
MPAAKRVKLDGGDKKYSIGLDIGTNSVGWAVITDEYKVPSKKFKVLGNTDRHSIKKNLIGALLFDSGETAEATRLKRTARRRYTRRKNRICYLQEIFSNEMAKVDDSFFHRLEESFLVEEDKKHERHPIFGNIVDEVAYHEKYPTIYHLRKKLVDSTDKADLRLIYLALAHMIKFRGHFLIEGDLNPDNSDVDKLFIQLVQTYNQLFEENPINASGVDAKAILSARLSKSRRLENLIAQLPGEKKNGLFGNLIALSLGLTPNFKSNFDLAEDAKLQLSKDTYDDDLDNLLAQIGDQYADLFLAAKNLSDAILLSDILRVNTEITKAPLSASMIKRYDEHHQDLTLLKALVRQQLPEKYKEIFFDQSKNGYAGYIDGGASQEEFYKFIKPILEKMDGTEELLVKLNREDLLRKQRTFDNGSIPHQIHLGELHAILRRQEDFYPFLKDNREKIEKILTFRIPYYVGPLARGNSRFAWMTRKSEETITPWNFEEVVDKGASAQSFIERMTNFDKNLPNEKVLPKHSLLYEYFTVYNELTKVKYVTEGMRKPAFLSGEQKKAIVDLLFKTNRKVTVKQLKEDYFKKIECFDSVEISGVEDRFNASLGTYHDLLKIIKDKDFLDNEENEDILEDIVLTLTLFEDREMIEERLKTYAHLFDDKVMKQLKRRRYTGWGRLSRKLINGIRDKQSGKTILDFLKSDGFANRNFMQLIHDDSLTFKEDIQKAQVSGQGDSLHEHIANLAGSPAIKKGILQTVKVVDELVKVMGRHKPENIVIEMARENQTTQKGQKNSRERMKRIEEGIKELGSQILKEHPVENTQLQNEKLYLYYLQNGRDMYVDQELDINRLSDYDVDHIVPQSFLKDDSIDNKVLTRSDKARGKSDNVPSEEVVKKMKNYWRQLLNAKLITQRKFDNLTKAERGGLSELDKAGFIKRQLVETRQITKHVAQILDSRMNTKYDENDKLIREVKVITLKSKLVSDFRKDFQFYKVREINNYHHAHDAYLNAVVGTALIKKYPKLESEFVYGDYKVYDVRKMIAKSEQEIGKATAKYFFYSNIMNFFKTEITLANGEIRKRPLIETNGETGEIVWDKGRDFATVRKVLSMPQVNIVKKTEVQTGGFSKESILPKRNSDKLIARKKDWDPKKYGGFDSPTVAYSVLVVAKVEKGKSKKLKSVKELLGITIMERSSFEKNPIDFLEAKGYKEVKKDLIIKLPKYSLFELENGRKRMLASAGELQKGNELALPSKYVNFLYLASHYEKLKGSPEDNEQKQLFVEQHKHYLDEIIEQISEFSKRVILADANLDKVLSAYNKHRDKPIREQAENIIHLFTLTNLGAPAAFKYFDTTIDRKRYTSTKEVLDATLIHQSITGLYETRIDLSQLGGDGGGGGPAPEAAAKGGTVSLQDEHRLFDIPVTTSLPDVWLQDFPQAWAETGGLGRAKCQAPIIIDLKPTAVPVSIKQYPMSLEAHMGIRQHIIKFLELGVLRPCRSPWNTPLLPVKKPGTQDYRPVQDLREINKRTVDIHPTVPNPYNLLSTLKPDYSWYTVLDLKDAFFCLPLAPQSQELFAFEWKDPERGISGQLTWTRLPQGFKNSPTLFNEALHRDLTDFRTQHPEVTLLQYVDDLLLAAPTKKACTQGTRHLLQELGEKGYRASAKKAQICQTKVTYLGYILSEGKRWLTPGRIETVARIPPPRNPREVREFLGKAGFCRLFIPGFAELAAPLYALTKPSTPFTWQTEHQLAFEALKKALLSAPALGLPDTSKPFTLFLDERQGIAKGVLTQKLGPWKRPVAYLSKKLDPVAAGWPPCLRIMAATAMLVKDSAKLTLGQPLTVITPHTLEAIVRQPPDRWITNARLTHYQALLLDTDRVQFGPPVTLNPATLLPVPENQPSPHDCRQVLAETHGTREDLKDQELPDADHTWYTDGSSYLDSGTRRAGAAVVDGHNTIWAQSLPPGTSAQKAELIALTKALELSKGKKANIYTDSRYAFATAHTHGSIYERRGWLTSEGKEIKNKAEIIALLKALFLPQEVAIIHCPGHQKGQDPVAVGNRQADRVARQAAMAEVLTLATEPDNTSHITAGKRTADGSEFEKRTADGSEFESPKKKAKVE

SEQ ID NO: 1939 - protein, 2102 aa, synthetic construct
  source 1..2102: note = Description of Artificial Sequence: Synthetic polypeptide
MPAAKRVKLDGGDKKYSIGLDIGTNSVGWAVITDEYKVPSKKFKVLGNTDRHSIKKNLIGALLFDSGETAEATRLKRTARRRYTRRKNRICYLQEIFSNEMAKVDDSFFHRLEESFLVEEDKKHERHPIFGNIVDEVAYHEKYPTIYHLRKKLVDSTDKADLRLIYLALAHMIKFRGHFLIEGDLNPDNSDVDKLFIQLVQTYNQLFEENPINASGVDAKAILSARLSKSRRLENLIAQLPGEKKNGLFGNLIALSLGLTPNFKSNFDLAEDAKLQLSKDTYDDDLDNLLAQIGDQYADLFLAAKNLSDAILLSDILRVNTEITKAPLSASMIKRYDEHHQDLTLLKALVRQQLPEKYKEIFFDQSKNGYAGYIDGGASQEEFYKFIKPILEKMDGTEELLVKLNREDLLRKQRTFDNGSIPHQIHLGELHAILRRQEDFYPFLKDNREKIEKILTFRIPYYVGPLARGNSRFAWMTRKSEETITPWNFEEVVDKGASAQSFIERMTNFDKNLPNEKVLPKHSLLYEYFTVYNELTKVKYVTEGMRKPAFLSGEQKKAIVDLLFKTNRKVTVKQLKEDYFKKIECFDSVEISGVEDRFNASLGTYHDLLKIIKDKDFLDNEENEDILEDIVLTLTLFEDREMIEERLKTYAHLFDDKVMKQLKRRRYTGWGRLSRKLINGIRDKQSGKTILDFLKSDGFANRNFMQLIHDDSLTFKEDIQKAQVSGQGDSLHEHIANLAGSPAIKKGILQTVKVVDELVKVMGRHKPENIVIEMARENQTTQKGQKNSRERMKRIEEGIKELGSQILKEHPVENTQLQNEKLYLYYLQNGRDMYVDQELDINRLSDYDVDHIVPQSFLKDDSIDNKVLTRSDKARGKSDNVPSEEVVKKMKNYWRQLLNAKLITQRKFDNLTKAERGGLSELDKAGFIKRQLVETRQITKHVAQILDSRMNTKYDENDKLIREVKVITLKSKLVSDFRKDFQFYKVREINNYHHAHDAYLNAVVGTALIKKYPKLESEFVYGDYKVYDVRKMIAKSEQEIGKATAKYFFYSNIMNFFKTEITLANGEIRKRPLIETNGETGEIVWDKGRDFATVRKVLSMPQVNIVKKTEVQTGGFSKESILPKRNSDKLIARKKDWDPKKYGGFDSPTVAYSVLVVAKVEKGKSKKLKSVKELLGITIMERSSFEKNPIDFLEAKGYKEVKKDLIIKLPKYSLFELENGRKRMLASAGELQKGNELALPSKYVNFLYLASHYEKLKGSPEDNEQKQLFVEQHKHYLDEIIEQISEFSKRVILADANLDKVLSAYNKHRDKPIREQAENIIHLFTLTNLGAPAAFKYFDTTIDRKRYTSTKEVLDATLIHQSITGLYETRIDLSQLGGDGGPAPGGSEAAAKGGTVSLQDEHRLFDIPVTTSLPDVWLQDFPQAWAETGGLGRAKCQAPIIIDLKPTAVPVSIKQYPMSLEAHMGIRQHIIKFLELGVLRPCRSPWNTPLLPVKKPGTQDYRPVQDLREINKRTVDIHPTVPNPYNLLSTLKPDYSWYTVLDLKDAFFCLPLAPQSQELFAFEWKDPERGISGQLTWTRLPQGFKNSPTLFNEALHRDLTDFRTQHPEVTLLQYVDDLLLAAPTKKACTQGTRHLLQELGEKGYRASAKKAQICQTKVTYLGYILSEGKRWLTPGRIETVARIPPPRNPREVREFLGKAGFCRLFIPGFAELAAPLYALTKPSTPFTWQTEHQLAFEALKKALLSAPALGLPDTSKPFTLFLDERQGIAKGVLTQKLGPWKRPVAYLSKKLDPVAAGWPPCLRIMAATAMLVKDSAKLTLGQPLTVITPHTLEAIVRQPPDRWITNARLTHYQALLLDTDRVQFGPPVTLNPATLLPVPENQPSPHDCRQVLAETHGTREDLKDQELPDADHTWYTDGSSYLDSGTRRAGAAVVDGHNTIWAQSLPPGTSAQKAELIALTKALELSKGKKANIYTDSRYAFATAHTHGSIYERRGWLTSEGKEIKNKAEIIALLKALFLPQEVAIIHCPGHQKGQDPVAVGNRQADRVARQAAMAEVLTLATEPDNTSHITAGKRTADGSEFEKRTADGSEFESPKKKAKVE

SEQ ID NO: 1940 - protein, 2097 aa, synthetic construct
  source 1..2097: note = Description of Artificial Sequence: Synthetic polypeptide
MPAAKRVKLDGGDKKYSIGLDIGTNSVGWAVITDEYKVPSKKFKVLGNTDRHSIKKNLIGALLFDSGETAEATRLKRTARRRYTRRKNRICYLQEIFSNEMAKVDDSFFHRLEESFLVEEDKKHERHPIFGNIVDEVAYHEKYPTIYHLRKKLVDSTDKADLRLIYLALAHMIKFRGHFLIEGDLNPDNSDVDKLFIQLVQTYNQLFEENPINASGVDAKAILSARLSKSRRLENLIAQLPGEKKNGLFGNLIALSLGLTPNFKSNFDLAEDAKLQLSKDTYDDDLDNLLAQIGDQYADLFLAAKNLSDAILLSDILRVNTEITKAPLSASMIKRYDEHHQDLTLLKALVRQQLPEKYKEIFFDQSKNGYAGYIDGGASQEEFYKFIKPILEKMDGTEELLVKLNREDLLRKQRTFDNGSIPHQIHLGELHAILRRQEDFYPFLKDNREKIEKILTFRIPYYVGPLARGNSRFAWMTRKSEETITPWNFEEVVDKGASAQSFIERMTNFDKNLPNEKVLPKHSLLYEYFTVYNELTKVKYVTEGMRKPAFLSGEQKKAIVDLLFKTNRKVTVKQLKEDYFKKIECFDSVEISGVEDRFNASLGTYHDLLKIIKDKDFLDNEENEDILEDIVLTLTLFEDREMIEERLKTYAHLFDDKVMKQLKRRRYTGWGRLSRKLINGIRDKQSGKTILDFLKSDGFANRNFMQLIHDDSLTFKEDIQKAQVSGQGDSLHEHIANLAGSPAIKKGILQTVKVVDELVKVMGRHKPENIVIEMARENQTTQKGQKNSRERMKRIEEGIKELGSQILKEHPVENTQLQNEKLYLYYLQNGRDMYVDQELDINRLSDYDVDHIVPQSFLKDDSIDNKVLTRSDKARGKSDNVPSEEVVKKMKNYWRQLLNAKLITQRKFDNLTKAERGGLSELDKAGFIKRQLVETRQITKHVAQILDSRMNTKYDENDKLIREVKVITLKSKLVSDFRKDFQFYKVREINNYHHAHDAYLNAVVGTALIKKYPKLESEFVYGDYKVYDVRKMIAKSEQEIGKATAKYFFYSNIMNFFKTEITLANGEIRKRPLIETNGETGEIVWDKGRDFATVRKVLSMPQVNIVKKTEVQTGGFSKESILPKRNSDKLIARKKDWDPKKYGGFDSPTVAYSVLVVAKVEKGKSKKLKSVKELLGITIMERSSFEKNPIDFLEAKGYKEVKKDLIIKLPKYSLFELENGRKRMLASAGELQKGNELALPSKYVNFLYLASHYEKLKGSPEDNEQKQLFVEQHKHYLDEIIEQISEFSKRVILADANLDKVLSAYNKHRDKPIREQAENIIHLFTLTNLGAPAAFKYFDTTIDRKRYTSTKEVLDATLIHQSITGLYETRIDLSQLGGDGGGGSGGGGGTVSLQDEHRLFDIPVTTSLPDVWLQDFPQAWAETGGLGRAKCQAPIIIDLKPTAVPVSIKQYPMSLEAHMGIRQHIIKFLELGVLRPCRSPWNTPLLPVKKPGTQDYRPVQDLREINKRTVDIHPTVPNPYNLLSTLKPDYSWYTVLDLKDAFFCLPLAPQSQELFAFEWKDPERGISGQLTWTRLPQGFKNSPTLFNEALHRDLTDFRTQHPEVTLLQYVDDLLLAAPTKKACTQGTRHLLQELGEKGYRASAKKAQICQTKVTYLGYILSEGKRWLTPGRIETVARIPPPRNPREVREFLGKAGFCRLFIPGFAELAAPLYALTKPSTPFTWQTEHQLAFEALKKALLSAPALGLPDTSKPFTLFLDERQGIAKGVLTQKLGPWKRPVAYLSKKLDPVAAGWPPCLRIMAATAMLVKDSAKLTLGQPLTVITPHTLEAIVRQPPDRWITNARLTHYQALLLDTDRVQFGPPVTLNPATLLPVPENQPSPHDCRQVLAETHGTREDLKDQELPDADHTWYTDGSSYLDSGTRRAGAAVVDGHNTIWAQSLPPGTSAQKAELIALTKALELSKGKKANIYTDSRYAFATAHTHGSIYERRGWLTSEGKEIKNKAEIIALLKALFLPQEVAIIHCPGHQKGQDPVAVGNRQADRVARQAAMAEVLTLATEPDNTSHITAGKRTADGSEFEKRTADGSEFESPKKKAKVE

SEQ ID NO: 1941 - protein, 2111 aa, synthetic construct
  source 1..2111: note = Description of Artificial Sequence: Synthetic polypeptide
MPAAKRVKLDGGDKKYSIGLDIGTNSVGWAVITDEYKVPSKKFKVLGNTDRHSIKKNLIGALLFDSGETAEATRLKRTARRRYTRRKNRICYLQEIFSNEMAKVDDSFFHRLEESFLVEEDKKHERHPIFGNIVDEVAYHEKYPTIYHLRKKLVDSTDKADLRLIYLALAHMIKFRGHFLIEGDLNPDNSDVDKLFIQLVQTYNQLFEENPINASGVDAKAILSARLSKSRRLENLIAQLPGEKKNGLFGNLIALSLGLTPNFKSNFDLAEDAKLQLSKDTYDDDLDNLLAQIGDQYADLFLAAKNLSDAILLSDILRVNTEITKAPLSASMIKRYDEHHQDLTLLKALVRQQLPEKYKEIFFDQSKNGYAGYIDGGASQEEFYKFIKPILEKMDGTEELLVKLNREDLLRKQRTFDNGSIPHQIHLGELHAILRRQEDFYPFLKDNREKIEKILTFRIPYYVGPLARGNSRFAWMTRKSEETITPWNFEEVVDKGASAQSFIERMTNFDKNLPNEKVLPKHSLLYEYFTVYNELTKVKYVTEGMRKPAFLSGEQKKAIVDLLFKTNRKVTVKQLKEDYFKKIECFDSVEISGVEDRFNASLGTYHDLLKIIKDKDFLDNEENEDILEDIVLTLTLFEDREMIEERLKTYAHLFDDKVMKQLKRRRYTGWGRLSRKLINGIRDKQSGKTILDFLKSDGFANRNFMQLIHDDSLTFKEDIQKAQVSGQGDSLHEHIANLAGSPAIKKGILQTVKVVDELVKVMGRHKPENIVIEMARENQTTQKGQKNSRERMKRIEEGIKELGSQILKEHPVENTQLQNEKLYLYYLQNGRDMYVDQELDINRLSDYDVDHIVPQSFLKDDSIDNKVLTRSDKARGKSDNVPSEEVVKKMKNYWRQLLNAKLITQRKFDNLTKAERGGLSELDKAGFIKRQLVETRQITKHVAQILDSRMNTKYDENDKLIREVKVITLKSKLVSDFRKDFQFYKVREINNYHHAHDAYLNAVVGTALIKKYPKLESEFVYGDYKVYDVRKMIAKSEQEIGKATAKYFFYSNIMNFFKTEITLANGEIRKRPLIETNGETGEIVWDKGRDFATVRKVLSMPQVNIVKKTEVQTGGFSKESILPKRNSDKLIARKKDWDPKKYGGFDSPTVAYSVLVVAKVEKGKSKKLKSVKELLGITIMERSSFEKNPIDFLEAKGYKEVKKDLIIKLPKYSLFELENGRKRMLASAGELQKGNELALPSKYVNFLYLASHYEKLKGSPEDNEQKQLFVEQHKHYLDEIIEQISEFSKRVILADANLDKVLSAYNKHRDKPIREQAENIIHLFTLTNLGAPAAFKYFDTTIDRKRYTSTKEVLDATLIHQSITGLYETRIDLSQLGGDGGEAAAKEAAAKEAAAKEAAAKGGTVSLQDEHRLFDIPVTTSLPDVWLQDFPQAWAETGGLGRAKCQAPIIIDLKPTAVPVSIKQYPMSLEAHMGIRQHIIKFLELGVLRPCRSPWNTPLLPVKKPGTQDYRPVQDLREINKRTVDIHPTVPNPYNLLSTLKPDYSWYTVLDLKDAFFCLPLAPQSQELFAFEWKDPERGISGQLTWTRLPQGFKNSPTLFNEALHRDLTDFRTQHPEVTLLQYVDDLLLAAPTKKACTQGTRHLLQELGEKGYRASAKKAQICQTKVTYLGYILSEGKRWLTPGRIETVARIPPPRNPREVREFLGKAGFCRLFIPGFAELAAPLYALTKPSTPFTWQTEHQLAFEALKKALLSAPALGLPDTSKPFTLFLDERQGIAKGVLTQKLGPWKRPVAYLSKKLDPVAAGWPPCLRIMAATAMLVKDSAKLTLGQPLTVITPHTLEAIVRQPPDRWITNARLTHYQALLLDTDRVQFGPPVTLNPATLLPVPENQPSPHDCRQVLAETHGTREDLKDQELPDADHTWYTDGSSYLDSGTRRAGAAVVDGHNTIWAQSLPPGTSAQKAELIALTKALELSKGKKANIYTDSRYAFATAHTHGSIYERRGWLTSEGKEIKNKAEIIALLKALFLPQEVAIIHCPGHQKGQDPVAVGNRQADRVARQAAMAEVLTLATEPDNTSHITAGKRTADGSEFEKRTADGSEFESPKKKAKVE

SEQ ID NO: 1942 - protein, 2100 aa, synthetic construct
  source 1..2100: note = Description of Artificial Sequence: Synthetic polypeptide
MPAAKRVKLDGGDKKYSIGLDIGTNSVGWAVITDEYKVPSKKFKVLGNTDRHSIKKNLIGALLFDSGETAEATRLKRTARRRYTRRKNRICYLQEIFSNEMAKVDDSFFHRLEESFLVEEDKKHERHPIFGNIVDEVAYHEKYPTIYHLRKKLVDSTDKADLRLIYLALAHMIKFRGHFLIEGDLNPDNSDVDKLFIQLVQTYNQLFEENPINASGVDAKAILSARLSKSRRLENLIAQLPGEKKNGLFGNLIALSLGLTPNFKSNFDLAEDAKLQLSKDTYDDDLDNLLAQIGDQYADLFLAAKNLSDAILLSDILRVNTEITKAPLSASMIKRYDEHHQDLTLLKALVRQQLPEKYKEIFFDQSKNGYAGYIDGGASQEEFYKFIKPILEKMDGTEELLVKLNREDLLRKQRTFDNGSIPHQIHLGELHAILRRQEDFYPFLKDNREKIEKILTFRIPYYVGPLARGNSRFAWMTRKSEETITPWNFEEVVDKGASAQSFIERMTNFDKNLPNEKVLPKHSLLYEYFTVYNELTKVKYVTEGMRKPAFLSGEQKKAIVDLLFKTNRKVTVKQLKEDYFKKIECFDSVEISGVEDRFNASLGTYHDLLKIIKDKDFLDNEENEDILEDIVLTLTLFEDREMIEERLKTYAHLFDDKVMKQLKRRRYTGWGRLSRKLINGIRDKQSGKTILDFLKSDGFANRNFMQLIHDDSLTFKEDIQKAQVSGQGDSLHEHIANLAGSPAIKKGILQTVKVVDELVKVMGRHKPENIVIEMARENQTTQKGQKNSRERMKRIEEGIKELGSQILKEHPVENTQLQNEKLYLYYLQNGRDMYVDQELDINRLSDYDVDHIVPQSFLKDDSIDNKVLTRSDKARGKSDNVPSEEVVKKMKNYWRQLLNAKLITQRKFDNLTKAERGGLSELDKAGFIKRQLVETRQITKHVAQILDSRMNTKYDENDKLIREVKVITLKSKLVSDFRKDFQFYKVREINNYHHAHDAYLNAVVGTALIKKYPKLESEFVYGDYKVYDVRKMIAKSEQEIGKATAKYFFYSNIMNFFKTEITLANGEIRKRPLIETNGETGEIVWDKGRDFATVRKVLSMPQVNIVKKTEVQTGGFSKESILPKRNSDKLIARKKDWDPKKYGGFDSPTVAYSVLVVAKVEKGKSKKLKSVKELLGITIMERSSFEKNPIDFLEAKGYKEVKKDLIIKLPKYSLFELENGRKRMLASAGELQKGNELALPSKYVNFLYLASHYEKLKGSPEDNEQKQLFVEQHKHYLDEIIEQISEFSKRVILADANLDKVLSAYNKHRDKPIREQAENIIHLFTLTNLGAPAAFKYFDTTIDRKRYTSTKEVLDATLIHQSITGLYETRIDLSQLGGDGGGGSGGGPAPGGTVSLQDEHRLFDIPVTTSLPDVWLQDFPQAWAETGGLGRAKCQAPIIIDLKPTAVPVSIKQYPMSLEAHMGIRQHIIKFLELGVLRPCRSPWNTPLLPVKKPGTQDYRPVQDLREINKRTVDIHPTVPNPYNLLSTLKPDYSWYTVLDLKDAFFCLPLAPQSQELFAFEWKDPERGISGQLTWTRLPQGFKNSPTLFNEALHRDLTDFRTQHPEVTLLQYVDDLLLAAPTKKACTQGTRHLLQELGEKGYRASAKKAQICQTKVTYLGYILSEGKRWLTPGRIETVARIPPPRNPREVREFLGKAGFCRLFIPGFAELAAPLYALTKPSTPFTWQTEHQLAFEALKKALLSAPALGLPDTSKPFTLFLDERQGIAKGVLTQKLGPWKRPVAYLSKKLDPVAAGWPPCLRIMAATAMLVKDSAKLTLGQPLTVITPHTLEAIVRQPPDRWITNARLTHYQALLLDTDRVQFGPPVTLNPATLLPVPENQPSPHDCRQVLAETHGTREDLKDQELPDADHTWYTDGSSYLDSGTRRAGAAVVDGHNTIWAQSLPPGTSAQKAELIALTKALELSKGKKANIYTDSRYAFATAHTHGSIYERRGWLTSEGKEIKNKAEIIALLKALFLPQEVAIIHCPGHQKGQDPVAVGNRQADRVARQAAMAEVLTLATEPDNTSHITAGKRTADGSEFEKRTADGSEFESPKKKAKVE

SEQ ID NO: 1943 - protein, 2102 aa, synthetic construct
  source 1..2102: note = Description of Artificial Sequence: Synthetic polypeptide
MPAAKRVKLDGGDKKYSIGLDIGTNSVGWAVITDEYKVPSKKFKVLGNTDRHSIKKNLIGALLFDSGETAEATRLKRTARRRYTRRKNRICYLQEIFSNEMAKVDDSFFHRLEESFLVEEDKKHERHPIFGNIVDEVAYHEKYPTIYHLRKKLVDSTDKADLRLIYLALAHMIKFRGHFLIEGDLNPDNSDVDKLFIQLVQTYNQLFEENPINASGVDAKAILSARLSKSRRLENLIAQLPGEKKNGLFGNLIALSLGLTPNFKSNFDLAEDAKLQLSKDTYDDDLDNLLAQIGDQYADLFLAAKNLSDAILLSDILRVNTEITKAPLSASMIKRYDEHHQDLTLLKALVRQQLPEKYKEIFFDQSKNGYAGYIDGGASQEEFYKFIKPILEKMDGTEELLVKLNREDLLRKQRTFDNGSIPHQIHLGELHAILRRQEDFYPFLKDNREKIEKILTFRIPYYVGPLARGNSRFAWMTRKSEETITPWNFEEVVDKGASAQSFIERMTNFDKNLPNEKVLPKHSLLYEYFTVYNELTKVKYVTEGMRKPAFLSGEQKKAIVDLLFKTNRKVTVKQLKEDYFKKIECFDSVEISGVEDRFNASLGTYHDLLKIIKDKDFLDNEENEDILEDIVLTLTLFEDREMIEERLKTYAHLFDDKVMKQLKRRRYTGWGRLSRKLINGIRDKQSGKTILDFLKSDGFANRNFMQLIHDDSLTFKEDIQKAQVSGQGDSLHEHIANLAGSPAIKKGILQTVKVVDELVKVMGRHKPENIVIEMARENQTTQKGQKNSRERMKRIEEGIKELGSQILKEHPVENTQLQNEKLYLYYLQNGRDMYVDQELDINRLSDYDVDHIVPQSFLKDDSIDNKVLTRSDKARGKSDNVPSEEVVKKMKNYWRQLLNAKLITQRKFDNLTKAERGGLSELDKAGFIKRQLVETRQITKHVAQILDSRMNTKYDENDKLIREVKVITLKSKLVSDFRKDFQFYKVREINNYHHAHDAYLNAVVGTALIKKYPKLESEFVYGDYKVYDVRKMIAKSEQEIGKATAKYFFYSNIMNFFKTEITLANGEIRKRPLIETNGETGEIVWDKGRDFATVRKVLSMPQVNIVKKTEVQTGGFSKESILPKRNSDKLIARKKDWDPKKYGGFDSPTVAYSVLVVAKVEKGKSKKLKSVKELLGITIMERSSFEKNPIDFLEAKGYKEVKKDLIIKLPKYSLFELENGRKRMLASAGELQKGNELALPSKYVNFLYLASHYEKLKGSPEDNEQKQLFVEQHKHYLDEIIEQISEFSKRVILADANLDKVLSAYNKHRDKPIREQAENIIHLFTLTNLGAPAAFKYFDTTIDRKRYTSTKEVLDATLIHQSITGLYETRIDLSQLGGDGGGGGEAAAKGGSGGTVSLQDEHRLFDIPVTTSLPDVWLQDFPQAWAETGGLGRAKCQAPIIIDLKPTAVPVSIKQYPMSLEAHMGIRQHIIKFLELGVLRPCRSPWNTPLLPVKKPGTQDYRPVQDLREINKRTVDIHPTVPNPYNLLSTLKPDYSWYTVLDLKDAFFCLPLAPQSQELFAFEWKDPERGISGQLTWTRLPQGFKNSPTLFNEALHRDLTDFRTQHPEVTLLQYVDDLLLAAPTKKACTQGTRHLLQELGEKGYRASAKKAQICQTKVTYLGYILSEGKRWLTPGRIETVARIPPPRNPREVREFLGKAGFCRLFIPGFAELAAPLYALTKPSTPFTWQTEHQLAFEALKKALLSAPALGLPDTSKPFTLFLDERQGIAKGVLTQKLGPWKRPVAYLSKKLDPVAAGWPPCLRIMAATAMLVKDSAKLTLGQPLTVITPHTLEAIVRQPPDRWITNARLTHYQALLLDTDRVQFGPPVTLNPATLLPVPENQPSPHDCRQVLAETHGTREDLKDQELPDADHTWYTDGSSYLDSGTRRAGAAVVDGHNTIWAQSLPPGTSAQKAELIALTKALELSKGKKANIYTDSRYAFATAHTHGSIYERRGWLTSEGKEIKNKAEIIALLKALFLPQEVAIIHCPGHQKGQDPVAVGNRQADRVARQAAMAEVLTLATEPDNTSHITAGKRTADGSEFEKRTADGSEFESPKKKAKVE

SEQ ID NO: 1944 - protein, 2116 aa, synthetic construct
  source 1..2116: note = Description of Artificial Sequence: Synthetic polypeptide
MPAAKRVKLDGGDKKYSIGLDIGTNSVGWAVITDEYKVPSKKFKVLGNTDRHSIKKNLIGALLFDSGETAEATRLKRTARRRYTRRKNRICYLQEIFSNEMAKVDDSFFHRLEESFLVEEDKKHERHPIFGNIVDEVAYHEKYPTIYHLRKKLVDSTDKADLRLIYLALAHMIKFRGHFLIEGDLNPDNSDVDKLFIQLVQTYNQLFEENPINASGVDAKAILSARLSKSRRLENLIAQLPGEKKNGLFGNLIALSLGLTPNFKSNFDLAEDAKLQLSKDTYDDDLDNLLAQIGDQYADLFLAAKNLSDAILLSDILRVNTEITKAPLSASMIKRYDEHHQDLTLLKALVRQQLPEKYKEIFFDQSKNGYAGYIDGGASQEEFYKFIKPILEKMDGTEELLVKLNREDLLRKQRTFDNGSIPHQIHLGELHAILRRQEDFYPFLKDNREKIEKILTFRIPYYVGPLARGNSRFAWMTRKSEETITPWNFEEVVDKGASAQSFIERMTNFDKNLPNEKVLPKHSLLYEYFTVYNELTKVKYVTEGMRKPAFLSGEQKKAIVDLLFKTNRKVTVKQLKEDYFKKIECFDSVEISGVEDRFNASLGTYHDLLKIIKDKDFLDNEENEDILEDIVLTLTLFEDREMIEERLKTYAHLFDDKVMKQLKRRRYTGWGRLSRKLINGIRDKQSGKTILDFLKSDGFANRNFMQLIHDDSLTFKEDIQKAQVSGQGDSLHEHIANLAGSPAIKKGILQTVKVVDELVKVMGRHKPENIVIEMARENQTTQKGQKNSRERMKRIEEGIKELGSQILKEHPVENTQLQNEKLYLYYLQNGRDMYVDQELDINRLSDYDVDHIVPQSFLKDDSIDNKVLTRSDKARGKSDNVPSEEVVKKMKNYWRQLLNAKLITQRKFDNLTKAERGGLSELDKAGFIKRQLVETRQITKHVAQILDSRMNTKYDENDKLIREVKVITLKSKLVSDFRKDFQFYKVREINNYHHAHDAYLNAVVGTALIKKYPKLESEFVYGDYKVYDVRKMIAKSEQEIGKATAKYFFYSNIMNFFKTEITLANGEIRKRPLIETNGETGEIVWDKGRDFATVRKVLSMPQVNIVKKTEVQTGGFSKESILPKRNSDKLIARKKDWDPKKYGGFDSPTVAYSVLVVAKVEKGKSKKLKSVKELLGITIMERSSFEKNPIDFLEAKGYKEVKKDLIIKLPKYSLFELENGRKRMLASAGELQKGNELALPSKYVNFLYLASHYEKLKGSPEDNEQKQLFVEQHKHYLDEIIEQISEFSKRVILADANLDKVLSAYNKHRDKPIREQAENIIHLFTLTNLGAPAAFKYFDTTIDRKRYTSTKEVLDATLIHQSITGLYETRIDLSQLGGDGGGGGGSGGGGSGGGGSGGGGSGGGGSGGTVSLQDEHRLFDIPVTTSLPDVWLQDFPQAWAETGGLGRAKCQAPIIIDLKPTAVPVSIKQYPMSLEAHMGIRQHIIKFLELGVLRPCRSPWNTPLLPVKKPGTQDYRPVQDLREINKRTVDIHPTVPNPYNLLSTLKPDYSWYTVLDLKDAFFCLPLAPQSQELFAFEWKDPERGISGQLTWTRLPQGFKNSPTLFNEALHRDLTDFRTQHPEVTLLQYVDDLLLAAPTKKACTQGTRHLLQELGEKGYRASAKKAQICQTKVTYLGYILSEGKRWLTPGRIETVARIPPPRNPREVREFLGKAGFCRLFIPGFAELAAPLYALTKPSTPFTWQTEHQLAFEALKKALLSAPALGLPDTSKPFTLFLDERQGIAKGVLTQKLGPWKRPVAYLSKKLDPVAAGWPPCLRIMAATAMLVKDSAKLTLGQPLTVITPHTLEAIVRQPPDRWITNARLTHYQALLLDTDRVQFGPPVTLNPATLLPVPENQPSPHDCRQVLAETHGTREDLKDQELPDADHTWYTDGSSYLDSGTRRAGAAVVDGHNTIWAQSLPPGTSAQKAELIALTKALELSKGKKANIYTDSRYAFATAHTHGSIYERRGWLTSEGKEIKNKAEIIALLKALFLPQEVAIIHCPGHQKGQDPVAVGNRQADRVARQAAMAEVLTLATEPDNTSHITAGKRTADGSEFEKRTADGSEFESPKKKAKVE

SEQ ID NO: 1945 - protein, 2096 aa, synthetic construct
  source 1..2096: note = Description of Artificial Sequence: Synthetic polypeptide
MPAAKRVKLDGGDKKYSIGLDIGTNSVGWAVITDEYKVPSKKFKVLGNTDRHSIKKNLIGALLFDSGETAEATRLKRTARRRYTRRKNRICYLQEIFSNEMAKVDDSFFHRLEESFLVEEDKKHERHPIFGNIVDEVAYHEKYPTIYHLRKKLVDSTDKADLRLIYLALAHMIKFRGHFLIEGDLNPDNSDVDKLFIQLVQTYNQLFEENPINASGVDAKAILSARLSKSRRLENLIAQLPGEKKNGLFGNLIALSLGLTPNFKSNFDLAEDAKLQLSKDTYDDDLDNLLAQIGDQYADLFLAAKNLSDAILLSDILRVNTEITKAPLSASMIKRYDEHHQDLTLLKALVRQQLPEKYKEIFFDQSKNGYAGYIDGGASQEEFYKFIKPILEKMDGTEELLVKLNREDLLRKQRTFDNGSIPHQIHLGELHAILRRQEDFYPFLKDNREKIEKILTFRIPYYVGPLARGNSRFAWMTRKSEETITPWNFEEVVDKGASAQSFIERMTNFDKNLPNEKVLPKHSLLYEYFTVYNELTKVKYVTEGMRKPAFLSGEQKKAIVDLLFKTNRKVTVKQLKEDYFKKIECFDSVEISGVEDRFNASLGTYHDLLKIIKDKDFLDNEENEDILEDIVLTLTLFEDREMIEERLKTYAHLFDDKVMKQLKRRRYTGWGRLSRKLINGIRDKQSGKTILDFLKSDGFANRNFMQLIHDDSLTFKEDIQKAQVSGQGDSLHEHIANLAGSPAIKKGILQTVKVVDELVKVMGRHKPENIVIEMARENQTTQKGQKNSRERMKRIEEGIKELGSQILKEHPVENTQLQNEKLYLYYLQNGRDMYVDQELDINRLSDYDVDHIVPQSFLKDDSIDNKVLTRSDKARGKSDNVPSEEVVKKMKNYWRQLLNAKLITQRKFDNLTKAERGGLSELDKAGFIKRQLVETRQITKHVAQILDSRMNTKYDENDKLIREVKVITLKSKLVSDFRKDFQFYKVREINNYHHAHDAYLNAVVGTALIKKYPKLESEFVYGDYKVYDVRKMIAKSEQEIGKATAKYFFYSNIMNFFKTEITLANGEIRKRPLIETNGETGEIVWDKGRDFATVRKVLSMPQVNIVKKTEVQTGGFSKESILPKRNSDKLIARKKDWDPKKYGGFDSPTVAYSVLVVAKVEKGKSKKLKSVKELLGITIMERSSFEKNPIDFLEAKGYKEVKKDLIIKLPKYSLFELENGRKRMLASAGELQKGNELALPSKYVNFLYLASHYEKLKGSPEDNEQKQLFVEQHKHYLDEIIEQISEFSKRVILADANLDKVLSAYNKHRDKPIREQAENIIHLFTLTNLGAPAAFKYFDTTIDRKRYTSTKEVLDATLIHQSITGLYETRIDLSQLGGDGGPAPAPGGTVSLQDEHRLFDIPVTTSLPDVWLQDFPQAWAETGGLGRAKCQAPIIIDLKPTAVPVSIKQYPMSLEAHMGIRQHIIKFLELGVLRPCRSPWNTPLLPVKKPGTQDYRPVQDLREINKRTVDIHPTVPNPYNLLSTLKPDYSWYTVLDLKDAFFCLPLAPQSQELFAFEWKDPERGISGQLTWTRLPQGFKNSPTLFNEALHRDLTDFRTQHPEVTLLQYVDDLLLAAPTKKACTQGTRHLLQELGEKGYRASAKKAQICQTKVTYLGYILSEGKRWLTPGRIETVARIPPPRNPREVREFLGKAGFCRLFIPGFAELAAPLYALTKPSTPFTWQTEHQLAFEALKKALLSAPALGLPDTSKPFTLFLDERQGIAKGVLTQKLGPWKRPVAYLSKKLDPVAAGWPPCLRIMAATAMLVKDSAKLTLGQPLTVITPHTLEAIVRQPPDRWITNARLTHYQALLLDTDRVQFGPPVTLNPATLLPVPENQPSPHDCRQVLAETHGTREDLKDQELPDADHTWYTDGSSYLDSGTRRAGAAVVDGHNTIWAQSLPPGTSAQKAELIALTKALELSKGKKANIYTDSRYAFATAHTHGSIYERRGWLTSEGKEIKNKAEIIALLKALFLPQEVAIIHCPGHQKGQDPVAVGNRQADRVARQAAMAEVLTLATEPDNTSHITAGKRTADGSEFEKRTADGSEFESPKKKAKVE

SEQ ID NO: 1946 - protein, 2116 aa, synthetic construct
  source 1..2116: note = Description of Artificial Sequence: Synthetic polypeptide
MPAAKRVKLDGGDKKYSIGLDIGTNSVGWAVITDEYKVPSKKFKVLGNTDRHSIKKNLIGALLFDSGETAEATRLKRTARRRYTRRKNRICYLQEIFSNEMAKVDDSFFHRLEESFLVEEDKKHERHPIFGNIVDEVAYHEKYPTIYHLRKKLVDSTDKADLRLIYLALAHMIKFRGHFLIEGDLNPDNSDVDKLFIQLVQTYNQLFEENPINASGVDAKAILSARLSKSRRLENLIAQLPGEKKNGLFGNLIALSLGLTPNFKSNFDLAEDAKLQLSKDTYDDDLDNLLAQIGDQYADLFLAAKNLSDAILLSDILRVNTEITKAPLSASMIKRYDEHHQDLTLLKALVRQQLPEKYKEIFFDQSKNGYAGYIDGGASQEEFYKFIKPILEKMDGTEELLVKLNREDLLRKQRTFDNGSIPHQIHLGELHAILRRQEDFYPFLKDNREKIEKILTFRIPYYVGPLARGNSRFAWMTRKSEETITPWNFEEVVDKGASAQSFIERMTNFDKNLPNEKVLPKHSLLYEYFTVYNELTKVKYVTEGMRKPAFLSGEQKKAIVDLLFKTNRKVTVKQLKEDYFKKIECFDSVEISGVEDRFNASLGTYHDLLKIIKDKDFLDNEENEDILEDIVLTLTLFEDREMIEERLKTYAHLFDDKVMKQLKRRRYTGWGRLSRKLINGIRDKQSGKTILDFLKSDGFANRNFMQLIHDDSLTFKEDIQKAQVSGQGDSLHEHIANLAGSPAIKKGILQTVKVVDELVKVMGRHKPENIVIEMARENQTTQKGQKNSRERMKRIEEGIKELGSQILKEHPVENTQLQNEKLYLYYLQNGRDMYVDQELDINRLSDYDVDHIVPQSFLKDDSIDNKVLTRSDKARGKSDNVPSEEVVKKMKNYWRQLLNAKLITQRKFDNLTKAERGGLSELDKAGFIKRQLVETRQITKHVAQILDSRMNTKYDENDKLIREVKVITLKSKLVSDFRKDFQFYKVREINNYHHAHDAYLNAVVGTALIKKYPKLESEFVYGDYKVYDVRKMIAKSEQEIGKATAKYFFYSNIMNFFKTEITLANGEIRKRPLIETNGETGEIVWDKGRDFATVRKVLSMPQVNIVKKTEVQTGGFSKESILPKRNSDKLIARKKDWDPKKYGGFDSPTVAYSVLVVAKVEKGKSKKLKSVKELLGITIMERSSFEKNPIDFLEAKGYKEVKKDLIIKLPKYSLFELENGRKRMLASAGELQKGNELALPSKYVNFLYLASHYEKLKGSPEDNEQKQLFVEQHKHYLDEIIEQISEFSKRVILADANLDKVLSAYNKHRDKPIREQAENIIHLFTLTNLGAPAAFKYFDTTIDRKRYTSTKEVLDATLIHQSITGLYETRIDLSQLGGDGGEAAAKEAAAKEAAAKEAAAKEAAAKGGTVSLQDEHRLFDIPVTTSLPDVWLQDFPQAWAETGGLGRAKCQAPIIIDLKPTAVPVSIKQYPMSLEAHMGIRQHIIKFLELGVLRPCRSPWNTPLLPVKKPGTQDYRPVQDLREINKRTVDIHPTVPNPYNLLSTLKPDYSWYTVLDLKDAFFCLPLAPQSQELFAFEWKDPERGISGQLTWTRLPQGFKNSPTLFNEALHRDLTDFRTQHPEVTLLQYVDDLLLAAPTKKACTQGTRHLLQELGEKGYRASAKKAQICQTKVTYLGYILSEGKRWLTPGRIETVARIPPPRNPREVREFLGKAGFCRLFIPGFAELAAPLYALTKPSTPFTWQTEHQLAFEALKKALLSAPALGLPDTSKPFTLFLDERQGIAKGVLTQKLGPWKRPVAYLSKKLDPVAAGWPPCLRIMAATAMLVKDSAKLTLGQPLTVITPHTLEAIVRQPPDRWITNARLTHYQALLLDTDRVQFGPPVTLNPATLLPVPENQPSPHDCRQVLAETHGTREDLKDQELPDADHTWYTDGSSYLDSGTRRAGAAVVDGHNTIWAQSLPPGTSAQKAELIALTKALELSKGKKANIYTDSRYAFATAHTHGSIYERRGWLTSEGKEIKNKAEIIALLKALFLPQEVAIIHCPGHQKGQDPVAVGNRQADRVARQAAMAEVLTLATEPDNTSHITAGKRTADGSEFEKRTADGSEFESPKKKAKVE

SEQ ID NO: 1947 - protein, 2106 aa, synthetic construct
  source 1..2106: note = Description of Artificial Sequence: Synthetic polypeptide
MPAAKRVKLDGGDKKYSIGLDIGTNSVGWAVITDEYKVPSKKFKVLGNTDRHSIKKNLIGALLFDSGETAEATRLKRTARRRYTRRKNRICYLQEIFSNEMAKVDDSFFHRLEESFLVEEDKKHERHPIFGNIVDEVAYHEKYPTIYHLRKKLVDSTDKADLRLIYLALAHMIKFRGHFLIEGDLNPDNSDVDKLFIQLVQTYNQLFEENPINASGVDAKAILSARLSKSRRLENLIAQLPGEKKNGLFGNLIALSLGLTPNFKSNFDLAEDAKLQLSKDTYDDDLDNLLAQIGDQYADLFLAAKNLSDAILLSDILRVNTEITKAPLSASMIKRYDEHHQDLTLLKALVRQQLPEKYKEIFFDQSKNGYAGYIDGGASQEEFYKFIKPILEKMDGTEELLVKLNREDLLRKQRTFDNGSIPHQIHLGELHAILRRQEDFYPFLKDNREKIEKILTFRIPYYVGPLARGNSRFAWMTRKSEETITPWNFEEVVDKGASAQSFIERMTNFDKNLPNEKVLPKHSLLYEYFTVYNELTKVKYVTEGMRKPAFLSGEQKKAIVDLLFKTNRKVTVKQLKEDYFKKIECFDSVEISGVEDRFNASLGTYHDLLKIIKDKDFLDNEENEDILEDIVLTLTLFEDREMIEERLKTYAHLFDDKVMKQLKRRRYTGWGRLSRKLINGIRDKQSGKTILDFLKSDGFANRNFMQLIHDDSLTFKEDIQKAQVSGQGDSLHEHIANLAGSPAIKKGILQTVKVVDELVKVMGRHKPENIVIEMARENQTTQKGQKNSRERMKRIEEGIKELGSQILKEHPVENTQLQNEKLYLYYLQNGRDMYVDQELDINRLSDYDVDHIVPQSFLKDDSIDNKVLTRSDKARGKSDNVPSEEVVKKMKNYWRQLLNAKLITQRKFDNLTKAERGGLSELDKAGFIKRQLVETRQITKHVAQILDSRMNTKYDENDKLIREVKVITLKSKLVSDFRKDFQFYKVREINNYHHAHDAYLNAVVGTALIKKYPKLESEFVYGDYKVYDVRKMIAKSEQEIGKATAKYFFYSNIMNFFKTEITLANGEIRKRPLIETNGETGEIVWDKGRDFATVRKVLSMPQVNIVKKTEVQTGGFSKESILPKRNSDKLIARKKDWDPKKYGGFDSPTVAYSVLVVAKVEKGKSKKLKSVKELLGITIMERSSFEKNPIDFLEAKGYKEVKKDLIIKLPKYSLFELENGRKRMLASAGELQKGNELALPSKYVNFLYLASHYEKLKGSPEDNEQKQLFVEQHKHYLDEIIEQISEFSKRVILADANLDKVLSAYNKHRDKPIREQAENIIHLFTLTNLGAPAAFKYFDTTIDRKRYTSTKEVLDATLIHQSITGLYETRIDLSQLGGDGGEAAAKGGGGSEAAAKGGTVSLQDEHRLFDIPVTTSLPDVWLQDFPQAWAETGGLGRAKCQAPIIIDLKPTAVPVSIKQYPMSLEAHMGIRQHIIKFLELGVLRPCRSPWNTPLLPVKKPGTQDYRPVQDLREINKRTVDIHPTVPNPYNLLSTLKPDYSWYTVLDLKDAFFCLPLAPQSQELFAFEWKDPERGISGQLTWTRLPQGFKNSPTLFNEALHRDLTDFRTQHPEVTLLQYVDDLLLAAPTKKACTQGTRHLLQELGEKGYRASAKKAQICQTKVTYLGYILSEGKRWLTPGRIETVARIPPPRNPREVREFLGKAGFCRLFIPGFAELAAPLYALTKPSTPFTWQTEHQLAFEALKKALLSAPALGLPDTSKPFTLFLDERQGIAKGVLTQKLGPWKRPVAYLSKKLDPVAAGWPPCLRIMAATAMLVKDSAKLTLGQPLTVITPHTLEAIVRQPPDRWITNARLTHYQALLLDTDRVQFGPPVTLNPATLLPVPENQPSPHDCRQVLAETHGTREDLKDQELPDADHTWYTDGSSYLDSGTRRAGAAVVDGHNTIWAQSLPPGTSAQKAELIALTKALELSKGKKANIYTDSRYAFATAHTHGSIYERRGWLTSEGKEIKNKAEIIALLKALFLPQEVAIIHCPGHQKGQDPVAVGNRQADRVARQAAMAEVLTLATEPDNTSHITAGKRTADGSEFEKRTADGSEFESPKKKAKVE

SEQ ID NO: 1948 - protein, 2106 aa, synthetic construct
  source 1..2106: note = Description of Artificial Sequence: Synthetic polypeptide
MPAAKRVKLDGGDKKYSIGLDIGTNSVGWAVITDEYKVPSKKFKVLGNTDRHSIKKNLIGALLFDSGETAEATRLKRTARRRYTRRKNRICYLQEIFSNEMAKVDDSFFHRLEESFLVEEDKKHERHPIFGNIVDEVAYHEKYPTIYHLRKKLVDSTDKADLRLIYLALAHMIKFRGHFLIEGDLNPDNSDVDKLFIQLVQTYNQLFEENPINASGVDAKAILSARLSKSRRLENLIAQLPGEKKNGLFGNLIALSLGLTPNFKSNFDLAEDAKLQLSKDTYDDDLDNLLAQIGDQYADLFLAAKNLSDAILLSDILRVNTEITKAPLSASMIKRYDEHHQDLTLLKALVRQQLPEKYKEIFFDQSKNGYAGYIDGGASQEEFYKFIKPILEKMDGTEELLVKLNREDLLRKQRTFDNGSIPHQIHLGELHAILRRQEDFYPFLKDNREKIEKILTFRIPYYVGPLARGNSRFAWMTRKSEETITPWNFEEVVDKGASAQSFIERMTNFDKNLPNEKVLPKHSLLYEYFTVYNELTKVKYVTEGMRKPAFLSGEQKKAIVDLLFKTNRKVTVKQLKEDYFKKIECFDSVEISGVEDRFNASLGTYHDLLKIIKDKDFLDNEENEDILEDIVLTLTLFEDREMIEERLKTYAHLFDDKVMKQLKRRRYTGWGRLSRKLINGIRDKQSGKTILDFLKSDGFANRNFMQLIHDDSLTFKEDIQKAQVSGQGDSLHEHIANLAGSPAIKKGILQTVKVVDELVKVMGRHKPENIVIEMARENQTTQKGQKNSRERMKRIEEGIKELGSQILKEHPVENTQLQNEKLYLYYLQNGRDMYVDQELDINRLSDYDVDHIVPQSFLKDDSIDNKVLTRSDKARGKSDNVPSEEVVKKMKNYWRQLLNAKLITQRKFDNLTKAERGGLSELDKAGFIKRQLVETRQITKHVAQILDSRMNTKYDENDKLIREVKVITLKSKLVSDFRKDFQFYKVREINNYHHAHDAYLNAVVGTALIKKYPKLESEFVYGDYKVYDVRKMIAKSEQEIGKATAKYFFYSNIMNFFKTEITLANGEIRKRPLIETNGETGEIVWDKGRDFATVRKVLSMPQVNIVKKTEVQTGGFSKESILPKRNSDKLIARKKDWDPKKYGGFDSPTVAYSVLVVAKVEKGKSKKLKSVKELLGITIMERSSFEKNPIDFLEAKGYKEVKKDLIIKLPKYSLFELENGRKRMLASAGELQKGNELALPSKYVNFLYLASHYEKLKGSPEDNEQKQLFVEQHKHYLDEIIEQISEFSKRVILADANLDKVLSAYNKHRDKPIREQAENIIHLFTLTNLGAPAAFKYFDTTIDRKRYTSTKEVLDATLIHQSITGLYETRIDLSQLGGDGGGSSGSSGSSGSSGSSGGTVSLQDEHRLFDIPVTTSLPDVWLQDFPQAWAETGGLGRAKCQAPIIIDLKPTAVPVSIKQYPMSLEAHMGIRQHIIKFLELGVLRPCRSPWNTPLLPVKKPGTQDYRPVQDLREINKRTVDIHPTVPNPYNLLSTLKPDYSWYTVLDLKDAFFCLPLAPQSQELFAFEWKDPERGISGQLTWTRLPQGFKNSPTLFNEALHRDLTDFRTQHPEVTLLQYVDDLLLAAPTKKACTQGTRHLLQELGEKGYRASAKKAQICQTKVTYLGYILSEGKRWLTPGRIETVARIPPPRNPREVREFLGKAGFCRLFIPGFAELAAPLYALTKPSTPFTWQTEHQLAFEALKKALLSAPALGLPDTSKPFTLFLDERQGIAKGVLTQKLGPWKRPVAYLSKKLDPVAAGWPPCLRIMAATAMLVKDSAKLTLGQPLTVITPHTLEAIVRQPPDRWITNARLTHYQALLLDTDRVQFGPPVTLNPATLLPVPENQPSPHDCRQVLAETHGTREDLKDQELPDADHTWYTDGSSYLDSGTRRAGAAVVDGHNTIWAQSLPPGTSAQKAELIALTKALELSKGKKANIYTDSRYAFATAHTHGSIYERRGWLTSEGKEIKNKAEIIALLKALFLPQEVAIIHCPGHQKGQDPVAVGNRQADRVARQAAMAEVLTLATEPDNTSHITAGKRTADGSEFEKRTADGSEFESPKKKAKVE

SEQ ID NO: 1949 - protein, 2106 aa, synthetic construct
  source 1..2106: note = Description of Artificial Sequence: Synthetic polypeptide
MPAAKRVKLDGGDKKYSIGLDIGTNSVGWAVITDEYKVPSKKFKVLGNTDRHSIKKNLIGALLFDSGETAEATRLKRTARRRYTRRKNRICYLQEIFSNEMAKVDDSFFHRLEESFLVEEDKKHERHPIFGNIVDEVAYHEKYPTIYHLRKKLVDSTDKADLRLIYLALAHMIKFRGHFLIEGDLNPDNSDVDKLFIQLVQTYNQLFEENPINASGVDAKAILSARLSKSRRLENLIAQLPGEKKNGLFGNLIALSLGLTPNFKSNFDLAEDAKLQLSKDTYDDDLDNLLAQIGDQYADLFLAAKNLSDAILLSDILRVNTEITKAPLSASMIKRYDEHHQDLTLLKALVRQQLPEKYKEIFFDQSKNGYAGYIDGGASQEEFYKFIKPILEKMDGTEELLVKLNREDLLRKQRTFDNGSIPHQIHLGELHAILRRQEDFYPFLKDNREKIEKILTFRIPYYVGPLARGNSRFAWMTRKSEETITPWNFEEVVDKGASAQSFIERMTNFDKNLPNEKVLPKHSLLYEYFTVYNELTKVKYVTEGMRKPAFLSGEQKKAIVDLLFKTNRKVTVKQLKEDYFKKIECFDSVEISGVEDRFNASLGTYHDLLKIIKDKDFLDNEENEDILEDIVLTLTLFEDREMIEERLKTYAHLFDDKVMKQLKRRRYTGWGRLSRKLINGIRDKQSGKTILDFLKSDGFANRNFMQLIHDDSLTFKEDIQKAQVSGQGDSLHEHIANLAGSPAIKKGILQTVKVVDELVKVMGRHKPENIVIEMARENQTTQKGQKNSRERMKRIEEGIKELGSQILKEHPVENTQLQNEKLYLYYLQNGRDMYVDQELDINRLSDYDVDHIVPQSFLKDDSIDNKVLTRSDKARGKSDNVPSEEVVKKMKNYWRQLLNAKLITQRKFDNLTKAERGGLSELDKAGFIKRQLVETRQITKHVAQILDSRMNTKYDENDKLIREVKVITLKSKLVSDFRKDFQFYKVREINNYHHAHDAYLNAVVGTALIKKYPKLESEFVYGDYKVYDVRKMIAKSEQEIGKATAKYFFYSNIMNFFKTEITLANGEIRKRPLIETNGETGEIVWDKGRDFATVRKVLSMPQVNIVKKTEVQTGGFSKESILPKRNSDKLIARKKDWDPKKYGGFDSPTVAYSVLVVAKVEKGKSKKLKSVKELLGITIMERSSFEKNPIDFLEAKGYKEVKKDLIIKLPKYSLFELENGRKRMLASAGELQKGNELALPSKYVNFLYLASHYEKLKGSPEDNEQKQLFVEQHKHYLDEIIEQISEFSKRVILADANLDKVLSAYNKHRDKPIREQAENIIHLFTLTNLGAPAAFKYFDTTIDRKRYTSTKEVLDATLIHQSITGLYETRIDLSQLGGDGGGGGGSEAAAKGGGGSGGTVSLQDEHRLFDIPVTTSLPDVWLQDFPQAWAETGGLGRAKCQAPIIIDLKPTAVPVSIKQYPMSLEAHMGIRQHIIKFLELGVLRPCRSPWNTPLLPVKKPGTQDYRPVQDLREINKRTVDIHPTVPNPYNLLSTLKPDYSWYTVLDLKDAFFCLPLAPQSQELFAFEWKDPERGISGQLTWTRLPQGFKNSPTLFNEALHRDLTDFRTQHPEVTLLQYVDDLLLAAPTKKACTQGTRHLLQELGEKGYRASAKKAQICQTKVTYLGYILSEGKRWLTPGRIETVARIPPPRNPREVREFLGKAGFCRLFIPGFAELAAPLYALTKPSTPFTWQTEHQLAFEALKKALLSAPALGLPDTSKPFTLFLDERQGIAKGVLTQKLGPWKRPVAYLSKKLDPVAAGWPPCLRIMAATAMLVKDSAKLTLGQPLTVITPHTLEAIVRQPPDRWITNARLTHYQALLLDTDRVQFGPPVTLNPATLLPVPENQPSPHDCRQVLAETHGTREDLKDQELPDADHTWYTDGSSYLDSGTRRAGAAVVDGHNTIWAQSLPPGTSAQKAELIALTKALELSKGKKANIYTDSRYAFATAHTHGSIYERRGWLTSEGKEIKNKAEIIALLKALFLPQEVAIIHCPGHQKGQDPVAVGNRQADRVARQAAMAEVLTLATEPDNTSHITAGKRTADGSEFEKRTADGSEFESPKKKAKVE

SEQ ID NO: 1950 - protein, 2097 aa, synthetic construct
  source 1..2097: note = Description of Artificial Sequence: Synthetic polypeptide
MPAAKRVKLDGGDKKYSIGLDIGTNSVGWAVITDEYKVPSKKFKVLGNTDRHSIKKNLIGALLFDSGETAEATRLKRTARRRYTRRKNRICYLQEIFSNEMAKVDDSFFHRLEESFLVEEDKKHERHPIFGNIVDEVAYHEKYPTIYHLRKKLVDSTDKADLRLIYLALAHMIKFRGHFLIEGDLNPDNSDVDKLFIQLVQTYNQLFEENPINASGVDAKAILSARLSKSRRLENLIAQLPGEKKNGLFGNLIALSLGLTPNFKSNFDLAEDAKLQLSKDTYDDDLDNLLAQIGDQYADLFLAAKNLSDAILLSDILRVNTEITKAPLSASMIKRYDEHHQDLTLLKALVRQQLPEKYKEIFFDQSKNGYAGYIDGGASQEEFYKFIKPILEKMDGTEELLVKLNREDLLRKQRTFDNGSIPHQIHLGELHAILRRQEDFYPFLKDNREKIEKILTFRIPYYVGPLARGNSRFAWMTRKSEETITPWNFEEVVDKGASAQSFIERMTNFDKNLPNEKVLPKHSLLYEYFTVYNELTKVKYVTEGMRKPAFLSGEQKKAIVDLLFKTNRKVTVKQLKEDYFKKIECFDSVEISGVEDRFNASLGTYHDLLKIIKDKDFLDNEENEDILEDIVLTLTLFEDREMIEERLKTYAHLFDDKVMKQLKRRRYTGWGRLSRKLINGIRDKQSGKTILDFLKSDGFANRNFMQLIHDDSLTFKEDIQKAQVSGQGDSLHEHIANLAGSPAIKKGILQTVKVVDELVKVMGRHKPENIVIEMARENQTTQKGQKNSRERMKRIEEGIKELGSQILKEHPVENTQLQNEKLYLYYLQNGRDMYVDQELDINRLSDYDVDHIVPQSFLKDDSIDNKVLTRSDKARGKSDNVPSEEVVKKMKNYWRQLLNAKLITQRKFDNLTKAERGGLSELDKAGFIKRQLVETRQITKHVAQILDSRMNTKYDENDKLIREVKVITLKSKLVSDFRKDFQFYKVREINNYHHAHDAYLNAVVGTALIKKYPKLESEFVYGDYKVYDVRKMIAKSEQEIGKATAKYFFYSNIMNFFKTEITLANGEIRKRPLIETNGETGEIVWDKGRDFATVRKVLSMPQVNIVKKTEVQTGGFSKESILPKRNSDKLIARKKDWDPKKYGGFDSPTVAYSVLVVAKVEKGKSKKLKSVKELLGITIMERSSFEKNPIDFLEAKGYKEVKKDLIIKLPKYSLFELENGRKRMLASAGELQKGNELALPSKYVNFLYLASHYEKLKGSPEDNEQKQLFVEQHKHYLDEIIEQISEFSKRVILADANLDKVLSAYNKHRDKPIREQAENIIHLFTLTNLGAPAAFKYFDTTIDRKRYTSTKEVLDATLIHQSITGLYETRIDLSQLGGDGGGGGGSSGGTVSLQDEHRLFDIPVTTSLPDVWLQDFPQAWAETGGLGRAKCQAPIIIDLKPTAVPVSIKQYPMSLEAHMGIRQHIIKFLELGVLRPCRSPWNTPLLPVKKPGTQDYRPVQDLREINKRTVDIHPTVPNPYNLLSTLKPDYSWYTVLDLKDAFFCLPLAPQSQELFAFEWKDPERGISGQLTWTRLPQGFKNSPTLFNEALHRDLTDFRTQHPEVTLLQYVDDLLLAAPTKKACTQGTRHLLQELGEKGYRASAKKAQICQTKVTYLGYILSEGKRWLTPGRIETVARIPPPRNPREVREFLGKAGFCRLFIPGFAELAAPLYALTKPSTPFTWQTEHQLAFEALKKALLSAPALGLPDTSKPFTLFLDERQGIAKGVLTQKLGPWKRPVAYLSKKLDPVAAGWPPCLRIMAATAMLVKDSAKLTLGQPLTVITPHTLEAIVRQPPDRWITNARLTHYQALLLDTDRVQFGPPVTLNPATLLPVPENQPSPHDCRQVLAETHGTREDLKDQELPDADHTWYTDGSSYLDSGTRRAGAAVVDGHNTIWAQSLPPGTSAQKAELIALTKALELSKGKKANIYTDSRYAFATAHTHGSIYERRGWLTSEGKEIKNKAEIIALLKALFLPQEVAIIHCPGHQKGQDPVAVGNRQADRVARQAAMAEVLTLATEPDNTSHITAGKRTADGSEFEKRTADGSEFESPKKKAKVE

SEQ ID NO: 1951 - protein, 2102 aa, synthetic construct
  source 1..2102: note = Description of Artificial Sequence: Synthetic polypeptide
MPAAKRVKLDGGDKKYSIGLDIGTNSVGWAVITDEYKVPSKKFKVLGNTDRHSIKKNLIGALLFDSGETAEATRLKRTARRRYTRRKNRICYLQEIFSNEMAKVDDSFFHRLEESFLVEEDKKHERHPIFGNIVDEVAYHEKYPTIYHLRKKLVDSTDKADLRLIYLALAHMIKFRGHFLIEGDLNPDNSDVDKLFIQLVQTYNQLFEENPINASGVDAKAILSARLSKSRRLENLIAQLPGEKKNGLFGNLIALSLGLTPNFKSNFDLAEDAKLQLSKDTYDDDLDNLLAQIGDQYADLFLAAKNLSDAILLSDILRVNTEITKAPLSASMIKRYDEHHQDLTLLKALVRQQLPEKYKEIFFDQSKNGYAGYIDGGASQEEFYKFIKPILEKMDGTEELLVKLNREDLLRKQRTFDNGSIPHQIHLGELHAILRRQEDFYPFLKDNREKIEKILTFRIPYYVGPLARGNSRFAWMTRKSEETITPWNFEEVVDKGASAQSFIERMTNFDKNLPNEKVLPKHSLLYEYFTVYNELTKVKYVTEGMRKPAFLSGEQKKAIVDLLFKTNRKVTVKQLKEDYFKKIECFDSVEISGVEDRFNASLGTYHDLLKIIKDKDFLDNEENEDILEDIVLTLTLFEDREMIEERLKTYAHLFDDKVMKQLKRRRYTGWGRLSRKLINGIRDKQSGKTILDFLKSDGFANRNFMQLIHDDSLTFKEDIQKAQVSGQGDSLHEHIANLAGSPAIKKGILQTVKVVDELVKVMGRHKPENIVIEMARENQTTQKGQKNSRERMKRIEEGIKELGSQILKEHPVENTQLQNEKLYLYYLQNGRDMYVDQELDINRLSDYDVDHIVPQSFLKDDSIDNKVLTRSDKARGKSDNVPSEEVVKKMKNYWRQLLNAKLITQRKFDNLTKAERGGLSELDKAGFIKRQLVETRQITKHVAQILDSRMNTKYDENDKLIREVKVITLKSKLVSDFRKDFQFYKVREINNYHHAHDAYLNAVVGTALIKKYPKLESEFVYGDYKVYDVRKMIAKSEQEIGKATAKYFFYSNIMNFFKTEITLANGEIRKRPLIETNGETGEIVWDKGRDFATVRKVLSMPQVNIVKKTEVQTGGFSKESILPKRNSDKLIARKKDWDPKKYGGFDSPTVAYSVLVVAKVEKGKSKKLKSVKELLGITIMERSSFEKNPIDFLEAKGYKEVKKDLIIKLPKYSLFELENGRKRMLASAGELQKGNELALPSKYVNFLYLASHYEKLKGSPEDNEQKQLFVEQHKHYLDEIIEQISEFSKRVILADANLDKVLSAYNKHRDKPIREQAENIIHLFTLTNLGAPAAFKYFDTTIDRKRYTSTKEVLDATLIHQSITGLYETRIDLSQLGGDGGGGSGSSEAAAKGGTVSLQDEHRLFDIPVTTSLPDVWLQDFPQAWAETGGLGRAKCQAPIIIDLKPTAVPVSIKQYPMSLEAHMGIRQHIIKFLELGVLRPCRSPWNTPLLPVKKPGTQDYRPVQDLREINKRTVDIHPTVPNPYNLLSTLKPDYSWYTVLDLKDAFFCLPLAPQSQELFAFEWKDPERGISGQLTWTRLPQGFKNSPTLFNEALHRDLTDFRTQHPEVTLLQYVDDLLLAAPTKKACTQGTRHLLQELGEKGYRASAKKAQICQTKVTYLGYILSEGKRWLTPGRIETVARIPPPRNPREVREFLGKAGFCRLFIPGFAELAAPLYALTKPSTPFTWQTEHQLAFEALKKALLSAPALGLPDTSKPFTLFLDERQGIAKGVLTQKLGPWKRPVAYLSKKLDPVAAGWPPCLRIMAATAMLVKDSAKLTLGQPLTVITPHTLEAIVRQPPDRWITNARLTHYQALLLDTDRVQFGPPVTLNPATLLPVPENQPSPHDCRQVLAETHGTREDLKDQELPDADHTWYTDGSSYLDSGTRRAGAAVVDGHNTIWAQSLPPGTSAQKAELIALTKALELSKGKKANIYTDSRYAFATAHTHGSIYERRGWLTSEGKEIKNKAEIIALLKALFLPQEVAIIHCPGHQKGQDPVAVGNRQADRVARQAAMAEVLTLATEPDNTSHITAGKRTADGSEFEKRTADGSEFESPKKKAKVE

SEQ ID NO: 1952 - protein, 2102 aa, synthetic construct
  source 1..2102: note = Description of Artificial Sequence: Synthetic polypeptide
MPAAKRVKLDGGDKKYSIGLDIGTNSVGWAVITDEYKVPSKKFKVLGNTDRHSIKKNLIGALLFDSGETAEATRLKRTARRRYTRRKNRICYLQEIFSNEMAKVDDSFFHRLEESFLVEEDKKHERHPIFGNIVDEVAYHEKYPTIYHLRKKLVDSTDKADLRLIYLALAHMIKFRGHFLIEGDLNPDNSDVDKLFIQLVQTYNQLFEENPINASGVDAKAILSARLSKSRRLENLIAQLPGEKKNGLFGNLIALSLGLTPNFKSNFDLAEDAKLQLSKDTYDDDLDNLLAQIGDQYADLFLAAKNLSDAILLSDILRVNTEITKAPLSASMIKRYDEHHQDLTLLKALVRQQLPEKYKEIFFDQSKNGYAGYIDGGASQEEFYKFIKPILEKMDGTEELLVKLNREDLLRKQRTFDNGSIPHQIHLGELHAILRRQEDFYPFLKDNREKIEKILTFRIPYYVGPLARGNSRFAWMTRKSEETITPWNFEEVVDKGASAQSFIERMTNFDKNLPNEKVLPKHSLLYEYFTVYNELTKVKYVTEGMRKPAFLSGEQKKAIVDLLFKTNRKVTVKQLKEDYFKKIECFDSVEISGVEDRFNASLGTYHDLLKIIKDKDFLDNEENEDILEDIVLTLTLFEDREMIEERLKTYAHLFDDKVMKQLKRRRYTGWGRLSRKLINGIRDKQSGKTILDFLKSDGFANRNFMQLIHDDSLTFKEDIQKAQVSGQGDSLHEHIANLAGSPAIKKGILQTVKVVDELVKVMGRHKPENIVIEMARENQTTQKGQKNSRERMKRIEEGIKELGSQILKEHPVENTQLQNEKLYLYYLQNGRDMYVDQELDINRLSDYDVDHIVPQSFLKDDSIDNKVLTRSDKARGKSDNVPSEEVVKKMKNYWRQLLNAKLITQRKFDNLTKAERGGLSELDKAGFIKRQLVETRQITKHVAQILDSRMNTKYDENDKLIREVKVITLKSKLVSDFRKDFQFYKVREINNYHHAHDAYLNAVVGTALIKKYPKLESEFVYGDYKVYDVRKMIAKSEQEIGKATAKYFFYSNIMNFFKTEITLANGEIRKRPLIETNGETGEIVWDKGRDFATVRKVLSMPQVNIVKKTEVQTGGFSKESILPKRNSDKLIARKKDWDPKKYGGFDSPTVAYSVLVVAKVEKGKSKKLKSVKELLGITIMERSSFEKNPIDFLEAKGYKEVKKDLIIKLPKYSLFELENGRKRMLASAGELQKGNELALPSKYVNFLYLASHYEKLKGSPEDNEQKQLFVEQHKHYLDEIIEQISEFSKRVILADANLDKVLSAYNKHRDKPIREQAENIIHLFTLTNLGAPAAFKYFDTTIDRKRYTSTKEVLDATLIHQSITGLYETRIDLSQLGGDGGGSSGGGEAAAKGGTVSLQDEHRLFDIPVTTSLPDVWLQDFPQAWAETGGLGRAKCQAPIIIDLKPTAVPVSIKQYPMSLEAHMGIRQHIIKFLELGVLRPCRSPWNTPLLPVKKPGTQDYRPVQDLREINKRTVDIHPTVPNPYNLLSTLKPDYSWYTVLDLKDAFFCLPLAPQSQELFAFEWKDPERGISGQLTWTRLPQGFKNSPTLFNEALHRDLTDFRTQHPEVTLLQYVDDLLLAAPTKKACTQGTRHLLQELGEKGYRASAKKAQICQTKVTYLGYILSEGKRWLTPGRIETVARIPPPRNPREVREFLGKAGFCRLFIPGFAELAAPLYALTKPSTPFTWQTEHQLAFEALKKALLSAPALGLPDTSKPFTLFLDERQGIAKGVLTQKLGPWKRPVAYLSKKLDPVAAGWPPCLRIMAATAMLVKDSAKLTLGQPLTVITPHTLEAIVRQPPDRWITNARLTHYQALLLDTDRVQFGPPVTLNPATLLPVPENQPSPHDCRQVLAETHGTREDLKDQELPDADHTWYTDGSSYLDSGTRRAGAAVVDGHNTIWAQSLPPGTSAQKAELIALTKALELSKGKKANIYTDSRYAFATAHTHGSIYERRGWLTSEGKEIKNKAEIIALLKALFLPQEVAIIHCPGHQKGQDPVAVGNRQADRVARQAAMAEVLTLATEPDNTSHITAGKRTADGSEFEKRTADGSEFESPKKKAKVE

SEQ ID NO: 1953 - protein, 2098 aa, synthetic construct
  source 1..2098: note = Description of Artificial Sequence: Synthetic polypeptide
MPAAKRVKLDGGDKKYSIGLDIGTNSVGWAVITDEYKVPSKKFKVLGNTDRHSIKKNLIGALLFDSGETAEATRLKRTARRRYTRRKNRICYLQEIFSNEMAKVDDSFFHRLEESFLVEEDKKHERHPIFGNIVDEVAYHEKYPTIYHLRKKLVDSTDKADLRLIYLALAHMIKFRGHFLIEGDLNPDNSDVDKLFIQLVQTYNQLFEENPINASGVDAKAILSARLSKSRRLENLIAQLPGEKKNGLFGNLIALSLGLTPNFKSNFDLAEDAKLQLSKDTYDDDLDNLLAQIGDQYADLFLAAKNLSDAILLSDILRVNTEITKAPLSASMIKRYDEHHQDLTLLKALVRQQLPEKYKEIFFDQSKNGYAGYIDGGASQEEFYKFIKPILEKMDGTEELLVKLNREDLLRKQRTFDNGSIPHQIHLGELHAILRRQEDFYPFLKDNREKIEKILTFRIPYYVGPLARGNSRFAWMTRKSEETITPWNFEEVVDKGASAQSFIERMTNFDKNLPNEKVLPKHSLLYEYFTVYNELTKVKYVTEGMRKPAFLSGEQKKAIVDLLFKTNRKVTVKQLKEDYFKKIECFDSVEISGVEDRFNASLGTYHDLLKIIKDKDFLDNEENEDILEDIVLTLTLFEDREMIEERLKTYAHLFDDKVMKQLKRRRYTGWGRLSRKLINGIRDKQSGKTILDFLKSDGFANRNFMQLIHDDSLTFKEDIQKAQVSGQGDSLHEHIANLAGSPAIKKGILQTVKVVDELVKVMGRHKPENIVIEMARENQTTQKGQKNSRERMKRIEEGIKELGSQILKEHPVENTQLQNEKLYLYYLQNGRDMYVDQELDINRLSDYDVDHIVPQSFLKDDSIDNKVLTRSDKARGKSDNVPSEEVVKKMKNYWRQLLNAKLITQRKFDNLTKAERGGLSELDKAGFIKRQLVETRQITKHVAQILDSRMNTKYDENDKLIREVKVITLKSKLVSDFRKDFQFYKVREINNYHHAHDAYLNAVVGTALIKKYPKLESEFVYGDYKVYDVRKMIAKSEQEIGKATAKYFFYSNIMNFFKTEITLANGEIRKRPLIETNGETGEIVWDKGRDFATVRKVLSMPQVNIVKKTEVQTGGFSKESILPKRNSDKLIARKKDWDPKKYGGFDSPTVAYSVLVVAKVEKGKSKKLKSVKELLGITIMERSSFEKNPIDFLEAKGYKEVKKDLIIKLPKYSLFELENGRKRMLASAGELQKGNELALPSKYVNFLYLASHYEKLKGSPEDNEQKQLFVEQHKHYLDEIIEQISEFSKRVILADANLDKVLSAYNKHRDKPIREQAENIIHLFTLTNLGAPAAFKYFDTTIDRKRYTSTKEVLDATLIHQSITGLYETRIDLSQLGGDGGPAPAPAPGGTVSLQDEHRLFDIPVTTSLPDVWLQDFPQAWAETGGLGRAKCQAPIIIDLKPTAVPVSIKQYPMSLEAHMGIRQHIIKFLELGVLRPCRSPWNTPLLPVKKPGTQDYRPVQDLREINKRTVDIHPTVPNPYNLLSTLKPDYSWYTVLDLKDAFFCLPLAPQSQELFAFEWKDPERGISGQLTWTRLPQGFKNSPTLFNEALHRDLTDFRTQHPEVTLLQYVDDLLLAAPTKKACTQGTRHLLQELGEKGYRASAKKAQICQTKVTYLGYILSEGKRWLTPGRIETVARIPPPRNPREVREFLGKAGFCRLFIPGFAELAAPLYALTKPSTPFTWQTEHQLAFEALKKALLSAPALGLPDTSKPFTLFLDERQGIAKGVLTQKLGPWKRPVAYLSKKLDPVAAGWPPCLRIMAATAMLVKDSAKLTLGQPLTVITPHTLEAIVRQPPDRWITNARLTHYQALLLDTDRVQFGPPVTLNPATLLPVPENQPSPHDCRQVLAETHGTREDLKDQELPDADHTWYTDGSSYLDSGTRRAGAAVVDGHNTIWAQSLPPGTSAQKAELIALTKALELSKGKKANIYTDSRYAFATAHTHGSIYERRGWLTSEGKEIKNKAEIIALLKALFLPQEVAIIHCPGHQKGQDPVAVGNRQADRVARQAAMAEVLTLATEPDNTSHITAGKRTADGSEFEKRTADGSEFESPKKKAKVE

SEQ ID NO: 1954 - protein, 2102 aa, synthetic construct
  source 1..2102: note = Description of Artificial Sequence: Synthetic polypeptide
MPAAKRVKLDGGDKKYSIGLDIGTNSVGWAVITDEYKVPSKKFKVLGNTDRHSIKKNLIGALLFDSGETAEATRLKRTARRRYTRRKNRICYLQEIFSNEMAKVDDSFFHRLEESFLVEEDKKHERHPIFGNIVDEVAYHEKYPTIYHLRKKLVDSTDKADLRLIYLALAHMIKFRGHFLIEGDLNPDNSDVDKLFIQLVQTYNQLFEENPINASGVDAKAILSARLSKSRRLENLIAQLPGEKKNGLFGNLIALSLGLTPNFKSNFDLAEDAKLQLSKDTYDDDLDNLLAQIGDQYADLFLAAKNLSDAILLSDILRVNTEITKAPLSASMIKRYDEHHQDLTLLKALVRQQLPEKYKEIFFDQSKNGYAGYIDGGASQEEFYKFIKPILEKMDGTEELLVKLNREDLLRKQRTFDNGSIPHQIHLGELHAILRRQEDFYPFLKDNREKIEKILTFRIPYYVGPLARGNSRFAWMTRKSEETITPWNFEEVVDKGASAQSFIERMTNFDKNLPNEKVLPKHSLLYEYFTVYNELTKVKYVTEGMRKPAFLSGEQKKAIVDLLFKTNRKVTVKQLKEDYFKKIECFDSVEISGVEDRFNASLGTYHDLLKIIKDKDFLDNEENEDILEDIVLTLTLFEDREMIEERLKTYAHLFDDKVMKQLKRRRYTGWGRLSRKLINGIRDKQSGKTILDFLKSDGFANRNFMQLIHDDSLTFKEDIQKAQVSGQGDSLHEHIANLAGSPAIKKGILQTVKVVDELVKVMGRHKPENIVIEMARENQTTQKGQKNSRERMKRIEEGIKELGSQILKEHPVENTQLQNEKLYLYYLQNGRDMYVDQELDINRLSDYDVDHIVPQSFLKDDSIDNKVLTRSDKARGKSDNVPSEEVVKKMKNYWRQLLNAKLITQRKFDNLTKAERGGLSELDKAGFIKRQLVETRQITKHVAQILDSRMNTKYDENDKLIREVKVITLKSKLVSDFRKDFQFYKVREINNYHHAHDAYLNAVVGTALIKKYPKLESEFVYGDYKVYDVRKMIAKSEQEIGKATAKYFFYSNIMNFFKTEITLANGEIRKRPLIETNGETGEIVWDKGRDFATVRKVLSMPQVNIVKKTEVQTGGFSKESILPKRNSDKLIARKKDWDPKKYGGFDSPTVAYSVLVVAKVEKGKSKKLKSVKELLGITIMERSSFEKNPIDFLEAKGYKEVKKDLIIKLPKYSLFELENGRKRMLASAGELQKGNELALPSKYVNFLYLASHYEKLKGSPEDNEQKQLFVEQHKHYLDEIIEQISEFSKRVILADANLDKVLSAYNKHRDKPIREQAENIIHLFTLTNLGAPAAFKYFDTTIDRKRYTSTKEVLDATLIHQSITGLYETRIDLSQLGGDGGGGSPAPEAAAKGGTVSLQDEHRLFDIPVTTSLPDVWLQDFPQAWAETGGLGRAKCQAPIIIDLKPTAVPVSIKQYPMSLEAHMGIRQHIIKFLELGVLRPCRSPWNTPLLPVKKPGTQDYRPVQDLREINKRTVDIHPTVPNPYNLLSTLKPDYSWYTVLDLKDAFFCLPLAPQSQELFAFEWKDPERGISGQLTWTRLPQGFKNSPTLFNEALHRDLTDFRTQHPEVTLLQYVDDLLLAAPTKKACTQGTRHLLQELGEKGYRASAKKAQICQTKVTYLGYILSEGKRWLTPGRIETVARIPPPRNPREVREFLGKAGFCRLFIPGFAELAAPLYALTKPSTPFTWQTEHQLAFEALKKALLSAPALGLPDTSKPFTLFLDERQGIAKGVLTQKLGPWKRPVAYLSKKLDPVAAGWPPCLRIMAATAMLVKDSAKLTLGQPLTVITPHTLEAIVRQPPDRWITNARLTHYQALLLDTDRVQFGPPVTLNPATLLPVPENQPSPHDCRQVLAETHGTREDLKDQELPDADHTWYTDGSSYLDSGTRRAGAAVVDGHNTIWAQSLPPGTSAQKAELIALTKALELSKGKKANIYTDSRYAFATAHTHGSIYERRGWLTSEGKEIKNKAEIIALLKALFLPQEVAIIHCPGHQKGQDPVAVGNRQADRVARQAAMAEVLTLATEPDNTSHITAGKRTADGSEFEKRTADGSEFESPKKKAKVE

SEQ ID NO: 1955 - protein, 2103 aa, synthetic construct
  source 1..2103: note = Description of Artificial Sequence: Synthetic polypeptide
MPAAKRVKLDGGDKKYSIGLDIGTNSVGWAVITDEYKVPSKKFKVLGNTDRHSIKKNLIGALLFDSGETAEATRLKRTARRRYTRRKNRICYLQEIFSNEMAKVDDSFFHRLEESFLVEEDKKHERHPIFGNIVDEVAYHEKYPTIYHLRKKLVDSTDKADLRLIYLALAHMIKFRGHFLIEGDLNPDNSDVDKLFIQLVQTYNQLFEENPINASGVDAKAILSARLSKSRRLENLIAQLPGEKKNGLFGNLIALSLGLTPNFKSNFDLAEDAKLQLSKDTYDDDLDNLLAQIGDQYADLFLAAKNLSDAILLSDILRVNTEITKAPLSASMIKRYDEHHQDLTLLKALVRQQLPEKYKEIFFDQSKNGYAGYIDGGASQEEFYKFIKPILEKMDGTEELLVKLNREDLLRKQRTFDNGSIPHQIHLGELHAILRRQEDFYPFLKDNREKIEKILTFRIPYYVGPLARGNSRFAWMTRKSEETITPWNFEEVVDKGASAQSFIERMTNFDKNLPNEKVLPKHSLLYEYFTVYNELTKVKYVTEGMRKPAFLSGEQKKAIVDLLFKTNRKVTVKQLKEDYFKKIECFDSVEISGVEDRFNASLGTYHDLLKIIKDKDFLDNEENEDILEDIVLTLTLFEDREMIEERLKTYAHLFDDKVMKQLKRRRYTGWGRLSRKLINGIRDKQSGKTILDFLKSDGFANRNFMQLIHDDSLTFKEDIQKAQVSGQGDSLHEHIANLAGSPAIKKGILQTVKVVDELVKVMGRHKPENIVIEMARENQTTQKGQKNSRERMKRIEEGIKELGSQILKEHPVENTQLQNEKLYLYYLQNGRDMYVDQELDINRLSDYDVDHIVPQSFLKDDSIDNKVLTRSDKARGKSDNVPSEEVVKKMKNYWRQLLNAKLITQRKFDNLTKAERGGLSELDKAGFIKRQLVETRQITKHVAQILDSRMNTKYDENDKLIREVKVITLKSKLVSDFRKDFQFYKVREINNYHHAHDAYLNAVVGTALIKKYPKLESEFVYGDYKVYDVRKMIAKSEQEIGKATAKYFFYSNIMNFFKTEITLANGEIRKRPLIETNGETGEIVWDKGRDFATVRKVLSMPQVNIVKKTEVQTGGFSKESILPKRNSDKLIARKKDWDPKKYGGFDSPTVAYSVLVVAKVEKGKSKKLKSVKELLGITIMERSSFEKNPIDFLEAKGYKEVKKDLIIKLPKYSLFELENGRKRMLASAGELQKGNELALPSKYVNFLYLASHYEKLKGSPEDNEQKQLFVEQHKHYLDEIIEQISEFSKRVILADANLDKVLSAYNKHRDKPIREQAENIIHLFTLTNLGAPAAFKYFDTTIDRKRYTSTKEVLDATLIHQSITGLYETRIDLSQLGGDGGGGSGGSGGSGGSGGTVSLQDEHRLFDIPVTTSLPDVWLQDFPQAWAETGGLGRAKCQAPIIIDLKPTAVPVSIKQYPMSLEAHMGIRQHIIKFLELGVLRPCRSPWNTPLLPVKKPGTQDYRPVQDLREINKRTVDIHPTVPNPYNLLSTLKPDYSWYTVLDLKDAFFCLPLAPQSQELFAFEWKDPERGISGQLTWTRLPQGFKNSPTLFNEALHRDLTDFRTQHPEVTLLQYVDDLLLAAPTKKACTQGTRHLLQELGEKGYRASAKKAQICQTKVTYLGYILSEGKRWLTPGRIETVARIPPPRNPREVREFLGKAGFCRLFIPGFAELAAPLYALTKPSTPFTWQTEHQLAFEALKKALLSAPALGLPDTSKPFTLFLDERQGIAKGVLTQKLGPWKRPVAYLSKKLDPVAAGWPPCLRIMAATAMLVKDSAKLTLGQPLTVITPHTLEAIVRQPPDRWITNARLTHYQALLLDTDRVQFGPPVTLNPATLLPVPENQPSPHDCRQVLAETHGTREDLKDQELPDADHTWYTDGSSYLDSGTRRAGAAVVDGHNTIWAQSLPPGTSAQKAELIALTKALELSKGKKANIYTDSRYAFATAHTHGSIYERRGWLTSEGKEIKNKAEIIALLKALFLPQEVAIIHCPGHQKGQDPVAVGNRQADRVARQAAMAEVLTLATEPDNTSHITAGKRTADGSEFEKRTADGSEFESPKKKAKVE

SEQ ID NO: 1956 - protein, 2097 aa, synthetic construct
  source 1..2097: note = Description of Artificial Sequence: Synthetic polypeptide
MPAAKRVKLDGGDKKYSIGLDIGTNSVGWAVITDEYKVPSKKFKVLGNTDRHSIKKNLIGALLFDSGETAEATRLKRTARRRYTRRKNRICYLQEIFSNEMAKVDDSFFHRLEESFLVEEDKKHERHPIFGNIVDEVAYHEKYPTIYHLRKKLVDSTDKADLRLIYLALAHMIKFRGHFLIEGDLNPDNSDVDKLFIQLVQTYNQLFEENPINASGVDAKAILSARLSKSRRLENLIAQLPGEKKNGLFGNLIALSLGLTPNFKSNFDLAEDAKLQLSKDTYDDDLDNLLAQIGDQYADLFLAAKNLSDAILLSDILRVNTEITKAPLSASMIKRYDEHHQDLTLLKALVRQQLPEKYKEIFFDQSKNGYAGYIDGGASQEEFYKFIKPILEKMDGTEELLVKLNREDLLRKQRTFDNGSIPHQIHLGELHAILRRQEDFYPFLKDNREKIEKILTFRIPYYVGPLARGNSRFAWMTRKSEETITPWNFEEVVDKGASAQSFIERMTNFDKNLPNEKVLPKHSLLYEYFTVYNELTKVKYVTEGMRKPAFLSGEQKKAIVDLLFKTNRKVTVKQLKEDYFKKIECFDSVEISGVEDRFNASLGTYHDLLKIIKDKDFLDNEENEDILEDIVLTLTLFEDREMIEERLKTYAHLFDDKVMKQLKRRRYTGWGRLSRKLINGIRDKQSGKTILDFLKSDGFANRNFMQLIHDDSLTFKEDIQKAQVSGQGDSLHEHIANLAGSPAIKKGILQTVKVVDELVKVMGRHKPENIVIEMARENQTTQKGQKNSRERMKRIEEGIKELGSQILKEHPVENTQLQNEKLYLYYLQNGRDMYVDQELDINRLSDYDVDHIVPQSFLKDDSIDNKVLTRSDKARGKSDNVPSEEVVKKMKNYWRQLLNAKLITQRKFDNLTKAERGGLSELDKAGFIKRQLVETRQITKHVAQILDSRMNTKYDENDKLIREVKVITLKSKLVSDFRKDFQFYKVREINNYHHAHDAYLNAVVGTALIKKYPKLESEFVYGDYKVYDVRKMIAKSEQEIGKATAKYFFYSNIMNFFKTEITLANGEIRKRPLIETNGETGEIVWDKGRDFATVRKVLSMPQVNIVKKTEVQTGGFSKESILPKRNSDKLIARKKDWDPKKYGGFDSPTVAYSVLVVAKVEKGKSKKLKSVKELLGITIMERSSFEKNPIDFLEAKGYKEVKKDLIIKLPKYSLFELENGRKRMLASAGELQKGNELALPSKYVNFLYLASHYEKLKGSPEDNEQKQLFVEQHKHYLDEIIEQISEFSKRVILADANLDKVLSAYNKHRDKPIREQAENIIHLFTLTNLGAPAAFKYFDTTIDRKRYTSTKEVLDATLIHQSITGLYETRIDLSQLGGDGGGGGGGGGGTVSLQDEHRLFDIPVTTSLPDVWLQDFPQAWAETGGLGRAKCQAPIIIDLKPTAVPVSIKQYPMSLEAHMGIRQHIIKFLELGVLRPCRSPWNTPLLPVKKPGTQDYRPVQDLREINKRTVDIHPTVPNPYNLLSTLKPDYSWYTVLDLKDAFFCLPLAPQSQELFAFEWKDPERGISGQLTWTRLPQGFKNSPTLFNEALHRDLTDFRTQHPEVTLLQYVDDLLLAAPTKKACTQGTRHLLQELGEKGYRASAKKAQICQTKVTYLGYILSEGKRWLTPGRIETVARIPPPRNPREVREFLGKAGFCRLFIPGFAELAAPLYALTKPSTPFTWQTEHQLAFEALKKALLSAPALGLPDTSKPFTLFLDERQGIAKGVLTQKLGPWKRPVAYLSKKLDPVAAGWPPCLRIMAATAMLVKDSAKLTLGQPLTVITPHTLEAIVRQPPDRWITNARLTHYQALLLDTDRVQFGPPVTLNPATLLPVPENQPSPHDCRQVLAETHGTREDLKDQELPDADHTWYTDGSSYLDSGTRRAGAAVVDGHNTIWAQSLPPGTSAQKAELIALTKALELSKGKKANIYTDSRYAFATAHTHGSIYERRGWLTSEGKEIKNKAEIIALLKALFLPQEVAIIHCPGHQKGQDPVAVGNRQADRVARQAAMAEVLTLATEPDNTSHITAGKRTADGSEFEKRTADGSEFESPKKKAKVE

SEQ ID NO: 1957 - protein, 2109 aa, synthetic construct
  source 1..2109: note = Description of Artificial Sequence: Synthetic polypeptide
MPAAKRVKLDGGDKKYSIGLDIGTNSVGWAVITDEYKVPSKKFKVLGNTDRHSIKKNLIGALLFDSGETAEATRLKRTARRRYTRRKNRICYLQEIFSNEMAKVDDSFFHRLEESFLVEEDKKHERHPIFGNIVDEVAYHEKYPTIYHLRKKLVDSTDKADLRLIYLALAHMIKFRGHFLIEGDLNPDNSDVDKLFIQLVQTYNQLFEENPINASGVDAKAILSARLSKSRRLENLIAQLPGEKKNGLFGNLIALSLGLTPNFKSNFDLAEDAKLQLSKDTYDDDLDNLLAQIGDQYADLFLAAKNLSDAILLSDILRVNTEITKAPLSASMIKRYDEHHQDLTLLKALVRQQLPEKYKEIFFDQSKNGYAGYIDGGASQEEFYKFIKPILEKMDGTEELLVKLNREDLLRKQRTFDNGSIPHQIHLGELHAILRRQEDFYPFLKDNREKIEKILTFRIPYYVGPLARGNSRFAWMTRKSEETITPWNFEEVVDKGASAQSFIERMTNFDKNLPNEKVLPKHSLLYEYFTVYNELTKVKYVTEGMRKPAFLSGEQKKAIVDLLFKTNRKVTVKQLKEDYFKKIECFDSVEISGVEDRFNASLGTYHDLLKIIKDKDFLDNEENEDILEDIVLTLTLFEDREMIEERLKTYAHLFDDKVMKQLKRRRYTGWGRLSRKLINGIRDKQSGKTILDFLKSDGFANRNFMQLIHDDSLTFKEDIQKAQVSGQGDSLHEHIANLAGSPAIKKGILQTVKVVDELVKVMGRHKPENIVIEMARENQTTQKGQKNSRERMKRIEEGIKELGSQILKEHPVENTQLQNEKLYLYYLQNGRDMYVDQELDINRLSDYDVDHIVPQSFLKDDSIDNKVLTRSDKARGKSDNVPSEEVVKKMKNYWRQLLNAKLITQRKFDNLTKAERGGLSELDKAGFIKRQLVETRQITKHVAQILDSRMNTKYDENDKLIREVKVITLKSKLVSDFRKDFQFYKVREINNYHHAHDAYLNAVVGTALIKKYPKLESEFVYGDYKVYDVRKMIAKSEQEIGKATAKYFFYSNIMNFFKTEITLANGEIRKRPLIETNGETGEIVWDKGRDFATVRKVLSMPQVNIVKKTEVQTGGFSKESILPKRNSDKLIARKKDWDPKKYGGFDSPTVAYSVLVVAKVEKGKSKKLKSVKELLGITIMERSSFEKNPIDFLEAKGYKEVKKDLIIKLPKYSLFELENGRKRMLASAGELQKGNELALPSKYVNFLYLASHYEKLKGSPEDNEQKQLFVEQHKHYLDEIIEQISEFSKRVILADANLDKVLSAYNKHRDKPIREQAENIIHLFTLTNLGAPAAFKYFDTTIDRKRYTSTKEVLDATLIHQSITGLYETRIDLSQLGGDGGGGSGGSGGSGGSGGSGGSGGTVSLQDEHRLFDIPVTTSLPDVWLQDFPQAWAETGGLGRAKCQAPIIIDLKPTAVPVSIKQYPMSLEAHMGIRQHIIKFLELGVLRPCRSPWNTPLLPVKKPGTQDYRPVQDLREINKRTVDIHPTVPNPYNLLSTLKPDYSWYTVLDLKDAFFCLPLAPQSQELFAFEWKDPERGISGQLTWTRLPQGFKNSPTLFNEALHRDLTDFRTQHPEVTLLQYVDDLLLAAPTKKACTQGTRHLLQELGEKGYRASAKKAQICQTKVTYLGYILSEGKRWLTPGRIETVARIPPPRNPREVREFLGKAGFCRLFIPGFAELAAPLYALTKPSTPFTWQTEHQLAFEALKKALLSAPALGLPDTSKPFTLFLDERQGIAKGVLTQKLGPWKRPVAYLSKKLDPVAAGWPPCLRIMAATAMLVKDSAKLTLGQPLTVITPHTLEAIVRQPPDRWITNARLTHYQALLLDTDRVQFGPPVTLNPATLLPVPENQPSPHDCRQVLAETHGTREDLKDQELPDADHTWYTDGSSYLDSGTRRAGAAVVDGHNTIWAQSLPPGTSAQKAELIALTKALELSKGKKANIYTDSRYAFATAHTHGSIYERRGWLTSEGKEIKNKAEIIALLKALFLPQEVAIIHCPGHQKGQDPVAVGNRQADRVARQAAMAEVLTLATEPDNTSHITAGKRTADGSEFEKRTADGSEFESPKKKAKVE

SEQ ID NO: 1958 - protein, 2100 aa, synthetic construct
  source 1..2100: note = Description of Artificial Sequence: Synthetic polypeptide
MPAAKRVKLDGGDKKYSIGLDIGTNSVGWAVITDEYKVPSKKFKVLGNTDRHSIKKNLIGALLFDSGETAEATRLKRTARRRYTRRKNRICYLQEIFSNEMAKVDDSFFHRLEESFLVEEDKKHERHPIFGNIVDEVAYHEKYPTIYHLRKKLVDSTDKADLRLIYLALAHMIKFRGHFLIEGDLNPDNSDVDKLFIQLVQTYNQLFEENPINASGVDAKAILSARLSKSRRLENLIAQLPGEKKNGLFGNLIALSLGLTPNFKSNFDLAEDAKLQLSKDTYDDDLDNLLAQIGDQYADLFLAAKNLSDAILLSDILRVNTEITKAPLSASMIKRYDEHHQDLTLLKALVRQQLPEKYKEIFFDQSKNGYAGYIDGGASQEEFYKFIKPILEKMDGTEELLVKLNREDLLRKQRTFDNGSIPHQIHLGELHAILRRQEDFYPFLKDNREKIEKILTFRIPYYVGPLARGNSRFAWMTRKSEETITPWNFEEVVDKGASAQSFIERMTNFDKNLPNEKVLPKHSLLYEYFTVYNELTKVKYVTEGMRKPAFLSGEQKKAIVDLLFKTNRKVTVKQLKEDYFKKIECFDSVEISGVEDRFNASLGTYHDLLKIIKDKDFLDNEENEDILEDIVLTLTLFEDREMIEERLKTYAHLFDDKVMKQLKRRRYTGWGRLSRKLINGIRDKQSGKTILDFLKSDGFANRNFMQLIHDDSLTFKEDIQKAQVSGQGDSLHEHIANLAGSPAIKKGILQTVKVVDELVKVMGRHKPENIVIEMARENQTTQKGQKNSRERMKRIEEGIKELGSQILKEHPVENTQLQNEKLYLYYLQNGRDMYVDQELDINRLSDYDVDHIVPQSFLKDDSIDNKVLTRSDKARGKSDNVPSEEVVKKMKNYWRQLLNAKLITQRKFDNLTKAERGGLSELDKAGFIKRQLVETRQITKHVAQILDSRMNTKYDENDKLIREVKVITLKSKLVSDFRKDFQFYKVREINNYHHAHDAYLNAVVGTALIKKYPKLESEFVYGDYKVYDVRKMIAKSEQEIGKATAKYFFYSNIMNFFKTEITLANGEIRKRPLIETNGETGEIVWDKGRDFATVRKVLSMPQVNIVKKTEVQTGGFSKESILPKRNSDKLIARKKDWDPKKYGGFDSPTVAYSVLVVAKVEKGKSKKLKSVKELLGITIMERSSFEKNPIDFLEAKGYKEVKKDLIIKLPKYSLFELENGRKRMLASAGELQKGNELALPSKYVNFLYLASHYEKLKGSPEDNEQKQLFVEQHKHYLDEIIEQISEFSKRVILADANLDKVLSAYNKHRDKPIREQAENIIHLFTLTNLGAPAAFKYFDTTIDRKRYTSTKEVLDATLIHQSITGLYETRIDLSQLGGDGGGGSGSSPAPGGTVSLQDEHRLFDIPVTTSLPDVWLQDFPQAWAETGGLGRAKCQAPIIIDLKPTAVPVSIKQYPMSLEAHMGIRQHIIKFLELGVLRPCRSPWNTPLLPVKKPGTQDYRPVQDLREINKRTVDIHPTVPNPYNLLSTLKPDYSWYTVLDLKDAFFCLPLAPQSQELFAFEWKDPERGISGQLTWTRLPQGFKNSPTLFNEALHRDLTDFRTQHPEVTLLQYVDDLLLAAPTKKACTQGTRHLLQELGEKGYRASAKKAQICQTKVTYLGYILSEGKRWLTPGRIETVARIPPPRNPREVREFLGKAGFCRLFIPGFAELAAPLYALTKPSTPFTWQTEHQLAFEALKKALLSAPALGLPDTSKPFTLFLDERQGIAKGVLTQKLGPWKRPVAYLSKKLDPVAAGWPPCLRIMAATAMLVKDSAKLTLGQPLTVITPHTLEAIVRQPPDRWITNARLTHYQALLLDTDRVQFGPPVTLNPATLLPVPENQPSPHDCRQVLAETHGTREDLKDQELPDADHTWYTDGSSYLDSGTRRAGAAVVDGHNTIWAQSLPPGTSAQKAELIALTKALELSKGKKANIYTDSRYAFATAHTHGSIYERRGWLTSEGKEIKNKAEIIALLKALFLPQEVAIIHCPGHQKGQDPVAVGNRQADRVARQAAMAEVLTLATEPDNTSHITAGKRTADGSEFEKRTADGSEFESPKKKAKVE

SEQ ID NO: 1959 - protein, 2102 aa, synthetic construct
  source 1..2102: note = Description of Artificial Sequence: Synthetic polypeptide
MPAAKRVKLDGGDKKYSIGLDIGTNSVGWAVITDEYKVPSKKFKVLGNTDRHSIKKNLIGALLFDSGETAEATRLKRTARRRYTRRKNRICYLQEIFSNEMAKVDDSFFHRLEESFLVEEDKKHERHPIFGNIVDEVAYHEKYPTIYHLRKKLVDSTDKADLRLIYLALAHMIKFRGHFLIEGDLNPDNSDVDKLFIQLVQTYNQLFEENPINASGVDAKAILSARLSKSRRLENLIAQLPGEKKNGLFGNLIALSLGLTPNFKSNFDLAEDAKLQLSKDTYDDDLDNLLAQIGDQYADLFLAAKNLSDAILLSDILRVNTEITKAPLSASMIKRYDEHHQDLTLLKALVRQQLPEKYKEIFFDQSKNGYAGYIDGGASQEEFYKFIKPILEKMDGTEELLVKLNREDLLRKQRTFDNGSIPHQIHLGELHAILRRQEDFYPFLKDNREKIEKILTFRIPYYVGPLARGNSRFAWMTRKSEETITPWNFEEVVDKGASAQSFIERMTNFDKNLPNEKVLPKHSLLYEYFTVYNELTKVKYVTEGMRKPAFLSGEQKKAIVDLLFKTNRKVTVKQLKEDYFKKIECFDSVEISGVEDRFNASLGTYHDLLKIIKDKDFLDNEENEDILEDIVLTLTLFEDREMIEERLKTYAHLFDDKVMKQLKRRRYTGWGRLSRKLINGIRDKQSGKTILDFLKSDGFANRNFMQLIHDDSLTFKEDIQKAQVSGQGDSLHEHIANLAGSPAIKKGILQTVKVVDELVKVMGRHKPENIVIEMARENQTTQKGQKNSRERMKRIEEGIKELGSQILKEHPVENTQLQNEKLYLYYLQNGRDMYVDQELDINRLSDYDVDHIVPQSFLKDDSIDNKVLTRSDKARGKSDNVPSEEVVKKMKNYWRQLLNAKLITQRKFDNLTKAERGGLSELDKAGFIKRQLVETRQITKHVAQILDSRMNTKYDENDKLIREVKVITLKSKLVSDFRKDFQFYKVREINNYHHAHDAYLNAVVGTALIKKYPKLESEFVYGDYKVYDVRKMIAKSEQEIGKATAKYFFYSNIMNFFKTEITLANGEIRKRPLIETNGETGEIVWDKGRDFATVRKVLSMPQVNIVKKTEVQTGGFSKESILPKRNSDKLIARKKDWDPKKYGGFDSPTVAYSVLVVAKVEKGKSKKLKSVKELLGITIMERSSFEKNPIDFLEAKGYKEVKKDLIIKLPKYSLFELENGRKRMLASAGELQKGNELALPSKYVNFLYLASHYEKLKGSPEDNEQKQLFVEQHKHYLDEIIEQISEFSKRVILADANLDKVLSAYNKHRDKPIREQAENIIHLFTLTNLGAPAAFKYFDTTIDRKRYTSTKEVLDATLIHQSITGLYETRIDLSQLGGDGGGSSEAAAKGGSGGTVSLQDEHRLFDIPVTTSLPDVWLQDFPQAWAETGGLGRAKCQAPIIIDLKPTAVPVSIKQYPMSLEAHMGIRQHIIKFLELGVLRPCRSPWNTPLLPVKKPGTQDYRPVQDLREINKRTVDIHPTVPNPYNLLSTLKPDYSWYTVLDLKDAFFCLPLAPQSQELFAFEWKDPERGISGQLTWTRLPQGFKNSPTLFNEALHRDLTDFRTQHPEVTLLQYVDDLLLAAPTKKACTQGTRHLLQELGEKGYRASAKKAQICQTKVTYLGYILSEGKRWLTPGRIETVARIPPPRNPREVREFLGKAGFCRLFIPGFAELAAPLYALTKPSTPFTWQTEHQLAFEALKKALLSAPALGLPDTSKPFTLFLDERQGIAKGVLTQKLGPWKRPVAYLSKKLDPVAAGWPPCLRIMAATAMLVKDSAKLTLGQPLTVITPHTLEAIVRQPPDRWITNARLTHYQALLLDTDRVQFGPPVTLNPATLLPVPENQPSPHDCRQVLAETHGTREDLKDQELPDADHTWYTDGSSYLDSGTRRAGAAVVDGHNTIWAQSLPPGTSAQKAELIALTKALELSKGKKANIYTDSRYAFATAHTHGSIYERRGWLTSEGKEIKNKAEIIALLKALFLPQEVAIIHCPGHQKGQDPVAVGNRQADRVARQAAMAEVLTLATEPDNTSHITAGKRTADGSEFEKRTADGSEFESPKKKAKVE

SEQ ID NO: 1960 - protein, 2099 aa, synthetic construct
  source 1..2099: note = Description of Artificial Sequence: Synthetic polypeptide
MPAAKRVKLDGGDKKYSIGLDIGTNSVGWAVITDEYKVPSKKFKVLGNTDRHSIKKNLIGALLFDSGETAEATRLKRTARRRYTRRKNRICYLQEIFSNEMAKVDDSFFHRLEESFLVEEDKKHERHPIFGNIVDEVAYHEKYPTIYHLRKKLVDSTDKADLRLIYLALAHMIKFRGHFLIEGDLNPDNSDVDKLFIQLVQTYNQLFEENPINASGVDAKAILSARLSKSRRLENLIAQLPGEKKNGLFGNLIALSLGLTPNFKSNFDLAEDAKLQLSKDTYDDDLDNLLAQIGDQYADLFLAAKNLSDAILLSDILRVNTEITKAPLSASMIKRYDEHHQDLTLLKALVRQQLPEKYKEIFFDQSKNGYAGYIDGGASQEEFYKFIKPILEKMDGTEELLVKLNREDLLRKQRTFDNGSIPHQIHLGELHAILRRQEDFYPFLKDNREKIEKILTFRIPYYVGPLARGNSRFAWMTRKSEETITPWNFEEVVDKGASAQSFIERMTNFDKNLPNEKVLPKHSLLYEYFTVYNELTKVKYVTEGMRKPAFLSGEQKKAIVDLLFKTNRKVTVKQLKEDYFKKIECFDSVEISGVEDRFNASLGTYHDLLKIIKDKDFLDNEENEDILEDIVLTLTLFEDREMIEERLKTYAHLFDDKVMKQLKRRRYTGWGRLSRKLINGIRDKQSGKTILDFLKSDGFANRNFMQLIHDDSLTFKEDIQKAQVSGQGDSLHEHIANLAGSPAIKKGILQTVKVVDELVKVMGRHKPENIVIEMARENQTTQKGQKNSRERMKRIEEGIKELGSQILKEHPVENTQLQNEKLYLYYLQNGRDMYVDQELDINRLSDYDVDHIVPQSFLKDDSIDNKVLTRSDKARGKSDNVPSEEVVKKMKNYWRQLLNAKLITQRKFDNLTKAERGGLSELDKAGFIKRQLVETRQITKHVAQILDSRMNTKYDENDKLIREVKVITLKSKLVSDFRKDFQFYKVREINNYHHAHDAYLNAVVGTALIKKYPKLESEFVYGDYKVYDVRKMIAKSEQEIGKATAKYFFYSNIMNFFKTEITLANGEIRKRPLIETNGETGEIVWDKGRDFATVRKVLSMPQVNIVKKTEVQTGGFSKESILPKRNSDKLIARKKDWDPKKYGGFDSPTVAYSVLVVAKVEKGKSKKLKSVKELLGITIMERSSFEKNPIDFLEAKGYKEVKKDLIIKLPKYSLFELENGRKRMLASAGELQKGNELALPSKYVNFLYLASHYEKLKGSPEDNEQKQLFVEQHKHYLDEIIEQISEFSKRVILADANLDKVLSAYNKHRDKPIREQAENIIHLFTLTNLGAPAAFKYFDTTIDRKRYTSTKEVLDATLIHQSITGLYETRIDLSQLGGDGGEAAAKPAPGGTVSLQDEHRLFDIPVTTSLPDVWLQDFPQAWAETGGLGRAKCQAPIIIDLKPTAVPVSIKQYPMSLEAHMGIRQHIIKFLELGVLRPCRSPWNTPLLPVKKPGTQDYRPVQDLREINKRTVDIHPTVPNPYNLLSTLKPDYSWYTVLDLKDAFFCLPLAPQSQELFAFEWKDPERGISGQLTWTRLPQGFKNSPTLFNEALHRDLTDFRTQHPEVTLLQYVDDLLLAAPTKKACTQGTRHLLQELGEKGYRASAKKAQICQTKVTYLGYILSEGKRWLTPGRIETVARIPPPRNPREVREFLGKAGFCRLFIPGFAELAAPLYALTKPSTPFTWQTEHQLAFEALKKALLSAPALGLPDTSKPFTLFLDERQGIAKGVLTQKLGPWKRPVAYLSKKLDPVAAGWPPCLRIMAATAMLVKDSAKLTLGQPLTVITPHTLEAIVRQPPDRWITNARLTHYQALLLDTDRVQFGPPVTLNPATLLPVPENQPSPHDCRQVLAETHGTREDLKDQELPDADHTWYTDGSSYLDSGTRRAGAAVVDGHNTIWAQSLPPGTSAQKAELIALTKALELSKGKKANIYTDSRYAFATAHTHGSIYERRGWLTSEGKEIKNKAEIIALLKALFLPQEVAIIHCPGHQKGQDPVAVGNRQADRVARQAAMAEVLTLATEPDNTSHITAGKRTADGSEFEKRTADGSEFESPKKKAKVE

SEQ ID NO: 1961 - protein, 2100 aa, synthetic construct
  source 1..2100: note = Description of Artificial Sequence: Synthetic polypeptide
MPAAKRVKLDGGDKKYSIGLDIGTNSVGWAVITDEYKVPSKKFKVLGNTDRHSIKKNLIGALLFDSGETAEATRLKRTARRRYTRRKNRICYLQEIFSNEMAKVDDSFFHRLEESFLVEEDKKHERHPIFGNIVDEVAYHEKYPTIYHLRKKLVDSTDKADLRLIYLALAHMIKFRGHFLIEGDLNPDNSDVDKLFIQLVQTYNQLFEENPINASGVDAKAILSARLSKSRRLENLIAQLPGEKKNGLFGNLIALSLGLTPNFKSNFDLAEDAKLQLSKDTYDDDLDNLLAQIGDQYADLFLAAKNLSDAILLSDILRVNTEITKAPLSASMIKRYDEHHQDLTLLKALVRQQLPEKYKEIFFDQSKNGYAGYIDGGASQEEFYKFIKPILEKMDGTEELLVKLNREDLLRKQRTFDNGSIPHQIHLGELHAILRRQEDFYPFLKDNREKIEKILTFRIPYYVGPLARGNSRFAWMTRKSEETITPWNFEEVVDKGASAQSFIERMTNFDKNLPNEKVLPKHSLLYEYFTVYNELTKVKYVTEGMRKPAFLSGEQKKAIVDLLFKTNRKVTVKQLKEDYFKKIECFDSVEISGVEDRFNASLGTYHDLLKIIKDKDFLDNEENEDILEDIVLTLTLFEDREMIEERLKTYAHLFDDKVMKQLKRRRYTGWGRLSRKLINGIRDKQSGKTILDFLKSDGFANRNFMQLIHDDSLTFKEDIQKAQVSGQGDSLHEHIANLAGSPAIKKGILQTVKVVDELVKVMGRHKPENIVIEMARENQTTQKGQKNSRERMKRIEEGIKELGSQILKEHPVENTQLQNEKLYLYYLQNGRDMYVDQELDINRLSDYDVDHIVPQSFLKDDSIDNKVLTRSDKARGKSDNVPSEEVVKKMKNYWRQLLNAKLITQRKFDNLTKAERGGLSELDKAGFIKRQLVETRQITKHVAQILDSRMNTKYDENDKLIREVKVITLKSKLVSDFRKDFQFYKVREINNYHHAHDAYLNAVVGTALIKKYPKLESEFVYGDYKVYDVRKMIAKSEQEIGKATAKYFFYSNIMNFFKTEITLANGEIRKRPLIETNGETGEIVWDKGRDFATVRKVLSMPQVNIVKKTEVQTGGFSKESILPKRNSDKLIARKKDWDPKKYGGFDSPTVAYSVLVVAKVEKGKSKKLKSVKELLGITIMERSSFEKNPIDFLEAKGYKEVKKDLIIKLPKYSLFELENGRKRMLASAGELQKGNELALPSKYVNFLYLASHYEKLKGSPEDNEQKQLFVEQHKHYLDEIIEQISEFSKRVILADANLDKVLSAYNKHRDKPIREQAENIIHLFTLTNLGAPAAFKYFDTTIDRKRYTSTKEVLDATLIHQSITGLYETRIDLSQLGGDGGPAPGSSGGSGGTVSLQDEHRLFDIPVTTSLPDVWLQDFPQAWAETGGLGRAKCQAPIIIDLKPTAVPVSIKQYPMSLEAHMGIRQHIIKFLELGVLRPCRSPWNTPLLPVKKPGTQDYRPVQDLREINKRTVDIHPTVPNPYNLLSTLKPDYSWYTVLDLKDAFFCLPLAPQSQELFAFEWKDPERGISGQLTWTRLPQGFKNSPTLFNEALHRDLTDFRTQHPEVTLLQYVDDLLLAAPTKKACTQGTRHLLQELGEKGYRASAKKAQICQTKVTYLGYILSEGKRWLTPGRIETVARIPPPRNPREVREFLGKAGFCRLFIPGFAELAAPLYALTKPSTPFTWQTEHQLAFEALKKALLSAPALGLPDTSKPFTLFLDERQGIAKGVLTQKLGPWKRPVAYLSKKLDPVAAGWPPCLRIMAATAMLVKDSAKLTLGQPLTVITPHTLEAIVRQPPDRWITNARLTHYQALLLDTDRVQFGPPVTLNPATLLPVPENQPSPHDCRQVLAETHGTREDLKDQELPDADHTWYTDGSSYLDSGTRRAGAAVVDGHNTIWAQSLPPGTSAQKAELIALTKALELSKGKKANIYTDSRYAFATAHTHGSIYERRGWLTSEGKEIKNKAEIIALLKALFLPQEVAIIHCPGHQKGQDPVAVGNRQADRVARQAAMAEVLTLATEPDNTSHITAGKRTADGSEFEKRTADGSEFESPKKKAKVE

SEQ ID NO: 1962 - protein, 2100 aa, synthetic construct
  source 1..2100: note = Description of Artificial Sequence: Synthetic polypeptide
MPAAKRVKLDGGDKKYSIGLDIGTNSVGWAVITDEYKVPSKKFKVLGNTDRHSIKKNLIGALLFDSGETAEATRLKRTARRRYTRRKNRICYLQEIFSNEMAKVDDSFFHRLEESFLVEEDKKHERHPIFGNIVDEVAYHEKYPTIYHLRKKLVDSTDKADLRLIYLALAHMIKFRGHFLIEGDLNPDNSDVDKLFIQLVQTYNQLFEENPINASGVDAKAILSARLSKSRRLENLIAQLPGEKKNGLFGNLIALSLGLTPNFKSNFDLAEDAKLQLSKDTYDDDLDNLLAQIGDQYADLFLAAKNLSDAILLSDILRVNTEITKAPLSASMIKRYDEHHQDLTLLKALVRQQLPEKYKEIFFDQSKNGYAGYIDGGASQEEFYKFIKPILEKMDGTEELLVKLNREDLLRKQRTFDNGSIPHQIHLGELHAILRRQEDFYPFLKDNREKIEKILTFRIPYYVGPLARGNSRFAWMTRKSEETITPWNFEEVVDKGASAQSFIERMTNFDKNLPNEKVLPKHSLLYEYFTVYNELTKVKYVTEGMRKPAFLSGEQKKAIVDLLFKTNRKVTVKQLKEDYFKKIECFDSVEISGVEDRFNASLGTYHDLLKIIKDKDFLDNEENEDILEDIVLTLTLFEDREMIEERLKTYAHLFDDKVMKQLKRRRYTGWGRLSRKLINGIRDKQSGKTILDFLKSDGFANRNFMQLIHDDSLTFKEDIQKAQVSGQGDSLHEHIANLAGSPAIKKGILQTVKVVDELVKVMGRHKPENIVIEMARENQTTQKGQKNSRERMKRIEEGIKELGSQILKEHPVENTQLQNEKLYLYYLQNGRDMYVDQELDINRLSDYDVDHIVPQSFLKDDSIDNKVLTRSDKARGKSDNVPSEEVVKKMKNYWRQLLNAKLITQRKFDNLTKAERGGLSELDKAGFIKRQLVETRQITKHVAQILDSRMNTKYDENDKLIREVKVITLKSKLVSDFRKDFQFYKVREINNYHHAHDAYLNAVVGTALIKKYPKLESEFVYGDYKVYDVRKMIAKSEQEIGKATAKYFFYSNIMNFFKTEITLANGEIRKRPLIETNGETGEIVWDKGRDFATVRKVLSMPQVNIVKKTEVQTGGFSKESILPKRNSDKLIARKKDWDPKKYGGFDSPTVAYSVLVVAKVEKGKSKKLKSVKELLGITIMERSSFEKNPIDFLEAKGYKEVKKDLIIKLPKYSLFELENGRKRMLASAGELQKGNELALPSKYVNFLYLASHYEKLKGSPEDNEQKQLFVEQHKHYLDEIIEQISEFSKRVILADANLDKVLSAYNKHRDKPIREQAENIIHLFTLTNLGAPAAFKYFDTTIDRKRYTSTKEVLDATLIHQSITGLYETRIDLSQLGGDGGGSSPAPGGGGGTVSLQDEHRLFDIPVTTSLPDVWLQDFPQAWAETGGLGRAKCQAPIIIDLKPTAVPVSIKQYPMSLEAHMGIRQHIIKFLELGVLRPCRSPWNTPLLPVKKPGTQDYRPVQDLREINKRTVDIHPTVPNPYNLLSTLKPDYSWYTVLDLKDAFFCLPLAPQSQELFAFEWKDPERGISGQLTWTRLPQGFKNSPTLFNEALHRDLTDFRTQHPEVTLLQYVDDLLLAAPTKKACTQGTRHLLQELGEKGYRASAKKAQICQTKVTYLGYILSEGKRWLTPGRIETVARIPPPRNPREVREFLGKAGFCRLFIPGFAELAAPLYALTKPSTPFTWQTEHQLAFEALKKALLSAPALGLPDTSKPFTLFLDERQGIAKGVLTQKLGPWKRPVAYLSKKLDPVAAGWPPCLRIMAATAMLVKDSAKLTLGQPLTVITPHTLEAIVRQPPDRWITNARLTHYQALLLDTDRVQFGPPVTLNPATLLPVPENQPSPHDCRQVLAETHGTREDLKDQELPDADHTWYTDGSSYLDSGTRRAGAAVVDGHNTIWAQSLPPGTSAQKAELIALTKALELSKGKKANIYTDSRYAFATAHTHGSIYERRGWLTSEGKEIKNKAEIIALLKALFLPQEVAIIHCPGHQKGQDPVAVGNRQADRVARQAAMAEVLTLATEPDNTSHITAGKRTADGSEFEKRTADGSEFESPKKKAKVE

SEQ ID NO: 1963 - protein, 2101 aa, synthetic construct
  source 1..2101: note = Description of Artificial Sequence: Synthetic polypeptide
MPAAKRVKLDGGDKKYSIGLDIGTNSVGWAVITDEYKVPSKKFKVLGNTDRHSIKKNLIGALLFDSGETAEATRLKRTARRRYTRRKNRICYLQEIFSNEMAKVDDSFFHRLEESFLVEEDKKHERHPIFGNIVDEVAYHEKYPTIYHLRKKLVDSTDKADLRLIYLALAHMIKFRGHFLIEGDLNPDNSDVDKLFIQLVQTYNQLFEENPINASGVDAKAILSARLSKSRRLENLIAQLPGEKKNGLFGNLIALSLGLTPNFKSNFDLAEDAKLQLSKDTYDDDLDNLLAQIGDQYADLFLAAKNLSDAILLSDILRVNTEITKAPLSASMIKRYDEHHQDLTLLKALVRQQLPEKYKEIFFDQSKNGYAGYIDGGASQEEFYKFIKPILEKMDGTEELLVKLNREDLLRKQRTFDNGSIPHQIHLGELHAILRRQEDFYPFLKDNREKIEKILTFRIPYYVGPLARGNSRFAWMTRKSEETITPWNFEEVVDKGASAQSFIERMTNFDKNLPNEKVLPKHSLLYEYFTVYNELTKVKYVTEGMRKPAFLSGEQKKAIVDLLFKTNRKVTVKQLKEDYFKKIECFDSVEISGVEDRFNASLGTYHDLLKIIKDKDFLDNEENEDILEDIVLTLTLFEDREMIEERLKTYAHLFDDKVMKQLKRRRYTGWGRLSRKLINGIRDKQSGKTILDFLKSDGFANRNFMQLIHDDSLTFKEDIQKAQVSGQGDSLHEHIANLAGSPAIKKGILQTVKVVDELVKVMGRHKPENIVIEMARENQTTQKGQKNSRERMKRIEEGIKELGSQILKEHPVENTQLQNEKLYLYYLQNGRDMYVDQELDINRLSDYDVDHIVPQSFLKDDSIDNKVLTRSDKARGKSDNVPSEEVVKKMKNYWRQLLNAKLITQRKFDNLTKAERGGLSELDKAGFIKRQLVETRQITKHVAQILDSRMNTKYDENDKLIREVKVITLKSKLVSDFRKDFQFYKVREINNYHHAHDAYLNAVVGTALIKKYPKLESEFVYGDYKVYDVRKMIAKSEQEIGKATAKYFFYSNIMNFFKTEITLANGEIRKRPLIETNGETGEIVWDKGRDFATVRKVLSMPQVNIVKKTEVQTGGFSKESILPKRNSDKLIARKKDWDPKKYGGFDSPTVAYSVLVVAKVEKGKSKKLKSVKELLGITIMERSSFEKNPIDFLEAKGYKEVKKDLIIKLPKYSLFELENGRKRMLASAGELQKGNELALPSKYVNFLYLASHYEKLKGSPEDNEQKQLFVEQHKHYLDEIIEQISEFSKRVILADANLDKVLSAYNKHRDKPIREQAENIIHLFTLTNLGAPAAFKYFDTTIDRKRYTSTKEVLDATLIHQSITGLYETRIDLSQLGGDGGEAAAKEAAAKGGTVSLQDEHRLFDIPVTTSLPDVWLQDFPQAWAETGGLGRAKCQAPIIIDLKPTAVPVSIKQYPMSLEAHMGIRQHIIKFLELGVLRPCRSPWNTPLLPVKKPGTQDYRPVQDLREINKRTVDIHPTVPNPYNLLSTLKPDYSWYTVLDLKDAFFCLPLAPQSQELFAFEWKDPERGISGQLTWTRLPQGFKNSPTLFNEALHRDLTDFRTQHPEVTLLQYVDDLLLAAPTKKACTQGTRHLLQELGEKGYRASAKKAQICQTKVTYLGYILSEGKRWLTPGRIETVARIPPPRNPREVREFLGKAGFCRLFIPGFAELAAPLYALTKPSTPFTWQTEHQLAFEALKKALLSAPALGLPDTSKPFTLFLDERQGIAKGVLTQKLGPWKRPVAYLSKKLDPVAAGWPPCLRIMAATAMLVKDSAKLTLGQPLTVITPHTLEAIVRQPPDRWITNARLTHYQALLLDTDRVQFGPPVTLNPATLLPVPENQPSPHDCRQVLAETHGTREDLKDQELPDADHTWYTDGSSYLDSGTRRAGAAVVDGHNTIWAQSLPPGTSAQKAELIALTKALELSKGKKANIYTDSRYAFATAHTHGSIYERRGWLTSEGKEIKNKAEIIALLKALFLPQEVAIIHCPGHQKGQDPVAVGNRQADRVARQAAMAEVLTLATEPDNTSHITAGKRTADGSEFEKRTADGSEFESPKKKAKVE

SEQ ID NO: 1964 - protein, 2100 aa, synthetic construct
  source 1..2100: note = Description of Artificial Sequence: Synthetic polypeptide
MPAAKRVKLDGGDKKYSIGLDIGTNSVGWAVITDEYKVPSKKFKVLGNTDRHSIKKNLIGALLFDSGETAEATRLKRTARRRYTRRKNRICYLQEIFSNEMAKVDDSFFHRLEESFLVEEDKKHERHPIFGNIVDEVAYHEKYPTIYHLRKKLVDSTDKADLRLIYLALAHMIKFRGHFLIEGDLNPDNSDVDKLFIQLVQTYNQLFEENPINASGVDAKAILSARLSKSRRLENLIAQLPGEKKNGLFGNLIALSLGLTPNFKSNFDLAEDAKLQLSKDTYDDDLDNLLAQIGDQYADLFLAAKNLSDAILLSDILRVNTEITKAPLSASMIKRYDEHHQDLTLLKALVRQQLPEKYKEIFFDQSKNGYAGYIDGGASQEEFYKFIKPILEKMDGTEELLVKLNREDLLRKQRTFDNGSIPHQIHLGELHAILRRQEDFYPFLKDNREKIEKILTFRIPYYVGPLARGNSRFAWMTRKSEETITPWNFEEVVDKGASAQSFIERMTNFDKNLPNEKVLPKHSLLYEYFTVYNELTKVKYVTEGMRKPAFLSGEQKKAIVDLLFKTNRKVTVKQLKEDYFKKIECFDSVEISGVEDRFNASLGTYHDLLKIIKDKDFLDNEENEDILEDIVLTLTLFEDREMIEERLKTYAHLFDDKVMKQLKRRRYTGWGRLSRKLINGIRDKQSGKTILDFLKSDGFANRNFMQLIHDDSLTFKEDIQKAQVSGQGDSLHEHIANLAGSPAIKKGILQTVKVVDELVKVMGRHKPENIVIEMARENQTTQKGQKNSRERMKRIEEGIKELGSQILKEHPVENTQLQNEKLYLYYLQNGRDMYVDQELDINRLSDYDVDHIVPQSFLKDDSIDNKVLTRSDKARGKSDNVPSEEVVKKMKNYWRQLLNAKLITQRKFDNLTKAERGGLSELDKAGFIKRQLVETRQITKHVAQILDSRMNTKYDENDKLIREVKVITLKSKLVSDFRKDFQFYKVREINNYHHAHDAYLNAVVGTALIKKYPKLESEFVYGDYKVYDVRKMIAKSEQEIGKATAKYFFYSNIMNFFKTEITLANGEIRKRPLIETNGETGEIVWDKGRDFATVRKVLSMPQVNIVKKTEVQTGGFSKESILPKRNSDKLIARKKDWDPKKYGGFDSPTVAYSVLVVAKVEKGKSKKLKSVKELLGITIMERSSFEKNPIDFLEAKGYKEVKKDLIIKLPKYSLFELENGRKRMLASAGELQKGNELALPSKYVNFLYLASHYEKLKGSPEDNEQKQLFVEQHKHYLDEIIEQISEFSKRVILADANLDKVLSAYNKHRDKPIREQAENIIHLFTLTNLGAPAAFKYFDTTIDRKRYTSTKEVLDATLIHQSITGLYETRIDLSQLGGDGGGGSPAPGSSGGTVSLQDEHRLFDIPVTTSLPDVWLQDFPQAWAETGGLGRAKCQAPIIIDLKPTAVPVSIKQYPMSLEAHMGIRQHIIKFLELGVLRPCRSPWNTPLLPVKKPGTQDYRPVQDLREINKRTVDIHPTVPNPYNLLSTLKPDYSWYTVLDLKDAFFCLPLAPQSQELFAFEWKDPERGISGQLTWTRLPQGFKNSPTLFNEALHRDLTDFRTQHPEVTLLQYVDDLLLAAPTKKACTQGTRHLLQELGEKGYRASAKKAQICQTKVTYLGYILSEGKRWLTPGRIETVARIPPPRNPREVREFLGKAGFCRLFIPGFAELAAPLYALTKPSTPFTWQTEHQLAFEALKKALLSAPALGLPDTSKPFTLFLDERQGIAKGVLTQKLGPWKRPVAYLSKKLDPVAAGWPPCLRIMAATAMLVKDSAKLTLGQPLTVITPHTLEAIVRQPPDRWITNARLTHYQALLLDTDRVQFGPPVTLNPATLLPVPENQPSPHDCRQVLAETHGTREDLKDQELPDADHTWYTDGSSYLDSGTRRAGAAVVDGHNTIWAQSLPPGTSAQKAELIALTKALELSKGKKANIYTDSRYAFATAHTHGSIYERRGWLTSEGKEIKNKAEIIALLKALFLPQEVAIIHCPGHQKGQDPVAVGNRQADRVARQAAMAEVLTLATEPDNTSHITAGKRTADGSEFEKRTADGSEFESPKKKAKVE

SEQ ID NO: 1965 - protein, 2099 aa, synthetic construct
  source 1..2099: note = Description of Artificial Sequence: Synthetic polypeptide
MPAAKRVKLDGGDKKYSIGLDIGTNSVGWAVITDEYKVPSKKFKVLGNTDRHSIKKNLIGALLFDSGETAEATRLKRTARRRYTRRKNRICYLQEIFSNEMAKVDDSFFHRLEESFLVEEDKKHERHPIFGNIVDEVAYHEKYPTIYHLRKKLVDSTDKADLRLIYLALAHMIKFRGHFLIEGDLNPDNSDVDKLFIQLVQTYNQLFEENPINASGVDAKAILSARLSKSRRLENLIAQLPGEKKNGLFGNLIALSLGLTPNFKSNFDLAEDAKLQLSKDTYDDDLDNLLAQIGDQYADLFLAAKNLSDAILLSDILRVNTEITKAPLSASMIKRYDEHHQDLTLLKALVRQQLPEKYKEIFFDQSKNGYAGYIDGGASQEEFYKFIKPILEKMDGTEELLVKLNREDLLRKQRTFDNGSIPHQIHLGELHAILRRQEDFYPFLKDNREKIEKILTFRIPYYVGPLARGNSRFAWMTRKSEETITPWNFEEVVDKGASAQSFIERMTNFDKNLPNEKVLPKHSLLYEYFTVYNELTKVKYVTEGMRKPAFLSGEQKKAIVDLLFKTNRKVTVKQLKEDYFKKIECFDSVEISGVEDRFNASLGTYHDLLKIIKDKDFLDNEENEDILEDIVLTLTLFEDREMIEERLKTYAHLFDDKVMKQLKRRRYTGWGRLSRKLINGIRDKQSGKTILDFLKSDGFANRNFMQLIHDDSLTFKEDIQKAQVSGQGDSLHEHIANLAGSPAIKKGILQTVKVVDELVKVMGRHKPENIVIEMARENQTTQKGQKNSRERMKRIEEGIKELGSQILKEHPVENTQLQNEKLYLYYLQNGRDMYVDQELDINRLSDYDVDHIVPQSFLKDDSIDNKVLTRSDKARGKSDNVPSEEVVKKMKNYWRQLLNAKLITQRKFDNLTKAERGGLSELDKAGFIKRQLVETRQITKHVAQILDSRMNTKYDENDKLIREVKVITLKSKLVSDFRKDFQFYKVREINNYHHAHDAYLNAVVGTALIKKYPKLESEFVYGDYKVYDVRKMIAKSEQEIGKATAKYFFYSNIMNFFKTEITLANGEIRKRPLIETNGETGEIVWDKGRDFATVRKVLSMPQVNIVKKTEVQTGGFSKESILPKRNSDKLIARKKDWDPKKYGGFDSPTVAYSVLVVAKVEKGKSKKLKSVKELLGITIMERSSFEKNPIDFLEAKGYKEVKKDLIIKLPKYSLFELENGRKRMLASAGELQKGNELALPSKYVNFLYLASHYEKLKGSPEDNEQKQLFVEQHKHYLDEIIEQISEFSKRVILADANLDKVLSAYNKHRDKPIREQAENIIHLFTLTNLGAPAAFKYFDTTIDRKRYTSTKEVLDATLIHQSITGLYETRIDLSQLGGDGGGSSEAAAKGGTVSLQDEHRLFDIPVTTSLPDVWLQDFPQAWAETGGLGRAKCQAPIIIDLKPTAVPVSIKQYPMSLEAHMGIRQHIIKFLELGVLRPCRSPWNTPLLPVKKPGTQDYRPVQDLREINKRTVDIHPTVPNPYNLLSTLKPDYSWYTVLDLKDAFFCLPLAPQSQELFAFEWKDPERGISGQLTWTRLPQGFKNSPTLFNEALHRDLTDFRTQHPEVTLLQYVDDLLLAAPTKKACTQGTRHLLQELGEKGYRASAKKAQICQTKVTYLGYILSEGKRWLTPGRIETVARIPPPRNPREVREFLGKAGFCRLFIPGFAELAAPLYALTKPSTPFTWQTEHQLAFEALKKALLSAPALGLPDTSKPFTLFLDERQGIAKGVLTQKLGPWKRPVAYLSKKLDPVAAGWPPCLRIMAATAMLVKDSAKLTLGQPLTVITPHTLEAIVRQPPDRWITNARLTHYQALLLDTDRVQFGPPVTLNPATLLPVPENQPSPHDCRQVLAETHGTREDLKDQELPDADHTWYTDGSSYLDSGTRRAGAAVVDGHNTIWAQSLPPGTSAQKAELIALTKALELSKGKKANIYTDSRYAFATAHTHGSIYERRGWLTSEGKEIKNKAEIIALLKALFLPQEVAIIHCPGHQKGQDPVAVGNRQADRVARQAAMAEVLTLATEPDNTSHITAGKRTADGSEFEKRTADGSEFESPKKKAKVE

SEQ ID NO: 1966 - protein, 2111 aa, synthetic construct
  source 1..2111: note = Description of Artificial Sequence: Synthetic polypeptide
MPAAKRVKLDGGDKKYSIGLDIGTNSVGWAVITDEYKVPSKKFKVLGNTDRHSIKKNLIGALLFDSGETAEATRLKRTARRRYTRRKNRICYLQEIFSNEMAKVDDSFFHRLEESFLVEEDKKHERHPIFGNIVDEVAYHEKYPTIYHLRKKLVDSTDKADLRLIYLALAHMIKFRGHFLIEGDLNPDNSDVDKLFIQLVQTYNQLFEENPINASGVDAKAILSARLSKSRRLENLIAQLPGEKKNGLFGNLIALSLGLTPNFKSNFDLAEDAKLQLSKDTYDDDLDNLLAQIGDQYADLFLAAKNLSDAILLSDILRVNTEITKAPLSASMIKRYDEHHQDLTLLKALVRQQLPEKYKEIFFDQSKNGYAGYIDGGASQEEFYKFIKPILEKMDGTEELLVKLNREDLLRKQRTFDNGSIPHQIHLGELHAILRRQEDFYPFLKDNREKIEKILTFRIPYYVGPLARGNSRFAWMTRKSEETITPWNFEEVVDKGASAQSFIERMTNFDKNLPNEKVLPKHSLLYEYFTVYNELTKVKYVTEGMRKPAFLSGEQKKAIVDLLFKTNRKVTVKQLKEDYFKKIECFDSVEISGVEDRFNASLGTYHDLLKIIKDKDFLDNEENEDILEDIVLTLTLFEDREMIEERLKTYAHLFDDKVMKQLKRRRYTGWGRLSRKLINGIRDKQSGKTILDFLKSDGFANRNFMQLIHDDSLTFKEDIQKAQVSGQGDSLHEHIANLAGSPAIKKGILQTVKVVDELVKVMGRHKPENIVIEMARENQTTQKGQKNSRERMKRIEEGIKELGSQILKEHPVENTQLQNEKLYLYYLQNGRDMYVDQELDINRLSDYDVDHIVPQSFLKDDSIDNKVLTRSDKARGKSDNVPSEEVVKKMKNYWRQLLNAKLITQRKFDNLTKAERGGLSELDKAGFIKRQLVETRQITKHVAQILDSRMNTKYDENDKLIREVKVITLKSKLVSDFRKDFQFYKVREINNYHHAHDAYLNAVVGTALIKKYPKLESEFVYGDYKVYDVRKMIAKSEQEIGKATAKYFFYSNIMNFFKTEITLANGEIRKRPLIETNGETGEIVWDKGRDFATVRKVLSMPQVNIVKKTEVQTGGFSKESILPKRNSDKLIARKKDWDPKKYGGFDSPTVAYSVLVVAKVEKGKSKKLKSVKELLGITIMERSSFEKNPIDFLEAKGYKEVKKDLIIKLPKYSLFELENGRKRMLASAGELQKGNELALPSKYVNFLYLASHYEKLKGSPEDNEQKQLFVEQHKHYLDEIIEQISEFSKRVILADANLDKVLSAYNKHRDKPIREQAENIIHLFTLTNLGAPAAFKYFDTTIDRKRYTSTKEVLDATLIHQSITGLYETRIDLSQLGGDGGGGGGSGGGGSGGGGSGGGGSGGTVSLQDEHRLFDIPVTTSLPDVWLQDFPQAWAETGGLGRAKCQAPIIIDLKPTAVPVSIKQYPMSLEAHMGIRQHIIKFLELGVLRPCRSPWNTPLLPVKKPGTQDYRPVQDLREINKRTVDIHPTVPNPYNLLSTLKPDYSWYTVLDLKDAFFCLPLAPQSQELFAFEWKDPERGISGQLTWTRLPQGFKNSPTLFNEALHRDLTDFRTQHPEVTLLQYVDDLLLAAPTKKACTQGTRHLLQELGEKGYRASAKKAQICQTKVTYLGYILSEGKRWLTPGRIETVARIPPPRNPREVREFLGKAGFCRLFIPGFAELAAPLYALTKPSTPFTWQTEHQLAFEALKKALLSAPALGLPDTSKPFTLFLDERQGIAKGVLTQKLGPWKRPVAYLSKKLDPVAAGWPPCLRIMAATAMLVKDSAKLTLGQPLTVITPHTLEAIVRQPPDRWITNARLTHYQALLLDTDRVQFGPPVTLNPATLLPVPENQPSPHDCRQVLAETHGTREDLKDQELPDADHTWYTDGSSYLDSGTRRAGAAVVDGHNTIWAQSLPPGTSAQKAELIALTKALELSKGKKANIYTDSRYAFATAHTHGSIYERRGWLTSEGKEIKNKAEIIALLKALFLPQEVAIIHCPGHQKGQDPVAVGNRQADRVARQAAMAEVLTLATEPDNTSHITAGKRTADGSEFEKRTADGSEFESPKKKAKVE

SEQ ID NO: 1967 - protein, 2137 aa, synthetic construct
  source 1..2137: note = Description of Artificial Sequence: Synthetic polypeptide
MPAAKRVKLDGGDKKYSIGLDIGTNSVGWAVITDEYKVPSKKFKVLGNTDRHSIKKNLIGALLFDSGETAEATRLKRTARRRYTRRKNRICYLQEIFSNEMAKVDDSFFHRLEESFLVEEDKKHERHPIFGNIVDEVAYHEKYPTIYHLRKKLVDSTDKADLRLIYLALAHMIKFRGHFLIEGDLNPDNSDVDKLFIQLVQTYNQLFEENPINASGVDAKAILSARLSKSRRLENLIAQLPGEKKNGLFGNLIALSLGLTPNFKSNFDLAEDAKLQLSKDTYDDDLDNLLAQIGDQYADLFLAAKNLSDAILLSDILRVNTEITKAPLSASMIKRYDEHHQDLTLLKALVRQQLPEKYKEIFFDQSKNGYAGYIDGGASQEEFYKFIKPILEKMDGTEELLVKLNREDLLRKQRTFDNGSIPHQIHLGELHAILRRQEDFYPFLKDNREKIEKILTFRIPYYVGPLARGNSRFAWMTRKSEETITPWNFEEVVDKGASAQSFIERMTNFDKNLPNEKVLPKHSLLYEYFTVYNELTKVKYVTEGMRKPAFLSGEQKKAIVDLLFKTNRKVTVKQLKEDYFKKIECFDSVEISGVEDRFNASLGTYHDLLKIIKDKDFLDNEENEDILEDIVLTLTLFEDREMIEERLKTYAHLFDDKVMKQLKRRRYTGWGRLSRKLINGIRDKQSGKTILDFLKSDGFANRNFMQLIHDDSLTFKEDIQKAQVSGQGDSLHEHIANLAGSPAIKKGILQTVKVVDELVKVMGRHKPENIVIEMARENQTTQKGQKNSRERMKRIEEGIKELGSQILKEHPVENTQLQNEKLYLYYLQNGRDMYVDQELDINRLSDYDVDHIVPQSFLKDDSIDNKVLTRSDKARGKSDNVPSEEVVKKMKNYWRQLLNAKLITQRKFDNLTKAERGGLSELDKAGFIKRQLVETRQITKHVAQILDSRMNTKYDENDKLIREVKVITLKSKLVSDFRKDFQFYKVREINNYHHAHDAYLNAVVGTALIKKYPKLESEFVYGDYKVYDVRKMIAKSEQEIGKATAKYFFYSNIMNFFKTEITLANGEIRKRPLIETNGETGEIVWDKGRDFATVRKVLSMPQVNIVKKTEVQTGGFSKESILPKRNSDKLIARKKDWDPKKYGGFDSPTVAYSVLVVAKVEKGKSKKLKSVKELLGITIMERSSFEKNPIDFLEAKGYKEVKKDLIIKLPKYSLFELENGRKRMLASAGELQKGNELALPSKYVNFLYLASHYEKLKGSPEDNEQKQLFVEQHKHYLDEIIEQISEFSKRVILADANLDKVLSAYNKHRDKPIREQAENIIHLFTLTNLGAPAAFKYFDTTIDRKRYTSTKEVLDATLIHQSITGLYETRIDLSQLGGDGGAEAAAKEAAAKEAAAKEAAAKALEAEAAAKEAAAKEAAAKEAAAKAGGTVSLQDEHRLFDIPVTTSLPDVWLQDFPQAWAETGGLGRAKCQAPIIIDLKPTAVPVSIKQYPMSLEAHMGIRQHIIKFLELGVLRPCRSPWNTPLLPVKKPGTQDYRPVQDLREINKRTVDIHPTVPNPYNLLSTLKPDYSWYTVLDLKDAFFCLPLAPQSQELFAFEWKDPERGISGQLTWTRLPQGFKNSPTLFNEALHRDLTDFRTQHPEVTLLQYVDDLLLAAPTKKACTQGTRHLLQELGEKGYRASAKKAQICQTKVTYLGYILSEGKRWLTPGRIETVARIPPPRNPREVREFLGKAGFCRLFIPGFAELAAPLYALTKPSTPFTWQTEHQLAFEALKKALLSAPALGLPDTSKPFTLFLDERQGIAKGVLTQKLGPWKRPVAYLSKKLDPVAAGWPPCLRIMAATAMLVKDSAKLTLGQPLTVITPHTLEAIVRQPPDRWITNARLTHYQALLLDTDRVQFGPPVTLNPATLLPVPENQPSPHDCRQVLAETHGTREDLKDQELPDADHTWYTDGSSYLDSGTRRAGAAVVDGHNTIWAQSLPPGTSAQKAELIALTKALELSKGKKANIYTDSRYAFATAHTHGSIYERRGWLTSEGKEIKNKAEIIALLKALFLPQEVAIIHCPGHQKGQDPVAVGNRQADRVARQAAMAEVLTLATEPDNTSHITAGKRTADGSEFEKRTADGSEFESPKKKAKVE

SEQ ID NO: 1968 - protein, 2102 aa, synthetic construct
  source 1..2102: note = Description of Artificial Sequence: Synthetic polypeptide
MPAAKRVKLDGGDKKYSIGLDIGTNSVGWAVITDEYKVPSKKFKVLGNTDRHSIKKNLIGALLFDSGETAEATRLKRTARRRYTRRKNRICYLQEIFSNEMAKVDDSFFHRLEESFLVEEDKKHERHPIFGNIVDEVAYHEKYPTIYHLRKKLVDSTDKADLRLIYLALAHMIKFRGHFLIEGDLNPDNSDVDKLFIQLVQTYNQLFEENPINASGVDAKAILSARLSKSRRLENLIAQLPGEKKNGLFGNLIALSLGLTPNFKSNFDLAEDAKLQLSKDTYDDDLDNLLAQIGDQYADLFLAAKNLSDAILLSDILRVNTEITKAPLSASMIKRYDEHHQDLTLLKALVRQQLPEKYKEIFFDQSKNGYAGYIDGGASQEEFYKFIKPILEKMDGTEELLVKLNREDLLRKQRTFDNGSIPHQIHLGELHAILRRQEDFYPFLKDNREKIEKILTFRIPYYVGPLARGNSRFAWMTRKSEETITPWNFEEVVDKGASAQSFIERMTNFDKNLPNEKVLPKHSLLYEYFTVYNELTKVKYVTEGMRKPAFLSGEQKKAIVDLLFKTNRKVTVKQLKEDYFKKIECFDSVEISGVEDRFNASLGTYHDLLKIIKDKDFLDNEENEDILEDIVLTLTLFEDREMIEERLKTYAHLFDDKVMKQLKRRRYTGWGRLSRKLINGIRDKQSGKTILDFLKSDGFANRNFMQLIHDDSLTFKEDIQKAQVSGQGDSLHEHIANLAGSPAIKKGILQTVKVVDELVKVMGRHKPENIVIEMARENQTTQKGQKNSRERMKRIEEGIKELGSQILKEHPVENTQLQNEKLYLYYLQNGRDMYVDQELDINRLSDYDVDHIVPQSFLKDDSIDNKVLTRSDKARGKSDNVPSEEVVKKMKNYWRQLLNAKLITQRKFDNLTKAERGGLSELDKAGFIKRQLVETRQITKHVAQILDSRMNTKYDENDKLIREVKVITLKSKLVSDFRKDFQFYKVREINNYHHAHDAYLNAVVGTALIKKYPKLESEFVYGDYKVYDVRKMIAKSEQEIGKATAKYFFYSNIMNFFKTEITLANGEIRKRPLIETNGETGEIVWDKGRDFATVRKVLSMPQVNIVKKTEVQTGGFSKESILPKRNSDKLIARKKDWDPKKYGGFDSPTVAYSVLVVAKVEKGKSKKLKSVKELLGITIMERSSFEKNPIDFLEAKGYKEVKKDLIIKLPKYSLFELENGRKRMLASAGELQKGNELALPSKYVNFLYLASHYEKLKGSPEDNEQKQLFVEQHKHYLDEIIEQISEFSKRVILADANLDKVLSAYNKHRDKPIREQAENIIHLFTLTNLGAPAAFKYFDTTIDRKRYTSTKEVLDATLIHQSITGLYETRIDLSQLGGDGGPAPGSSEAAAKGGTVSLQDEHRLFDIPVTTSLPDVWLQDFPQAWAETGGLGRAKCQAPIIIDLKPTAVPVSIKQYPMSLEAHMGIRQHIIKFLELGVLRPCRSPWNTPLLPVKKPGTQDYRPVQDLREINKRTVDIHPTVPNPYNLLSTLKPDYSWYTVLDLKDAFFCLPLAPQSQELFAFEWKDPERGISGQLTWTRLPQGFKNSPTLFNEALHRDLTDFRTQHPEVTLLQYVDDLLLAAPTKKACTQGTRHLLQELGEKGYRASAKKAQICQTKVTYLGYILSEGKRWLTPGRIETVARIPPPRNPREVREFLGKAGFCRLFIPGFAELAAPLYALTKPSTPFTWQTEHQLAFEALKKALLSAPALGLPDTSKPFTLFLDERQGIAKGVLTQKLGPWKRPVAYLSKKLDPVAAGWPPCLRIMAATAMLVKDSAKLTLGQPLTVITPHTLEAIVRQPPDRWITNARLTHYQALLLDTDRVQFGPPVTLNPATLLPVPENQPSPHDCRQVLAETHGTREDLKDQELPDADHTWYTDGSSYLDSGTRRAGAAVVDGHNTIWAQSLPPGTSAQKAELIALTKALELSKGKKANIYTDSRYAFATAHTHGSIYERRGWLTSEGKEIKNKAEIIALLKALFLPQEVAIIHCPGHQKGQDPVAVGNRQADRVARQAAMAEVLTLATEPDNTSHITAGKRTADGSEFEKRTADGSEFESPKKKAKVE

SEQ ID NO: 1969 - protein, 2102 aa, synthetic construct
  source 1..2102: note = Description of Artificial Sequence: Synthetic polypeptide
MPAAKRVKLDGGDKKYSIGLDIGTNSVGWAVITDEYKVPSKKFKVLGNTDRHSIKKNLIGALLFDSGETAEATRLKRTARRRYTRRKNRICYLQEIFSNEMAKVDDSFFHRLEESFLVEEDKKHERHPIFGNIVDEVAYHEKYPTIYHLRKKLVDSTDKADLRLIYLALAHMIKFRGHFLIEGDLNPDNSDVDKLFIQLVQTYNQLFEENPINASGVDAKAILSARLSKSRRLENLIAQLPGEKKNGLFGNLIALSLGLTPNFKSNFDLAEDAKLQLSKDTYDDDLDNLLAQIGDQYADLFLAAKNLSDAILLSDILRVNTEITKAPLSASMIKRYDEHHQDLTLLKALVRQQLPEKYKEIFFDQSKNGYAGYIDGGASQEEFYKFIKPILEKMDGTEELLVKLNREDLLRKQRTFDNGSIPHQIHLGELHAILRRQEDFYPFLKDNREKIEKILTFRIPYYVGPLARGNSRFAWMTRKSEETITPWNFEEVVDKGASAQSFIERMTNFDKNLPNEKVLPKHSLLYEYFTVYNELTKVKYVTEGMRKPAFLSGEQKKAIVDLLFKTNRKVTVKQLKEDYFKKIECFDSVEISGVEDRFNASLGTYHDLLKIIKDKDFLDNEENEDILEDIVLTLTLFEDREMIEERLKTYAHLFDDKVMKQLKRRRYTGWGRLSRKLINGIRDKQSGKTILDFLKSDGFANRNFMQLIHDDSLTFKEDIQKAQVSGQGDSLHEHIANLAGSPAIKKGILQTVKVVDELVKVMGRHKPENIVIEMARENQTTQKGQKNSRERMKRIEEGIKELGSQILKEHPVENTQLQNEKLYLYYLQNGRDMYVDQELDINRLSDYDVDHIVPQSFLKDDSIDNKVLTRSDKARGKSDNVPSEEVVKKMKNYWRQLLNAKLITQRKFDNLTKAERGGLSELDKAGFIKRQLVETRQITKHVAQILDSRMNTKYDENDKLIREVKVITLKSKLVSDFRKDFQFYKVREINNYHHAHDAYLNAVVGTALIKKYPKLESEFVYGDYKVYDVRKMIAKSEQEIGKATAKYFFYSNIMNFFKTEITLANGEIRKRPLIETNGETGEIVWDKGRDFATVRKVLSMPQVNIVKKTEVQTGGFSKESILPKRNSDKLIARKKDWDPKKYGGFDSPTVAYSVLVVAKVEKGKSKKLKSVKELLGITIMERSSFEKNPIDFLEAKGYKEVKKDLIIKLPKYSLFELENGRKRMLASAGELQKGNELALPSKYVNFLYLASHYEKLKGSPEDNEQKQLFVEQHKHYLDEIIEQISEFSKRVILADANLDKVLSAYNKHRDKPIREQAENIIHLFTLTNLGAPAAFKYFDTTIDRKRYTSTKEVLDATLIHQSITGLYETRIDLSQLGGDGGGGGEAAAKPAPGGTVSLQDEHRLFDIPVTTSLPDVWLQDFPQAWAETGGLGRAKCQAPIIIDLKPTAVPVSIKQYPMSLEAHMGIRQHIIKFLELGVLRPCRSPWNTPLLPVKKPGTQDYRPVQDLREINKRTVDIHPTVPNPYNLLSTLKPDYSWYTVLDLKDAFFCLPLAPQSQELFAFEWKDPERGISGQLTWTRLPQGFKNSPTLFNEALHRDLTDFRTQHPEVTLLQYVDDLLLAAPTKKACTQGTRHLLQELGEKGYRASAKKAQICQTKVTYLGYILSEGKRWLTPGRIETVARIPPPRNPREVREFLGKAGFCRLFIPGFAELAAPLYALTKPSTPFTWQTEHQLAFEALKKALLSAPALGLPDTSKPFTLFLDERQGIAKGVLTQKLGPWKRPVAYLSKKLDPVAAGWPPCLRIMAATAMLVKDSAKLTLGQPLTVITPHTLEAIVRQPPDRWITNARLTHYQALLLDTDRVQFGPPVTLNPATLLPVPENQPSPHDCRQVLAETHGTREDLKDQELPDADHTWYTDGSSYLDSGTRRAGAAVVDGHNTIWAQSLPPGTSAQKAELIALTKALELSKGKKANIYTDSRYAFATAHTHGSIYERRGWLTSEGKEIKNKAEIIALLKALFLPQEVAIIHCPGHQKGQDPVAVGNRQADRVARQAAMAEVLTLATEPDNTSHITAGKRTADGSEFEKRTADGSEFESPKKKAKVE

SEQ ID NO: 1970 - protein, 2097 aa, synthetic construct
  source 1..2097: note = Description of Artificial Sequence: Synthetic polypeptide
MPAAKRVKLDGGDKKYSIGLDIGTNSVGWAVITDEYKVPSKKFKVLGNTDRHSIKKNLIGALLFDSGETAEATRLKRTARRRYTRRKNRICYLQEIFSNEMAKVDDSFFHRLEESFLVEEDKKHERHPIFGNIVDEVAYHEKYPTIYHLRKKLVDSTDKADLRLIYLALAHMIKFRGHFLIEGDLNPDNSDVDKLFIQLVQTYNQLFEENPINASGVDAKAILSARLSKSRRLENLIAQLPGEKKNGLFGNLIALSLGLTPNFKSNFDLAEDAKLQLSKDTYDDDLDNLLAQIGDQYADLFLAAKNLSDAILLSDILRVNTEITKAPLSASMIKRYDEHHQDLTLLKALVRQQLPEKYKEIFFDQSKNGYAGYIDGGASQEEFYKFIKPILEKMDGTEELLVKLNREDLLRKQRTFDNGSIPHQIHLGELHAILRRQEDFYPFLKDNREKIEKILTFRIPYYVGPLARGNSRFAWMTRKSEETITPWNFEEVVDKGASAQSFIERMTNFDKNLPNEKVLPKHSLLYEYFTVYNELTKVKYVTEGMRKPAFLSGEQKKAIVDLLFKTNRKVTVKQLKEDYFKKIECFDSVEISGVEDRFNASLGTYHDLLKIIKDKDFLDNEENEDILEDIVLTLTLFEDREMIEERLKTYAHLFDDKVMKQLKRRRYTGWGRLSRKLINGIRDKQSGKTILDFLKSDGFANRNFMQLIHDDSLTFKEDIQKAQVSGQGDSLHEHIANLAGSPAIKKGILQTVKVVDELVKVMGRHKPENIVIEMARENQTTQKGQKNSRERMKRIEEGIKELGSQILKEHPVENTQLQNEKLYLYYLQNGRDMYVDQELDINRLSDYDVDHIVPQSFLKDDSIDNKVLTRSDKARGKSDNVPSEEVVKKMKNYWRQLLNAKLITQRKFDNLTKAERGGLSELDKAGFIKRQLVETRQITKHVAQILDSRMNTKYDENDKLIREVKVITLKSKLVSDFRKDFQFYKVREINNYHHAHDAYLNAVVGTALIKKYPKLESEFVYGDYKVYDVRKMIAKSEQEIGKATAKYFFYSNIMNFFKTEITLANGEIRKRPLIETNGETGEIVWDKGRDFATVRKVLSMPQVNIVKKTEVQTGGFSKESILPKRNSDKLIARKKDWDPKKYGGFDSPTVAYSVLVVAKVEKGKSKKLKSVKELLGITIMERSSFEKNPIDFLEAKGYKEVKKDLIIKLPKYSLFELENGRKRMLASAGELQKGNELALPSKYVNFLYLASHYEKLKGSPEDNEQKQLFVEQHKHYLDEIIEQISEFSKRVILADANLDKVLSAYNKHRDKPIREQAENIIHLFTLTNLGAPAAFKYFDTTIDRKRYTSTKEVLDATLIHQSITGLYETRIDLSQLGGDGGGSSGSSGGTVSLQDEHRLFDIPVTTSLPDVWLQDFPQAWAETGGLGRAKCQAPIIIDLKPTAVPVSIKQYPMSLEAHMGIRQHIIKFLELGVLRPCRSPWNTPLLPVKKPGTQDYRPVQDLREINKRTVDIHPTVPNPYNLLSTLKPDYSWYTVLDLKDAFFCLPLAPQSQELFAFEWKDPERGISGQLTWTRLPQGFKNSPTLFNEALHRDLTDFRTQHPEVTLLQYVDDLLLAAPTKKACTQGTRHLLQELGEKGYRASAKKAQICQTKVTYLGYILSEGKRWLTPGRIETVARIPPPRNPREVREFLGKAGFCRLFIPGFAELAAPLYALTKPSTPFTWQTEHQLAFEALKKALLSAPALGLPDTSKPFTLFLDERQGIAKGVLTQKLGPWKRPVAYLSKKLDPVAAGWPPCLRIMAATAMLVKDSAKLTLGQPLTVITPHTLEAIVRQPPDRWITNARLTHYQALLLDTDRVQFGPPVTLNPATLLPVPENQPSPHDCRQVLAETHGTREDLKDQELPDADHTWYTDGSSYLDSGTRRAGAAVVDGHNTIWAQSLPPGTSAQKAELIALTKALELSKGKKANIYTDSRYAFATAHTHGSIYERRGWLTSEGKEIKNKAEIIALLKALFLPQEVAIIHCPGHQKGQDPVAVGNRQADRVARQAAMAEVLTLATEPDNTSHITAGKRTADGSEFEKRTADGSEFESPKKKAKVE

SEQ ID NO: 1971 - protein, 2099 aa, synthetic construct
  source 1..2099: note = Description of Artificial Sequence: Synthetic polypeptide
MPAAKRVKLDGGDKKYSIGLDIGTNSVGWAVITDEYKVPSKKFKVLGNTDRHSIKKNLIGALLFDSGETAEATRLKRTARRRYTRRKNRICYLQEIFSNEMAKVDDSFFHRLEESFLVEEDKKHERHPIFGNIVDEVAYHEKYPTIYHLRKKLVDSTDKADLRLIYLALAHMIKFRGHFLIEGDLNPDNSDVDKLFIQLVQTYNQLFEENPINASGVDAKAILSARLSKSRRLENLIAQLPGEKKNGLFGNLIALSLGLTPNFKSNFDLAEDAKLQLSKDTYDDDLDNLLAQIGDQYADLFLAAKNLSDAILLSDILRVNTEITKAPLSASMIKRYDEHHQDLTLLKALVRQQLPEKYKEIFFDQSKNGYAGYIDGGASQEEFYKFIKPILEKMDGTEELLVKLNREDLLRKQRTFDNGSIPHQIHLGELHAILRRQEDFYPFLKDNREKIEKILTFRIPYYVGPLARGNSRFAWMTRKSEETITPWNFEEVVDKGASAQSFIERMTNFDKNLPNEKVLPKHSLLYEYFTVYNELTKVKYVTEGMRKPAFLSGEQKKAIVDLLFKTNRKVTVKQLKEDYFKKIECFDSVEISGVEDRFNASLGTYHDLLKIIKDKDFLDNEENEDILEDIVLTLTLFEDREMIEERLKTYAHLFDDKVMKQLKRRRYTGWGRLSRKLINGIRDKQSGKTILDFLKSDGFANRNFMQLIHDDSLTFKEDIQKAQVSGQGDSLHEHIANLAGSPAIKKGILQTVKVVDELVKVMGRHKPENIVIEMARENQTTQKGQKNSRERMKRIEEGIKELGSQILKEHPVENTQLQNEKLYLYYLQNGRDMYVDQELDINRLSDYDVDHIVPQSFLKDDSIDNKVLTRSDKARGKSDNVPSEEVVKKMKNYWRQLLNAKLITQRKFDNLTKAERGGLSELDKAGFIKRQLVETRQITKHVAQILDSRMNTKYDENDKLIREVKVITLKSKLVSDFRKDFQFYKVREINNYHHAHDAYLNAVVGTALIKKYPKLESEFVYGDYKVYDVRKMIAKSEQEIGKATAKYFFYSNIMNFFKTEITLANGEIRKRPLIETNGETGEIVWDKGRDFATVRKVLSMPQVNIVKKTEVQTGGFSKESILPKRNSDKLIARKKDWDPKKYGGFDSPTVAYSVLVVAKVEKGKSKKLKSVKELLGITIMERSSFEKNPIDFLEAKGYKEVKKDLIIKLPKYSLFELENGRKRMLASAGELQKGNELALPSKYVNFLYLASHYEKLKGSPEDNEQKQLFVEQHKHYLDEIIEQISEFSKRVILADANLDKVLSAYNKHRDKPIREQAENIIHLFTLTNLGAPAAFKYFDTTIDRKRYTSTKEVLDATLIHQSITGLYETRIDLSQLGGDGGEAAAKGSSGGTVSLQDEHRLFDIPVTTSLPDVWLQDFPQAWAETGGLGRAKCQAPIIIDLKPTAVPVSIKQYPMSLEAHMGIRQHIIKFLELGVLRPCRSPWNTPLLPVKKPGTQDYRPVQDLREINKRTVDIHPTVPNPYNLLSTLKPDYSWYTVLDLKDAFFCLPLAPQSQELFAFEWKDPERGISGQLTWTRLPQGFKNSPTLFNEALHRDLTDFRTQHPEVTLLQYVDDLLLAAPTKKACTQGTRHLLQELGEKGYRASAKKAQICQTKVTYLGYILSEGKRWLTPGRIETVARIPPPRNPREVREFLGKAGFCRLFIPGFAELAAPLYALTKPSTPFTWQTEHQLAFEALKKALLSAPALGLPDTSKPFTLFLDERQGIAKGVLTQKLGPWKRPVAYLSKKLDPVAAGWPPCLRIMAATAMLVKDSAKLTLGQPLTVITPHTLEAIVRQPPDRWITNARLTHYQALLLDTDRVQFGPPVTLNPATLLPVPENQPSPHDCRQVLAETHGTREDLKDQELPDADHTWYTDGSSYLDSGTRRAGAAVVDGHNTIWAQSLPPGTSAQKAELIALTKALELSKGKKANIYTDSRYAFATAHTHGSIYERRGWLTSEGKEIKNKAEIIALLKALFLPQEVAIIHCPGHQKGQDPVAVGNRQADRVARQAAMAEVLTLATEPDNTSHITAGKRTADGSEFEKRTADGSEFESPKKKAKVE

SEQ ID NO: 1972 - protein, 2102 aa, synthetic construct
  source 1..2102: note = Description of Artificial Sequence: Synthetic polypeptide
MPAAKRVKLDGGDKKYSIGLDIGTNSVGWAVITDEYKVPSKKFKVLGNTDRHSIKKNLIGALLFDSGETAEATRLKRTARRRYTRRKNRICYLQEIFSNEMAKVDDSFFHRLEESFLVEEDKKHERHPIFGNIVDEVAYHEKYPTIYHLRKKLVDSTDKADLRLIYLALAHMIKFRGHFLIEGDLNPDNSDVDKLFIQLVQTYNQLFEENPINASGVDAKAILSARLSKSRRLENLIAQLPGEKKNGLFGNLIALSLGLTPNFKSNFDLAEDAKLQLSKDTYDDDLDNLLAQIGDQYADLFLAAKNLSDAILLSDILRVNTEITKAPLSASMIKRYDEHHQDLTLLKALVRQQLPEKYKEIFFDQSKNGYAGYIDGGASQEEFYKFIKPILEKMDGTEELLVKLNREDLLRKQRTFDNGSIPHQIHLGELHAILRRQEDFYPFLKDNREKIEKILTFRIPYYVGPLARGNSRFAWMTRKSEETITPWNFEEVVDKGASAQSFIERMTNFDKNLPNEKVLPKHSLLYEYFTVYNELTKVKYVTEGMRKPAFLSGEQKKAIVDLLFKTNRKVTVKQLKEDYFKKIECFDSVEISGVEDRFNASLGTYHDLLKIIKDKDFLDNEENEDILEDIVLTLTLFEDREMIEERLKTYAHLFDDKVMKQLKRRRYTGWGRLSRKLINGIRDKQSGKTILDFLKSDGFANRNFMQLIHDDSLTFKEDIQKAQVSGQGDSLHEHIANLAGSPAIKKGILQTVKVVDELVKVMGRHKPENIVIEMARENQTTQKGQKNSRERMKRIEEGIKELGSQILKEHPVENTQLQNEKLYLYYLQNGRDMYVDQELDINRLSDYDVDHIVPQSFLKDDSIDNKVLTRSDKARGKSDNVPSEEVVKKMKNYWRQLLNAKLITQRKFDNLTKAERGGLSELDKAGFIKRQLVETRQITKHVAQILDSRMNTKYDENDKLIREVKVITLKSKLVSDFRKDFQFYKVREINNYHHAHDAYLNAVVGTALIKKYPKLESEFVYGDYKVYDVRKMIAKSEQEIGKATAKYFFYSNIMNFFKTEITLANGEIRKRPLIETNGETGEIVWDKGRDFATVRKVLSMPQVNIVKKTEVQTGGFSKESILPKRNSDKLIARKKDWDPKKYGGFDSPTVAYSVLVVAKVEKGKSKKLKSVKELLGITIMERSSFEKNPIDFLEAKGYKEVKKDLIIKLPKYSLFELENGRKRMLASAGELQKGNELALPSKYVNFLYLASHYEKLKGSPEDNEQKQLFVEQHKHYLDEIIEQISEFSKRVILADANLDKVLSAYNKHRDKPIREQAENIIHLFTLTNLGAPAAFKYFDTTIDRKRYTSTKEVLDATLIHQSITGLYETRIDLSQLGGDGGGSSEAAAKGGGGGTVSLQDEHRLFDIPVTTSLPDVWLQDFPQAWAETGGLGRAKCQAPIIIDLKPTAVPVSIKQYPMSLEAHMGIRQHIIKFLELGVLRPCRSPWNTPLLPVKKPGTQDYRPVQDLREINKRTVDIHPTVPNPYNLLSTLKPDYSWYTVLDLKDAFFCLPLAPQSQELFAFEWKDPERGISGQLTWTRLPQGFKNSPTLFNEALHRDLTDFRTQHPEVTLLQYVDDLLLAAPTKKACTQGTRHLLQELGEKGYRASAKKAQICQTKVTYLGYILSEGKRWLTPGRIETVARIPPPRNPREVREFLGKAGFCRLFIPGFAELAAPLYALTKPSTPFTWQTEHQLAFEALKKALLSAPALGLPDTSKPFTLFLDERQGIAKGVLTQKLGPWKRPVAYLSKKLDPVAAGWPPCLRIMAATAMLVKDSAKLTLGQPLTVITPHTLEAIVRQPPDRWITNARLTHYQALLLDTDRVQFGPPVTLNPATLLPVPENQPSPHDCRQVLAETHGTREDLKDQELPDADHTWYTDGSSYLDSGTRRAGAAVVDGHNTIWAQSLPPGTSAQKAELIALTKALELSKGKKANIYTDSRYAFATAHTHGSIYERRGWLTSEGKEIKNKAEIIALLKALFLPQEVAIIHCPGHQKGQDPVAVGNRQADRVARQAAMAEVLTLATEPDNTSHITAGKRTADGSEFEKRTADGSEFESPKKKAKVE

SEQ ID NO: 1973 - protein, 2102 aa, synthetic construct
  source 1..2102: note = Description of Artificial Sequence: Synthetic polypeptide
MPAAKRVKLDGGDKKYSIGLDIGTNSVGWAVITDEYKVPSKKFKVLGNTDRHSIKKNLIGALLFDSGETAEATRLKRTARRRYTRRKNRICYLQEIFSNEMAKVDDSFFHRLEESFLVEEDKKHERHPIFGNIVDEVAYHEKYPTIYHLRKKLVDSTDKADLRLIYLALAHMIKFRGHFLIEGDLNPDNSDVDKLFIQLVQTYNQLFEENPINASGVDAKAILSARLSKSRRLENLIAQLPGEKKNGLFGNLIALSLGLTPNFKSNFDLAEDAKLQLSKDTYDDDLDNLLAQIGDQYADLFLAAKNLSDAILLSDILRVNTEITKAPLSASMIKRYDEHHQDLTLLKALVRQQLPEKYKEIFFDQSKNGYAGYIDGGASQEEFYKFIKPILEKMDGTEELLVKLNREDLLRKQRTFDNGSIPHQIHLGELHAILRRQEDFYPFLKDNREKIEKILTFRIPYYVGPLARGNSRFAWMTRKSEETITPWNFEEVVDKGASAQSFIERMTNFDKNLPNEKVLPKHSLLYEYFTVYNELTKVKYVTEGMRKPAFLSGEQKKAIVDLLFKTNRKVTVKQLKEDYFKKIECFDSVEISGVEDRFNASLGTYHDLLKIIKDKDFLDNEENEDILEDIVLTLTLFEDREMIEERLKTYAHLFDDKVMKQLKRRRYTGWGRLSRKLINGIRDKQSGKTILDFLKSDGFANRNFMQLIHDDSLTFKEDIQKAQVSGQGDSLHEHIANLAGSPAIKKGILQTVKVVDELVKVMGRHKPENIVIEMARENQTTQKGQKNSRERMKRIEEGIKELGSQILKEHPVENTQLQNEKLYLYYLQNGRDMYVDQELDINRLSDYDVDHIVPQSFLKDDSIDNKVLTRSDKARGKSDNVPSEEVVKKMKNYWRQLLNAKLITQRKFDNLTKAERGGLSELDKAGFIKRQLVETRQITKHVAQILDSRMNTKYDENDKLIREVKVITLKSKLVSDFRKDFQFYKVREINNYHHAHDAYLNAVVGTALIKKYPKLESEFVYGDYKVYDVRKMIAKSEQEIGKATAKYFFYSNIMNFFKTEITLANGEIRKRPLIETNGETGEIVWDKGRDFATVRKVLSMPQVNIVKKTEVQTGGFSKESILPKRNSDKLIARKKDWDPKKYGGFDSPTVAYSVLVVAKVEKGKSKKLKSVKELLGITIMERSSFEKNPIDFLEAKGYKEVKKDLIIKLPKYSLFELENGRKRMLASAGELQKGNELALPSKYVNFLYLASHYEKLKGSPEDNEQKQLFVEQHKHYLDEIIEQISEFSKRVILADANLDKVLSAYNKHRDKPIREQAENIIHLFTLTNLGAPAAFKYFDTTIDRKRYTSTKEVLDATLIHQSITGLYETRIDLSQLGGDGGPAPEAAAKGGGGGTVSLQDEHRLFDIPVTTSLPDVWLQDFPQAWAETGGLGRAKCQAPIIIDLKPTAVPVSIKQYPMSLEAHMGIRQHIIKFLELGVLRPCRSPWNTPLLPVKKPGTQDYRPVQDLREINKRTVDIHPTVPNPYNLLSTLKPDYSWYTVLDLKDAFFCLPLAPQSQELFAFEWKDPERGISGQLTWTRLPQGFKNSPTLFNEALHRDLTDFRTQHPEVTLLQYVDDLLLAAPTKKACTQGTRHLLQELGEKGYRASAKKAQICQTKVTYLGYILSEGKRWLTPGRIETVARIPPPRNPREVREFLGKAGFCRLFIPGFAELAAPLYALTKPSTPFTWQTEHQLAFEALKKALLSAPALGLPDTSKPFTLFLDERQGIAKGVLTQKLGPWKRPVAYLSKKLDPVAAGWPPCLRIMAATAMLVKDSAKLTLGQPLTVITPHTLEAIVRQPPDRWITNARLTHYQALLLDTDRVQFGPPVTLNPATLLPVPENQPSPHDCRQVLAETHGTREDLKDQELPDADHTWYTDGSSYLDSGTRRAGAAVVDGHNTIWAQSLPPGTSAQKAELIALTKALELSKGKKANIYTDSRYAFATAHTHGSIYERRGWLTSEGKEIKNKAEIIALLKALFLPQEVAIIHCPGHQKGQDPVAVGNRQADRVARQAAMAEVLTLATEPDNTSHITAGKRTADGSEFEKRTADGSEFESPKKKAKVE

SEQ ID NO: 1974 - protein, 2100 aa, synthetic construct
  source 1..2100: note = Description of Artificial Sequence: Synthetic polypeptide
MPAAKRVKLDGGDKKYSIGLDIGTNSVGWAVITDEYKVPSKKFKVLGNTDRHSIKKNLIGALLFDSGETAEATRLKRTARRRYTRRKNRICYLQEIFSNEMAKVDDSFFHRLEESFLVEEDKKHERHPIFGNIVDEVAYHEKYPTIYHLRKKLVDSTDKADLRLIYLALAHMIKFRGHFLIEGDLNPDNSDVDKLFIQLVQTYNQLFEENPINASGVDAKAILSARLSKSRRLENLIAQLPGEKKNGLFGNLIALSLGLTPNFKSNFDLAEDAKLQLSKDTYDDDLDNLLAQIGDQYADLFLAAKNLSDAILLSDILRVNTEITKAPLSASMIKRYDEHHQDLTLLKALVRQQLPEKYKEIFFDQSKNGYAGYIDGGASQEEFYKFIKPILEKMDGTEELLVKLNREDLLRKQRTFDNGSIPHQIHLGELHAILRRQEDFYPFLKDNREKIEKILTFRIPYYVGPLARGNSRFAWMTRKSEETITPWNFEEVVDKGASAQSFIERMTNFDKNLPNEKVLPKHSLLYEYFTVYNELTKVKYVTEGMRKPAFLSGEQKKAIVDLLFKTNRKVTVKQLKEDYFKKIECFDSVEISGVEDRFNASLGTYHDLLKIIKDKDFLDNEENEDILEDIVLTLTLFEDREMIEERLKTYAHLFDDKVMKQLKRRRYTGWGRLSRKLINGIRDKQSGKTILDFLKSDGFANRNFMQLIHDDSLTFKEDIQKAQVSGQGDSLHEHIANLAGSPAIKKGILQTVKVVDELVKVMGRHKPENIVIEMARENQTTQKGQKNSRERMKRIEEGIKELGSQILKEHPVENTQLQNEKLYLYYLQNGRDMYVDQELDINRLSDYDVDHIVPQSFLKDDSIDNKVLTRSDKARGKSDNVPSEEVVKKMKNYWRQLLNAKLITQRKFDNLTKAERGGLSELDKAGFIKRQLVETRQITKHVAQILDSRMNTKYDENDKLIREVKVITLKSKLVSDFRKDFQFYKVREINNYHHAHDAYLNAVVGTALIKKYPKLESEFVYGDYKVYDVRKMIAKSEQEIGKATAKYFFYSNIMNFFKTEITLANGEIRKRPLIETNGETGEIVWDKGRDFATVRKVLSMPQVNIVKKTEVQTGGFSKESILPKRNSDKLIARKKDWDPKKYGGFDSPTVAYSVLVVAKVEKGKSKKLKSVKELLGITIMERSSFEKNPIDFLEAKGYKEVKKDLIIKLPKYSLFELENGRKRMLASAGELQKGNELALPSKYVNFLYLASHYEKLKGSPEDNEQKQLFVEQHKHYLDEIIEQISEFSKRVILADANLDKVLSAYNKHRDKPIREQAENIIHLFTLTNLGAPAAFKYFDTTIDRKRYTSTKEVLDATLIHQSITGLYETRIDLSQLGGDGGGGSGSSGGGGGTVSLQDEHRLFDIPVTTSLPDVWLQDFPQAWAETGGLGRAKCQAPIIIDLKPTAVPVSIKQYPMSLEAHMGIRQHIIKFLELGVLRPCRSPWNTPLLPVKKPGTQDYRPVQDLREINKRTVDIHPTVPNPYNLLSTLKPDYSWYTVLDLKDAFFCLPLAPQSQELFAFEWKDPERGISGQLTWTRLPQGFKNSPTLFNEALHRDLTDFRTQHPEVTLLQYVDDLLLAAPTKKACTQGTRHLLQELGEKGYRASAKKAQICQTKVTYLGYILSEGKRWLTPGRIETVARIPPPRNPREVREFLGKAGFCRLFIPGFAELAAPLYALTKPSTPFTWQTEHQLAFEALKKALLSAPALGLPDTSKPFTLFLDERQGIAKGVLTQKLGPWKRPVAYLSKKLDPVAAGWPPCLRIMAATAMLVKDSAKLTLGQPLTVITPHTLEAIVRQPPDRWITNARLTHYQALLLDTDRVQFGPPVTLNPATLLPVPENQPSPHDCRQVLAETHGTREDLKDQELPDADHTWYTDGSSYLDSGTRRAGAAVVDGHNTIWAQSLPPGTSAQKAELIALTKALELSKGKKANIYTDSRYAFATAHTHGSIYERRGWLTSEGKEIKNKAEIIALLKALFLPQEVAIIHCPGHQKGQDPVAVGNRQADRVARQAAMAEVLTLATEPDNTSHITAGKRTADGSEFEKRTADGSEFESPKKKAKVE

SEQ ID NO: 1975 - protein, 2102 aa, synthetic construct
  source 1..2102: note = Description of Artificial Sequence: Synthetic polypeptide
MPAAKRVKLDGGDKKYSIGLDIGTNSVGWAVITDEYKVPSKKFKVLGNTDRHSIKKNLIGALLFDSGETAEATRLKRTARRRYTRRKNRICYLQEIFSNEMAKVDDSFFHRLEESFLVEEDKKHERHPIFGNIVDEVAYHEKYPTIYHLRKKLVDSTDKADLRLIYLALAHMIKFRGHFLIEGDLNPDNSDVDKLFIQLVQTYNQLFEENPINASGVDAKAILSARLSKSRRLENLIAQLPGEKKNGLFGNLIALSLGLTPNFKSNFDLAEDAKLQLSKDTYDDDLDNLLAQIGDQYADLFLAAKNLSDAILLSDILRVNTEITKAPLSASMIKRYDEHHQDLTLLKALVRQQLPEKYKEIFFDQSKNGYAGYIDGGASQEEFYKFIKPILEKMDGTEELLVKLNREDLLRKQRTFDNGSIPHQIHLGELHAILRRQEDFYPFLKDNREKIEKILTFRIPYYVGPLARGNSRFAWMTRKSEETITPWNFEEVVDKGASAQSFIERMTNFDKNLPNEKVLPKHSLLYEYFTVYNELTKVKYVTEGMRKPAFLSGEQKKAIVDLLFKTNRKVTVKQLKEDYFKKIECFDSVEISGVEDRFNASLGTYHDLLKIIKDKDFLDNEENEDILEDIVLTLTLFEDREMIEERLKTYAHLFDDKVMKQLKRRRYTGWGRLSRKLINGIRDKQSGKTILDFLKSDGFANRNFMQLIHDDSLTFKEDIQKAQVSGQGDSLHEHIANLAGSPAIKKGILQTVKVVDELVKVMGRHKPENIVIEMARENQTTQKGQKNSRERMKRIEEGIKELGSQILKEHPVENTQLQNEKLYLYYLQNGRDMYVDQELDINRLSDYDVDHIVPQSFLKDDSIDNKVLTRSDKARGKSDNVPSEEVVKKMKNYWRQLLNAKLITQRKFDNLTKAERGGLSELDKAGFIKRQLVETRQITKHVAQILDSRMNTKYDENDKLIREVKVITLKSKLVSDFRKDFQFYKVREINNYHHAHDAYLNAVVGTALIKKYPKLESEFVYGDYKVYDVRKMIAKSEQEIGKATAKYFFYSNIMNFFKTEITLANGEIRKRPLIETNGETGEIVWDKGRDFATVRKVLSMPQVNIVKKTEVQTGGFSKESILPKRNSDKLIARKKDWDPKKYGGFDSPTVAYSVLVVAKVEKGKSKKLKSVKELLGITIMERSSFEKNPIDFLEAKGYKEVKKDLIIKLPKYSLFELENGRKRMLASAGELQKGNELALPSKYVNFLYLASHYEKLKGSPEDNEQKQLFVEQHKHYLDEIIEQISEFSKRVILADANLDKVLSAYNKHRDKPIREQAENIIHLFTLTNLGAPAAFKYFDTTIDRKRYTSTKEVLDATLIHQSITGLYETRIDLSQLGGDGGGGGGSSEAAAKGGTVSLQDEHRLFDIPVTTSLPDVWLQDFPQAWAETGGLGRAKCQAPIIIDLKPTAVPVSIKQYPMSLEAHMGIRQHIIKFLELGVLRPCRSPWNTPLLPVKKPGTQDYRPVQDLREINKRTVDIHPTVPNPYNLLSTLKPDYSWYTVLDLKDAFFCLPLAPQSQELFAFEWKDPERGISGQLTWTRLPQGFKNSPTLFNEALHRDLTDFRTQHPEVTLLQYVDDLLLAAPTKKACTQGTRHLLQELGEKGYRASAKKAQICQTKVTYLGYILSEGKRWLTPGRIETVARIPPPRNPREVREFLGKAGFCRLFIPGFAELAAPLYALTKPSTPFTWQTEHQLAFEALKKALLSAPALGLPDTSKPFTLFLDERQGIAKGVLTQKLGPWKRPVAYLSKKLDPVAAGWPPCLRIMAATAMLVKDSAKLTLGQPLTVITPHTLEAIVRQPPDRWITNARLTHYQALLLDTDRVQFGPPVTLNPATLLPVPENQPSPHDCRQVLAETHGTREDLKDQELPDADHTWYTDGSSYLDSGTRRAGAAVVDGHNTIWAQSLPPGTSAQKAELIALTKALELSKGKKANIYTDSRYAFATAHTHGSIYERRGWLTSEGKEIKNKAEIIALLKALFLPQEVAIIHCPGHQKGQDPVAVGNRQADRVARQAAMAEVLTLATEPDNTSHITAGKRTADGSEFEKRTADGSEFESPKKKAKVE

SEQ ID NO: 1976 - protein, 2100 aa, synthetic construct
  source 1..2100: note = Description of Artificial Sequence: Synthetic polypeptide
MPAAKRVKLDGGDKKYSIGLDIGTNSVGWAVITDEYKVPSKKFKVLGNTDRHSIKKNLIGALLFDSGETAEATRLKRTARRRYTRRKNRICYLQEIFSNEMAKVDDSFFHRLEESFLVEEDKKHERHPIFGNIVDEVAYHEKYPTIYHLRKKLVDSTDKADLRLIYLALAHMIKFRGHFLIEGDLNPDNSDVDKLFIQLVQTYNQLFEENPINASGVDAKAILSARLSKSRRLENLIAQLPGEKKNGLFGNLIALSLGLTPNFKSNFDLAEDAKLQLSKDTYDDDLDNLLAQIGDQYADLFLAAKNLSDAILLSDILRVNTEITKAPLSASMIKRYDEHHQDLTLLKALVRQQLPEKYKEIFFDQSKNGYAGYIDGGASQEEFYKFIKPILEKMDGTEELLVKLNREDLLRKQRTFDNGSIPHQIHLGELHAILRRQEDFYPFLKDNREKIEKILTFRIPYYVGPLARGNSRFAWMTRKSEETITPWNFEEVVDKGASAQSFIERMTNFDKNLPNEKVLPKHSLLYEYFTVYNELTKVKYVTEGMRKPAFLSGEQKKAIVDLLFKTNRKVTVKQLKEDYFKKIECFDSVEISGVEDRFNASLGTYHDLLKIIKDKDFLDNEENEDILEDIVLTLTLFEDREMIEERLKTYAHLFDDKVMKQLKRRRYTGWGRLSRKLINGIRDKQSGKTILDFLKSDGFANRNFMQLIHDDSLTFKEDIQKAQVSGQGDSLHEHIANLAGSPAIKKGILQTVKVVDELVKVMGRHKPENIVIEMARENQTTQKGQKNSRERMKRIEEGIKELGSQILKEHPVENTQLQNEKLYLYYLQNGRDMYVDQELDINRLSDYDVDHIVPQSFLKDDSIDNKVLTRSDKARGKSDNVPSEEVVKKMKNYWRQLLNAKLITQRKFDNLTKAERGGLSELDKAGFIKRQLVETRQITKHVAQILDSRMNTKYDENDKLIREVKVITLKSKLVSDFRKDFQFYKVREINNYHHAHDAYLNAVVGTALIKKYPKLESEFVYGDYKVYDVRKMIAKSEQEIGKATAKYFFYSNIMNFFKTEITLANGEIRKRPLIETNGETGEIVWDKGRDFATVRKVLSMPQVNIVKKTEVQTGGFSKESILPKRNSDKLIARKKDWDPKKYGGFDSPTVAYSVLVVAKVEKGKSKKLKSVKELLGITIMERSSFEKNPIDFLEAKGYKEVKKDLIIKLPKYSLFELENGRKRMLASAGELQKGNELALPSKYVNFLYLASHYEKLKGSPEDNEQKQLFVEQHKHYLDEIIEQISEFSKRVILADANLDKVLSAYNKHRDKPIREQAENIIHLFTLTNLGAPAAFKYFDTTIDRKRYTSTKEVLDATLIHQSITGLYETRIDLSQLGGDGGGGSPAPGGGGGTVSLQDEHRLFDIPVTTSLPDVWLQDFPQAWAETGGLGRAKCQAPIIIDLKPTAVPVSIKQYPMSLEAHMGIRQHIIKFLELGVLRPCRSPWNTPLLPVKKPGTQDYRPVQDLREINKRTVDIHPTVPNPYNLLSTLKPDYSWYTVLDLKDAFFCLPLAPQSQELFAFEWKDPERGISGQLTWTRLPQGFKNSPTLFNEALHRDLTDFRTQHPEVTLLQYVDDLLLAAPTKKACTQGTRHLLQELGEKGYRASAKKAQICQTKVTYLGYILSEGKRWLTPGRIETVARIPPPRNPREVREFLGKAGFCRLFIPGFAELAAPLYALTKPSTPFTWQTEHQLAFEALKKALLSAPALGLPDTSKPFTLFLDERQGIAKGVLTQKLGPWKRPVAYLSKKLDPVAAGWPPCLRIMAATAMLVKDSAKLTLGQPLTVITPHTLEAIVRQPPDRWITNARLTHYQALLLDTDRVQFGPPVTLNPATLLPVPENQPSPHDCRQVLAETHGTREDLKDQELPDADHTWYTDGSSYLDSGTRRAGAAVVDGHNTIWAQSLPPGTSAQKAELIALTKALELSKGKKANIYTDSRYAFATAHTHGSIYERRGWLTSEGKEIKNKAEIIALLKALFLPQEVAIIHCPGHQKGQDPVAVGNRQADRVARQAAMAEVLTLATEPDNTSHITAGKRTADGSEFEKRTADGSEFESPKKKAKVE

SEQ ID NO: 1977 - protein, 2102 aa, synthetic construct
  source 1..2102: note = Description of Artificial Sequence: Synthetic polypeptide
MPAAKRVKLDGGDKKYSIGLDIGTNSVGWAVITDEYKVPSKKFKVLGNTDRHSIKKNLIGALLFDSGETAEATRLKRTARRRYTRRKNRICYLQEIFSNEMAKVDDSFFHRLEESFLVEEDKKHERHPIFGNIVDEVAYHEKYPTIYHLRKKLVDSTDKADLRLIYLALAHMIKFRGHFLIEGDLNPDNSDVDKLFIQLVQTYNQLFEENPINASGVDAKAILSARLSKSRRLENLIAQLPGEKKNGLFGNLIALSLGLTPNFKSNFDLAEDAKLQLSKDTYDDDLDNLLAQIGDQYADLFLAAKNLSDAILLSDILRVNTEITKAPLSASMIKRYDEHHQDLTLLKALVRQQLPEKYKEIFFDQSKNGYAGYIDGGASQEEFYKFIKPILEKMDGTEELLVKLNREDLLRKQRTFDNGSIPHQIHLGELHAILRRQEDFYPFLKDNREKIEKILTFRIPYYVGPLARGNSRFAWMTRKSEETITPWNFEEVVDKGASAQSFIERMTNFDKNLPNEKVLPKHSLLYEYFTVYNELTKVKYVTEGMRKPAFLSGEQKKAIVDLLFKTNRKVTVKQLKEDYFKKIECFDSVEISGVEDRFNASLGTYHDLLKIIKDKDFLDNEENEDILEDIVLTLTLFEDREMIEERLKTYAHLFDDKVMKQLKRRRYTGWGRLSRKLINGIRDKQSGKTILDFLKSDGFANRNFMQLIHDDSLTFKEDIQKAQVSGQGDSLHEHIANLAGSPAIKKGILQTVKVVDELVKVMGRHKPENIVIEMARENQTTQKGQKNSRERMKRIEEGIKELGSQILKEHPVENTQLQNEKLYLYYLQNGRDMYVDQELDINRLSDYDVDHIVPQSFLKDDSIDNKVLTRSDKARGKSDNVPSEEVVKKMKNYWRQLLNAKLITQRKFDNLTKAERGGLSELDKAGFIKRQLVETRQITKHVAQILDSRMNTKYDENDKLIREVKVITLKSKLVSDFRKDFQFYKVREINNYHHAHDAYLNAVVGTALIKKYPKLESEFVYGDYKVYDVRKMIAKSEQEIGKATAKYFFYSNIMNFFKTEITLANGEIRKRPLIETNGETGEIVWDKGRDFATVRKVLSMPQVNIVKKTEVQTGGFSKESILPKRNSDKLIARKKDWDPKKYGGFDSPTVAYSVLVVAKVEKGKSKKLKSVKELLGITIMERSSFEKNPIDFLEAKGYKEVKKDLIIKLPKYSLFELENGRKRMLASAGELQKGNELALPSKYVNFLYLASHYEKLKGSPEDNEQKQLFVEQHKHYLDEIIEQISEFSKRVILADANLDKVLSAYNKHRDKPIREQAENIIHLFTLTNLGAPAAFKYFDTTIDRKRYTSTKEVLDATLIHQSITGLYETRIDLSQLGGDGGPAPGGGEAAAKGGTVSLQDEHRLFDIPVTTSLPDVWLQDFPQAWAETGGLGRAKCQAPIIIDLKPTAVPVSIKQYPMSLEAHMGIRQHIIKFLELGVLRPCRSPWNTPLLPVKKPGTQDYRPVQDLREINKRTVDIHPTVPNPYNLLSTLKPDYSWYTVLDLKDAFFCLPLAPQSQELFAFEWKDPERGISGQLTWTRLPQGFKNSPTLFNEALHRDLTDFRTQHPEVTLLQYVDDLLLAAPTKKACTQGTRHLLQELGEKGYRASAKKAQICQTKVTYLGYILSEGKRWLTPGRIETVARIPPPRNPREVREFLGKAGFCRLFIPGFAELAAPLYALTKPSTPFTWQTEHQLAFEALKKALLSAPALGLPDTSKPFTLFLDERQGIAKGVLTQKLGPWKRPVAYLSKKLDPVAAGWPPCLRIMAATAMLVKDSAKLTLGQPLTVITPHTLEAIVRQPPDRWITNARLTHYQALLLDTDRVQFGPPVTLNPATLLPVPENQPSPHDCRQVLAETHGTREDLKDQELPDADHTWYTDGSSYLDSGTRRAGAAVVDGHNTIWAQSLPPGTSAQKAELIALTKALELSKGKKANIYTDSRYAFATAHTHGSIYERRGWLTSEGKEIKNKAEIIALLKALFLPQEVAIIHCPGHQKGQDPVAVGNRQADRVARQAAMAEVLTLATEPDNTSHITAGKRTADGSEFEKRTADGSEFESPKKKAKVE

SEQ ID NO: 1978 - protein, 2100 aa, synthetic construct
  source 1..2100: note = Description of Artificial Sequence: Synthetic polypeptide
MPAAKRVKLDGGDKKYSIGLDIGTNSVGWAVITDEYKVPSKKFKVLGNTDRHSIKKNLIGALLFDSGETAEATRLKRTARRRYTRRKNRICYLQEIFSNEMAKVDDSFFHRLEESFLVEEDKKHERHPIFGNIVDEVAYHEKYPTIYHLRKKLVDSTDKADLRLIYLALAHMIKFRGHFLIEGDLNPDNSDVDKLFIQLVQTYNQLFEENPINASGVDAKAILSARLSKSRRLENLIAQLPGEKKNGLFGNLIALSLGLTPNFKSNFDLAEDAKLQLSKDTYDDDLDNLLAQIGDQYADLFLAAKNLSDAILLSDILRVNTEITKAPLSASMIKRYDEHHQDLTLLKALVRQQLPEKYKEIFFDQSKNGYAGYIDGGASQEEFYKFIKPILEKMDGTEELLVKLNREDLLRKQRTFDNGSIPHQIHLGELHAILRRQEDFYPFLKDNREKIEKILTFRIPYYVGPLARGNSRFAWMTRKSEETITPWNFEEVVDKGASAQSFIERMTNFDKNLPNEKVLPKHSLLYEYFTVYNELTKVKYVTEGMRKPAFLSGEQKKAIVDLLFKTNRKVTVKQLKEDYFKKIECFDSVEISGVEDRFNASLGTYHDLLKIIKDKDFLDNEENEDILEDIVLTLTLFEDREMIEERLKTYAHLFDDKVMKQLKRRRYTGWGRLSRKLINGIRDKQSGKTILDFLKSDGFANRNFMQLIHDDSLTFKEDIQKAQVSGQGDSLHEHIANLAGSPAIKKGILQTVKVVDELVKVMGRHKPENIVIEMARENQTTQKGQKNSRERMKRIEEGIKELGSQILKEHPVENTQLQNEKLYLYYLQNGRDMYVDQELDINRLSDYDVDHIVPQSFLKDDSIDNKVLTRSDKARGKSDNVPSEEVVKKMKNYWRQLLNAKLITQRKFDNLTKAERGGLSELDKAGFIKRQLVETRQITKHVAQILDSRMNTKYDENDKLIREVKVITLKSKLVSDFRKDFQFYKVREINNYHHAHDAYLNAVVGTALIKKYPKLESEFVYGDYKVYDVRKMIAKSEQEIGKATAKYFFYSNIMNFFKTEITLANGEIRKRPLIETNGETGEIVWDKGRDFATVRKVLSMPQVNIVKKTEVQTGGFSKESILPKRNSDKLIARKKDWDPKKYGGFDSPTVAYSVLVVAKVEKGKSKKLKSVKELLGITIMERSSFEKNPIDFLEAKGYKEVKKDLIIKLPKYSLFELENGRKRMLASAGELQKGNELALPSKYVNFLYLASHYEKLKGSPEDNEQKQLFVEQHKHYLDEIIEQISEFSKRVILADANLDKVLSAYNKHRDKPIREQAENIIHLFTLTNLGAPAAFKYFDTTIDRKRYTSTKEVLDATLIHQSITGLYETRIDLSQLGGDGGPAPAPAPAPGGTVSLQDEHRLFDIPVTTSLPDVWLQDFPQAWAETGGLGRAKCQAPIIIDLKPTAVPVSIKQYPMSLEAHMGIRQHIIKFLELGVLRPCRSPWNTPLLPVKKPGTQDYRPVQDLREINKRTVDIHPTVPNPYNLLSTLKPDYSWYTVLDLKDAFFCLPLAPQSQELFAFEWKDPERGISGQLTWTRLPQGFKNSPTLFNEALHRDLTDFRTQHPEVTLLQYVDDLLLAAPTKKACTQGTRHLLQELGEKGYRASAKKAQICQTKVTYLGYILSEGKRWLTPGRIETVARIPPPRNPREVREFLGKAGFCRLFIPGFAELAAPLYALTKPSTPFTWQTEHQLAFEALKKALLSAPALGLPDTSKPFTLFLDERQGIAKGVLTQKLGPWKRPVAYLSKKLDPVAAGWPPCLRIMAATAMLVKDSAKLTLGQPLTVITPHTLEAIVRQPPDRWITNARLTHYQALLLDTDRVQFGPPVTLNPATLLPVPENQPSPHDCRQVLAETHGTREDLKDQELPDADHTWYTDGSSYLDSGTRRAGAAVVDGHNTIWAQSLPPGTSAQKAELIALTKALELSKGKKANIYTDSRYAFATAHTHGSIYERRGWLTSEGKEIKNKAEIIALLKALFLPQEVAIIHCPGHQKGQDPVAVGNRQADRVARQAAMAEVLTLATEPDNTSHITAGKRTADGSEFEKRTADGSEFESPKKKAKVE

SEQ ID NO: 1979 - protein, 2099 aa, synthetic construct
  source 1..2099: note = Description of Artificial Sequence: Synthetic polypeptide
MPAAKRVKLDGGDKKYSIGLDIGTNSVGWAVITDEYKVPSKKFKVLGNTDRHSIKKNLIGALLFDSGETAEATRLKRTARRRYTRRKNRICYLQEIFSNEMAKVDDSFFHRLEESFLVEEDKKHERHPIFGNIVDEVAYHEKYPTIYHLRKKLVDSTDKADLRLIYLALAHMIKFRGHFLIEGDLNPDNSDVDKLFIQLVQTYNQLFEENPINASGVDAKAILSARLSKSRRLENLIAQLPGEKKNGLFGNLIALSLGLTPNFKSNFDLAEDAKLQLSKDTYDDDLDNLLAQIGDQYADLFLAAKNLSDAILLSDILRVNTEITKAPLSASMIKRYDEHHQDLTLLKALVRQQLPEKYKEIFFDQSKNGYAGYIDGGASQEEFYKFIKPILEKMDGTEELLVKLNREDLLRKQRTFDNGSIPHQIHLGELHAILRRQEDFYPFLKDNREKIEKILTFRIPYYVGPLARGNSRFAWMTRKSEETITPWNFEEVVDKGASAQSFIERMTNFDKNLPNEKVLPKHSLLYEYFTVYNELTKVKYVTEGMRKPAFLSGEQKKAIVDLLFKTNRKVTVKQLKEDYFKKIECFDSVEISGVEDRFNASLGTYHDLLKIIKDKDFLDNEENEDILEDIVLTLTLFEDREMIEERLKTYAHLFDDKVMKQLKRRRYTGWGRLSRKLINGIRDKQSGKTILDFLKSDGFANRNFMQLIHDDSLTFKEDIQKAQVSGQGDSLHEHIANLAGSPAIKKGILQTVKVVDELVKVMGRHKPENIVIEMARENQTTQKGQKNSRERMKRIEEGIKELGSQILKEHPVENTQLQNEKLYLYYLQNGRDMYVDQELDINRLSDYDVDHIVPQSFLKDDSIDNKVLTRSDKARGKSDNVPSEEVVKKMKNYWRQLLNAKLITQRKFDNLTKAERGGLSELDKAGFIKRQLVETRQITKHVAQILDSRMNTKYDENDKLIREVKVITLKSKLVSDFRKDFQFYKVREINNYHHAHDAYLNAVVGTALIKKYPKLESEFVYGDYKVYDVRKMIAKSEQEIGKATAKYFFYSNIMNFFKTEITLANGEIRKRPLIETNGETGEIVWDKGRDFATVRKVLSMPQVNIVKKTEVQTGGFSKESILPKRNSDKLIARKKDWDPKKYGGFDSPTVAYSVLVVAKVEKGKSKKLKSVKELLGITIMERSSFEKNPIDFLEAKGYKEVKKDLIIKLPKYSLFELENGRKRMLASAGELQKGNELALPSKYVNFLYLASHYEKLKGSPEDNEQKQLFVEQHKHYLDEIIEQISEFSKRVILADANLDKVLSAYNKHRDKPIREQAENIIHLFTLTNLGAPAAFKYFDTTIDRKRYTSTKEVLDATLIHQSITGLYETRIDLSQLGGDGGGGGGGGGGGGTVSLQDEHRLFDIPVTTSLPDVWLQDFPQAWAETGGLGRAKCQAPIIIDLKPTAVPVSIKQYPMSLEAHMGIRQHIIKFLELGVLRPCRSPWNTPLLPVKKPGTQDYRPVQDLREINKRTVDIHPTVPNPYNLLSTLKPDYSWYTVLDLKDAFFCLPLAPQSQELFAFEWKDPERGISGQLTWTRLPQGFKNSPTLFNEALHRDLTDFRTQHPEVTLLQYVDDLLLAAPTKKACTQGTRHLLQELGEKGYRASAKKAQICQTKVTYLGYILSEGKRWLTPGRIETVARIPPPRNPREVREFLGKAGFCRLFIPGFAELAAPLYALTKPSTPFTWQTEHQLAFEALKKALLSAPALGLPDTSKPFTLFLDERQGIAKGVLTQKLGPWKRPVAYLSKKLDPVAAGWPPCLRIMAATAMLVKDSAKLTLGQPLTVITPHTLEAIVRQPPDRWITNARLTHYQALLLDTDRVQFGPPVTLNPATLLPVPENQPSPHDCRQVLAETHGTREDLKDQELPDADHTWYTDGSSYLDSGTRRAGAAVVDGHNTIWAQSLPPGTSAQKAELIALTKALELSKGKKANIYTDSRYAFATAHTHGSIYERRGWLTSEGKEIKNKAEIIALLKALFLPQEVAIIHCPGHQKGQDPVAVGNRQADRVARQAAMAEVLTLATEPDNTSHITAGKRTADGSEFEKRTADGSEFESPKKKAKVE

SEQ ID NO: 1980 - protein, 2107 aa, synthetic construct
  source 1..2107: note = Description of Artificial Sequence: Synthetic polypeptide
MPAAKRVKLDGGDKKYSIGLDIGTNSVGWAVITDEYKVPSKKFKVLGNTDRHSIKKNLIGALLFDSGETAEATRLKRTARRRYTRRKNRICYLQEIFSNEMAKVDDSFFHRLEESFLVEEDKKHERHPIFGNIVDEVAYHEKYPTIYHLRKKLVDSTDKADLRLIYLALAHMIKFRGHFLIEGDLNPDNSDVDKLFIQLVQTYNQLFEENPINASGVDAKAILSARLSKSRRLENLIAQLPGEKKNGLFGNLIALSLGLTPNFKSNFDLAEDAKLQLSKDTYDDDLDNLLAQIGDQYADLFLAAKNLSDAILLSDILRVNTEITKAPLSASMIKRYDEHHQDLTLLKALVRQQLPEKYKEIFFDQSKNGYAGYIDGGASQEEFYKFIKPILEKMDGTEELLVKLNREDLLRKQRTFDNGSIPHQIHLGELHAILRRQEDFYPFLKDNREKIEKILTFRIPYYVGPLARGNSRFAWMTRKSEETITPWNFEEVVDKGASAQSFIERMTNFDKNLPNEKVLPKHSLLYEYFTVYNELTKVKYVTEGMRKPAFLSGEQKKAIVDLLFKTNRKVTVKQLKEDYFKKIECFDSVEISGVEDRFNASLGTYHDLLKIIKDKDFLDNEENEDILEDIVLTLTLFEDREMIEERLKTYAHLFDDKVMKQLKRRRYTGWGRLSRKLINGIRDKQSGKTILDFLKSDGFANRNFMQLIHDDSLTFKEDIQKAQVSGQGDSLHEHIANLAGSPAIKKGILQTVKVVDELVKVMGRHKPENIVIEMARENQTTQKGQKNSRERMKRIEEGIKELGSQILKEHPVENTQLQNEKLYLYYLQNGRDMYVDQELDINRLSDYDVDHIVPQSFLKDDSIDNKVLTRSDKARGKSDNVPSEEVVKKMKNYWRQLLNAKLITQRKFDNLTKAERGGLSELDKAGFIKRQLVETRQITKHVAQILDSRMNTKYDENDKLIREVKVITLKSKLVSDFRKDFQFYKVREINNYHHAHDAYLNAVVGTALIKKYPKLESEFVYGDYKVYDVRKMIAKSEQEIGKATAKYFFYSNIMNFFKTEITLANGEIRKRPLIETNGETGEIVWDKGRDFATVRKVLSMPQVNIVKKTEVQTGGFSKESILPKRNSDKLIARKKDWDPKKYGGFDSPTVAYSVLVVAKVEKGKSKKLKSVKELLGITIMERSSFEKNPIDFLEAKGYKEVKKDLIIKLPKYSLFELENGRKRMLASAGELQKGNELALPSKYVNFLYLASHYEKLKGSPEDNEQKQLFVEQHKHYLDEIIEQISEFSKRVILADANLDKVLSAYNKHRDKPIREQAENIIHLFTLTNLGAPAAFKYFDTTIDRKRYTSTKEVLDATLIHQSITGLYETRIDLSQLGGDGGSGSETPGTSESATPESGGTVSLQDEHRLFDIPVTTSLPDVWLQDFPQAWAETGGLGRAKCQAPIIIDLKPTAVPVSIKQYPMSLEAHMGIRQHIIKFLELGVLRPCRSPWNTPLLPVKKPGTQDYRPVQDLREINKRTVDIHPTVPNPYNLLSTLKPDYSWYTVLDLKDAFFCLPLAPQSQELFAFEWKDPERGISGQLTWTRLPQGFKNSPTLFNEALHRDLTDFRTQHPEVTLLQYVDDLLLAAPTKKACTQGTRHLLQELGEKGYRASAKKAQICQTKVTYLGYILSEGKRWLTPGRIETVARIPPPRNPREVREFLGKAGFCRLFIPGFAELAAPLYALTKPSTPFTWQTEHQLAFEALKKALLSAPALGLPDTSKPFTLFLDERQGIAKGVLTQKLGPWKRPVAYLSKKLDPVAAGWPPCLRIMAATAMLVKDSAKLTLGQPLTVITPHTLEAIVRQPPDRWITNARLTHYQALLLDTDRVQFGPPVTLNPATLLPVPENQPSPHDCRQVLAETHGTREDLKDQELPDADHTWYTDGSSYLDSGTRRAGAAVVDGHNTIWAQSLPPGTSAQKAELIALTKALELSKGKKANIYTDSRYAFATAHTHGSIYERRGWLTSEGKEIKNKAEIIALLKALFLPQEVAIIHCPGHQKGQDPVAVGNRQADRVARQAAMAEVLTLATEPDNTSHITAGKRTADGSEFEKRTADGSEFESPKKKAKVE

SEQ ID NO: 1981 - protein, 2102 aa, synthetic construct
  source 1..2102: note = Description of Artificial Sequence: Synthetic polypeptide
MPAAKRVKLDGGDKKYSIGLDIGTNSVGWAVITDEYKVPSKKFKVLGNTDRHSIKKNLIGALLFDSGETAEATRLKRTARRRYTRRKNRICYLQEIFSNEMAKVDDSFFHRLEESFLVEEDKKHERHPIFGNIVDEVAYHEKYPTIYHLRKKLVDSTDKADLRLIYLALAHMIKFRGHFLIEGDLNPDNSDVDKLFIQLVQTYNQLFEENPINASGVDAKAILSARLSKSRRLENLIAQLPGEKKNGLFGNLIALSLGLTPNFKSNFDLAEDAKLQLSKDTYDDDLDNLLAQIGDQYADLFLAAKNLSDAILLSDILRVNTEITKAPLSASMIKRYDEHHQDLTLLKALVRQQLPEKYKEIFFDQSKNGYAGYIDGGASQEEFYKFIKPILEKMDGTEELLVKLNREDLLRKQRTFDNGSIPHQIHLGELHAILRRQEDFYPFLKDNREKIEKILTFRIPYYVGPLARGNSRFAWMTRKSEETITPWNFEEVVDKGASAQSFIERMTNFDKNLPNEKVLPKHSLLYEYFTVYNELTKVKYVTEGMRKPAFLSGEQKKAIVDLLFKTNRKVTVKQLKEDYFKKIECFDSVEISGVEDRFNASLGTYHDLLKIIKDKDFLDNEENEDILEDIVLTLTLFEDREMIEERLKTYAHLFDDKVMKQLKRRRYTGWGRLSRKLINGIRDKQSGKTILDFLKSDGFANRNFMQLIHDDSLTFKEDIQKAQVSGQGDSLHEHIANLAGSPAIKKGILQTVKVVDELVKVMGRHKPENIVIEMARENQTTQKGQKNSRERMKRIEEGIKELGSQILKEHPVENTQLQNEKLYLYYLQNGRDMYVDQELDINRLSDYDVDHIVPQSFLKDDSIDNKVLTRSDKARGKSDNVPSEEVVKKMKNYWRQLLNAKLITQRKFDNLTKAERGGLSELDKAGFIKRQLVETRQITKHVAQILDSRMNTKYDENDKLIREVKVITLKSKLVSDFRKDFQFYKVREINNYHHAHDAYLNAVVGTALIKKYPKLESEFVYGDYKVYDVRKMIAKSEQEIGKATAKYFFYSNIMNFFKTEITLANGEIRKRPLIETNGETGEIVWDKGRDFATVRKVLSMPQVNIVKKTEVQTGGFSKESILPKRNSDKLIARKKDWDPKKYGGFDSPTVAYSVLVVAKVEKGKSKKLKSVKELLGITIMERSSFEKNPIDFLEAKGYKEVKKDLIIKLPKYSLFELENGRKRMLASAGELQKGNELALPSKYVNFLYLASHYEKLKGSPEDNEQKQLFVEQHKHYLDEIIEQISEFSKRVILADANLDKVLSAYNKHRDKPIREQAENIIHLFTLTNLGAPAAFKYFDTTIDRKRYTSTKEVLDATLIHQSITGLYETRIDLSQLGGDGGGSSPAPEAAAKGGTVSLQDEHRLFDIPVTTSLPDVWLQDFPQAWAETGGLGRAKCQAPIIIDLKPTAVPVSIKQYPMSLEAHMGIRQHIIKFLELGVLRPCRSPWNTPLLPVKKPGTQDYRPVQDLREINKRTVDIHPTVPNPYNLLSTLKPDYSWYTVLDLKDAFFCLPLAPQSQELFAFEWKDPERGISGQLTWTRLPQGFKNSPTLFNEALHRDLTDFRTQHPEVTLLQYVDDLLLAAPTKKACTQGTRHLLQELGEKGYRASAKKAQICQTKVTYLGYILSEGKRWLTPGRIETVARIPPPRNPREVREFLGKAGFCRLFIPGFAELAAPLYALTKPSTPFTWQTEHQLAFEALKKALLSAPALGLPDTSKPFTLFLDERQGIAKGVLTQKLGPWKRPVAYLSKKLDPVAAGWPPCLRIMAATAMLVKDSAKLTLGQPLTVITPHTLEAIVRQPPDRWITNARLTHYQALLLDTDRVQFGPPVTLNPATLLPVPENQPSPHDCRQVLAETHGTREDLKDQELPDADHTWYTDGSSYLDSGTRRAGAAVVDGHNTIWAQSLPPGTSAQKAELIALTKALELSKGKKANIYTDSRYAFATAHTHGSIYERRGWLTSEGKEIKNKAEIIALLKALFLPQEVAIIHCPGHQKGQDPVAVGNRQADRVARQAAMAEVLTLATEPDNTSHITAGKRTADGSEFEKRTADGSEFESPKKKAKVE

SEQ ID NO: 1982 - protein, 2100 aa, synthetic construct
  source 1..2100: note = Description of Artificial Sequence: Synthetic polypeptide
MPAAKRVKLDGGDKKYSIGLDIGTNSVGWAVITDEYKVPSKKFKVLGNTDRHSIKKNLIGALLFDSGETAEATRLKRTARRRYTRRKNRICYLQEIFSNEMAKVDDSFFHRLEESFLVEEDKKHERHPIFGNIVDEVAYHEKYPTIYHLRKKLVDSTDKADLRLIYLALAHMIKFRGHFLIEGDLNPDNSDVDKLFIQLVQTYNQLFEENPINASGVDAKAILSARLSKSRRLENLIAQLPGEKKNGLFGNLIALSLGLTPNFKSNFDLAEDAKLQLSKDTYDDDLDNLLAQIGDQYADLFLAAKNLSDAILLSDILRVNTEITKAPLSASMIKRYDEHHQDLTLLKALVRQQLPEKYKEIFFDQSKNGYAGYIDGGASQEEFYKFIKPILEKMDGTEELLVKLNREDLLRKQRTFDNGSIPHQIHLGELHAILRRQEDFYPFLKDNREKIEKILTFRIPYYVGPLARGNSRFAWMTRKSEETITPWNFEEVVDKGASAQSFIERMTNFDKNLPNEKVLPKHSLLYEYFTVYNELTKVKYVTEGMRKPAFLSGEQKKAIVDLLFKTNRKVTVKQLKEDYFKKIECFDSVEISGVEDRFNASLGTYHDLLKIIKDKDFLDNEENEDILEDIVLTLTLFEDREMIEERLKTYAHLFDDKVMKQLKRRRYTGWGRLSRKLINGIRDKQSGKTILDFLKSDGFANRNFMQLIHDDSLTFKEDIQKAQVSGQGDSLHEHIANLAGSPAIKKGILQTVKVVDELVKVMGRHKPENIVIEMARENQTTQKGQKNSRERMKRIEEGIKELGSQILKEHPVENTQLQNEKLYLYYLQNGRDMYVDQELDINRLSDYDVDHIVPQSFLKDDSIDNKVLTRSDKARGKSDNVPSEEVVKKMKNYWRQLLNAKLITQRKFDNLTKAERGGLSELDKAGFIKRQLVETRQITKHVAQILDSRMNTKYDENDKLIREVKVITLKSKLVSDFRKDFQFYKVREINNYHHAHDAYLNAVVGTALIKKYPKLESEFVYGDYKVYDVRKMIAKSEQEIGKATAKYFFYSNIMNFFKTEITLANGEIRKRPLIETNGETGEIVWDKGRDFATVRKVLSMPQVNIVKKTEVQTGGFSKESILPKRNSDKLIARKKDWDPKKYGGFDSPTVAYSVLVVAKVEKGKSKKLKSVKELLGITIMERSSFEKNPIDFLEAKGYKEVKKDLIIKLPKYSLFELENGRKRMLASAGELQKGNELALPSKYVNFLYLASHYEKLKGSPEDNEQKQLFVEQHKHYLDEIIEQISEFSKRVILADANLDKVLSAYNKHRDKPIREQAENIIHLFTLTNLGAPAAFKYFDTTIDRKRYTSTKEVLDATLIHQSITGLYETRIDLSQLGGDGGGSSGGGGGSGGTVSLQDEHRLFDIPVTTSLPDVWLQDFPQAWAETGGLGRAKCQAPIIIDLKPTAVPVSIKQYPMSLEAHMGIRQHIIKFLELGVLRPCRSPWNTPLLPVKKPGTQDYRPVQDLREINKRTVDIHPTVPNPYNLLSTLKPDYSWYTVLDLKDAFFCLPLAPQSQELFAFEWKDPERGISGQLTWTRLPQGFKNSPTLFNEALHRDLTDFRTQHPEVTLLQYVDDLLLAAPTKKACTQGTRHLLQELGEKGYRASAKKAQICQTKVTYLGYILSEGKRWLTPGRIETVARIPPPRNPREVREFLGKAGFCRLFIPGFAELAAPLYALTKPSTPFTWQTEHQLAFEALKKALLSAPALGLPDTSKPFTLFLDERQGIAKGVLTQKLGPWKRPVAYLSKKLDPVAAGWPPCLRIMAATAMLVKDSAKLTLGQPLTVITPHTLEAIVRQPPDRWITNARLTHYQALLLDTDRVQFGPPVTLNPATLLPVPENQPSPHDCRQVLAETHGTREDLKDQELPDADHTWYTDGSSYLDSGTRRAGAAVVDGHNTIWAQSLPPGTSAQKAELIALTKALELSKGKKANIYTDSRYAFATAHTHGSIYERRGWLTSEGKEIKNKAEIIALLKALFLPQEVAIIHCPGHQKGQDPVAVGNRQADRVARQAAMAEVLTLATEPDNTSHITAGKRTADGSEFEKRTADGSEFESPKKKAKVE

SEQ ID NO: 1983 - protein, 2097 aa, synthetic construct
  source 1..2097: note = Description of Artificial Sequence: Synthetic polypeptide
MPAAKRVKLDGGDKKYSIGLDIGTNSVGWAVITDEYKVPSKKFKVLGNTDRHSIKKNLIGALLFDSGETAEATRLKRTARRRYTRRKNRICYLQEIFSNEMAKVDDSFFHRLEESFLVEEDKKHERHPIFGNIVDEVAYHEKYPTIYHLRKKLVDSTDKADLRLIYLALAHMIKFRGHFLIEGDLNPDNSDVDKLFIQLVQTYNQLFEENPINASGVDAKAILSARLSKSRRLENLIAQLPGEKKNGLFGNLIALSLGLTPNFKSNFDLAEDAKLQLSKDTYDDDLDNLLAQIGDQYADLFLAAKNLSDAILLSDILRVNTEITKAPLSASMIKRYDEHHQDLTLLKALVRQQLPEKYKEIFFDQSKNGYAGYIDGGASQEEFYKFIKPILEKMDGTEELLVKLNREDLLRKQRTFDNGSIPHQIHLGELHAILRRQEDFYPFLKDNREKIEKILTFRIPYYVGPLARGNSRFAWMTRKSEETITPWNFEEVVDKGASAQSFIERMTNFDKNLPNEKVLPKHSLLYEYFTVYNELTKVKYVTEGMRKPAFLSGEQKKAIVDLLFKTNRKVTVKQLKEDYFKKIECFDSVEISGVEDRFNASLGTYHDLLKIIKDKDFLDNEENEDILEDIVLTLTLFEDREMIEERLKTYAHLFDDKVMKQLKRRRYTGWGRLSRKLINGIRDKQSGKTILDFLKSDGFANRNFMQLIHDDSLTFKEDIQKAQVSGQGDSLHEHIANLAGSPAIKKGILQTVKVVDELVKVMGRHKPENIVIEMARENQTTQKGQKNSRERMKRIEEGIKELGSQILKEHPVENTQLQNEKLYLYYLQNGRDMYVDQELDINRLSDYDVDHIVPQSFLKDDSIDNKVLTRSDKARGKSDNVPSEEVVKKMKNYWRQLLNAKLITQRKFDNLTKAERGGLSELDKAGFIKRQLVETRQITKHVAQILDSRMNTKYDENDKLIREVKVITLKSKLVSDFRKDFQFYKVREINNYHHAHDAYLNAVVGTALIKKYPKLESEFVYGDYKVYDVRKMIAKSEQEIGKATAKYFFYSNIMNFFKTEITLANGEIRKRPLIETNGETGEIVWDKGRDFATVRKVLSMPQVNIVKKTEVQTGGFSKESILPKRNSDKLIARKKDWDPKKYGGFDSPTVAYSVLVVAKVEKGKSKKLKSVKELLGITIMERSSFEKNPIDFLEAKGYKEVKKDLIIKLPKYSLFELENGRKRMLASAGELQKGNELALPSKYVNFLYLASHYEKLKGSPEDNEQKQLFVEQHKHYLDEIIEQISEFSKRVILADANLDKVLSAYNKHRDKPIREQAENIIHLFTLTNLGAPAAFKYFDTTIDRKRYTSTKEVLDATLIHQSITGLYETRIDLSQLGGDGGPAPGGGGGTVSLQDEHRLFDIPVTTSLPDVWLQDFPQAWAETGGLGRAKCQAPIIIDLKPTAVPVSIKQYPMSLEAHMGIRQHIIKFLELGVLRPCRSPWNTPLLPVKKPGTQDYRPVQDLREINKRTVDIHPTVPNPYNLLSTLKPDYSWYTVLDLKDAFFCLPLAPQSQELFAFEWKDPERGISGQLTWTRLPQGFKNSPTLFNEALHRDLTDFRTQHPEVTLLQYVDDLLLAAPTKKACTQGTRHLLQELGEKGYRASAKKAQICQTKVTYLGYILSEGKRWLTPGRIETVARIPPPRNPREVREFLGKAGFCRLFIPGFAELAAPLYALTKPSTPFTWQTEHQLAFEALKKALLSAPALGLPDTSKPFTLFLDERQGIAKGVLTQKLGPWKRPVAYLSKKLDPVAAGWPPCLRIMAATAMLVKDSAKLTLGQPLTVITPHTLEAIVRQPPDRWITNARLTHYQALLLDTDRVQFGPPVTLNPATLLPVPENQPSPHDCRQVLAETHGTREDLKDQELPDADHTWYTDGSSYLDSGTRRAGAAVVDGHNTIWAQSLPPGTSAQKAELIALTKALELSKGKKANIYTDSRYAFATAHTHGSIYERRGWLTSEGKEIKNKAEIIALLKALFLPQEVAIIHCPGHQKGQDPVAVGNRQADRVARQAAMAEVLTLATEPDNTSHITAGKRTADGSEFEKRTADGSEFESPKKKAKVE

SEQ ID NO: 1984 - protein, 2102 aa, synthetic construct
  source 1..2102: note = Description of Artificial Sequence: Synthetic polypeptide
MPAAKRVKLDGGDKKYSIGLDIGTNSVGWAVITDEYKVPSKKFKVLGNTDRHSIKKNLIGALLFDSGETAEATRLKRTARRRYTRRKNRICYLQEIFSNEMAKVDDSFFHRLEESFLVEEDKKHERHPIFGNIVDEVAYHEKYPTIYHLRKKLVDSTDKADLRLIYLALAHMIKFRGHFLIEGDLNPDNSDVDKLFIQLVQTYNQLFEENPINASGVDAKAILSARLSKSRRLENLIAQLPGEKKNGLFGNLIALSLGLTPNFKSNFDLAEDAKLQLSKDTYDDDLDNLLAQIGDQYADLFLAAKNLSDAILLSDILRVNTEITKAPLSASMIKRYDEHHQDLTLLKALVRQQLPEKYKEIFFDQSKNGYAGYIDGGASQEEFYKFIKPILEKMDGTEELLVKLNREDLLRKQRTFDNGSIPHQIHLGELHAILRRQEDFYPFLKDNREKIEKILTFRIPYYVGPLARGNSRFAWMTRKSEETITPWNFEEVVDKGASAQSFIERMTNFDKNLPNEKVLPKHSLLYEYFTVYNELTKVKYVTEGMRKPAFLSGEQKKAIVDLLFKTNRKVTVKQLKEDYFKKIECFDSVEISGVEDRFNASLGTYHDLLKIIKDKDFLDNEENEDILEDIVLTLTLFEDREMIEERLKTYAHLFDDKVMKQLKRRRYTGWGRLSRKLINGIRDKQSGKTILDFLKSDGFANRNFMQLIHDDSLTFKEDIQKAQVSGQGDSLHEHIANLAGSPAIKKGILQTVKVVDELVKVMGRHKPENIVIEMARENQTTQKGQKNSRERMKRIEEGIKELGSQILKEHPVENTQLQNEKLYLYYLQNGRDMYVDQELDINRLSDYDVDHIVPQSFLKDDSIDNKVLTRSDKARGKSDNVPSEEVVKKMKNYWRQLLNAKLITQRKFDNLTKAERGGLSELDKAGFIKRQLVETRQITKHVAQILDSRMNTKYDENDKLIREVKVITLKSKLVSDFRKDFQFYKVREINNYHHAHDAYLNAVVGTALIKKYPKLESEFVYGDYKVYDVRKMIAKSEQEIGKATAKYFFYSNIMNFFKTEITLANGEIRKRPLIETNGETGEIVWDKGRDFATVRKVLSMPQVNIVKKTEVQTGGFSKESILPKRNSDKLIARKKDWDPKKYGGFDSPTVAYSVLVVAKVEKGKSKKLKSVKELLGITIMERSSFEKNPIDFLEAKGYKEVKKDLIIKLPKYSLFELENGRKRMLASAGELQKGNELALPSKYVNFLYLASHYEKLKGSPEDNEQKQLFVEQHKHYLDEIIEQISEFSKRVILADANLDKVLSAYNKHRDKPIREQAENIIHLFTLTNLGAPAAFKYFDTTIDRKRYTSTKEVLDATLIHQSITGLYETRIDLSQLGGDGGGGSEAAAKGGGGGTVSLQDEHRLFDIPVTTSLPDVWLQDFPQAWAETGGLGRAKCQAPIIIDLKPTAVPVSIKQYPMSLEAHMGIRQHIIKFLELGVLRPCRSPWNTPLLPVKKPGTQDYRPVQDLREINKRTVDIHPTVPNPYNLLSTLKPDYSWYTVLDLKDAFFCLPLAPQSQELFAFEWKDPERGISGQLTWTRLPQGFKNSPTLFNEALHRDLTDFRTQHPEVTLLQYVDDLLLAAPTKKACTQGTRHLLQELGEKGYRASAKKAQICQTKVTYLGYILSEGKRWLTPGRIETVARIPPPRNPREVREFLGKAGFCRLFIPGFAELAAPLYALTKPSTPFTWQTEHQLAFEALKKALLSAPALGLPDTSKPFTLFLDERQGIAKGVLTQKLGPWKRPVAYLSKKLDPVAAGWPPCLRIMAATAMLVKDSAKLTLGQPLTVITPHTLEAIVRQPPDRWITNARLTHYQALLLDTDRVQFGPPVTLNPATLLPVPENQPSPHDCRQVLAETHGTREDLKDQELPDADHTWYTDGSSYLDSGTRRAGAAVVDGHNTIWAQSLPPGTSAQKAELIALTKALELSKGKKANIYTDSRYAFATAHTHGSIYERRGWLTSEGKEIKNKAEIIALLKALFLPQEVAIIHCPGHQKGQDPVAVGNRQADRVARQAAMAEVLTLATEPDNTSHITAGKRTADGSEFEKRTADGSEFESPKKKAKVE

SEQ ID NO: 1985 - protein, 2100 aa, synthetic construct
  source 1..2100: note = Description of Artificial Sequence: Synthetic polypeptide
MPAAKRVKLDGGDKKYSIGLDIGTNSVGWAVITDEYKVPSKKFKVLGNTDRHSIKKNLIGALLFDSGETAEATRLKRTARRRYTRRKNRICYLQEIFSNEMAKVDDSFFHRLEESFLVEEDKKHERHPIFGNIVDEVAYHEKYPTIYHLRKKLVDSTDKADLRLIYLALAHMIKFRGHFLIEGDLNPDNSDVDKLFIQLVQTYNQLFEENPINASGVDAKAILSARLSKSRRLENLIAQLPGEKKNGLFGNLIALSLGLTPNFKSNFDLAEDAKLQLSKDTYDDDLDNLLAQIGDQYADLFLAAKNLSDAILLSDILRVNTEITKAPLSASMIKRYDEHHQDLTLLKALVRQQLPEKYKEIFFDQSKNGYAGYIDGGASQEEFYKFIKPILEKMDGTEELLVKLNREDLLRKQRTFDNGSIPHQIHLGELHAILRRQEDFYPFLKDNREKIEKILTFRIPYYVGPLARGNSRFAWMTRKSEETITPWNFEEVVDKGASAQSFIERMTNFDKNLPNEKVLPKHSLLYEYFTVYNELTKVKYVTEGMRKPAFLSGEQKKAIVDLLFKTNRKVTVKQLKEDYFKKIECFDSVEISGVEDRFNASLGTYHDLLKIIKDKDFLDNEENEDILEDIVLTLTLFEDREMIEERLKTYAHLFDDKVMKQLKRRRYTGWGRLSRKLINGIRDKQSGKTILDFLKSDGFANRNFMQLIHDDSLTFKEDIQKAQVSGQGDSLHEHIANLAGSPAIKKGILQTVKVVDELVKVMGRHKPENIVIEMARENQTTQKGQKNSRERMKRIEEGIKELGSQILKEHPVENTQLQNEKLYLYYLQNGRDMYVDQELDINRLSDYDVDHIVPQSFLKDDSIDNKVLTRSDKARGKSDNVPSEEVVKKMKNYWRQLLNAKLITQRKFDNLTKAERGGLSELDKAGFIKRQLVETRQITKHVAQILDSRMNTKYDENDKLIREVKVITLKSKLVSDFRKDFQFYKVREINNYHHAHDAYLNAVVGTALIKKYPKLESEFVYGDYKVYDVRKMIAKSEQEIGKATAKYFFYSNIMNFFKTEITLANGEIRKRPLIETNGETGEIVWDKGRDFATVRKVLSMPQVNIVKKTEVQTGGFSKESILPKRNSDKLIARKKDWDPKKYGGFDSPTVAYSVLVVAKVEKGKSKKLKSVKELLGITIMERSSFEKNPIDFLEAKGYKEVKKDLIIKLPKYSLFELENGRKRMLASAGELQKGNELALPSKYVNFLYLASHYEKLKGSPEDNEQKQLFVEQHKHYLDEIIEQISEFSKRVILADANLDKVLSAYNKHRDKPIREQAENIIHLFTLTNLGAPAAFKYFDTTIDRKRYTSTKEVLDATLIHQSITGLYETRIDLSQLGGDGGGSSPAPGGSGGTVSLQDEHRLFDIPVTTSLPDVWLQDFPQAWAETGGLGRAKCQAPIIIDLKPTAVPVSIKQYPMSLEAHMGIRQHIIKFLELGVLRPCRSPWNTPLLPVKKPGTQDYRPVQDLREINKRTVDIHPTVPNPYNLLSTLKPDYSWYTVLDLKDAFFCLPLAPQSQELFAFEWKDPERGISGQLTWTRLPQGFKNSPTLFNEALHRDLTDFRTQHPEVTLLQYVDDLLLAAPTKKACTQGTRHLLQELGEKGYRASAKKAQICQTKVTYLGYILSEGKRWLTPGRIETVARIPPPRNPREVREFLGKAGFCRLFIPGFAELAAPLYALTKPSTPFTWQTEHQLAFEALKKALLSAPALGLPDTSKPFTLFLDERQGIAKGVLTQKLGPWKRPVAYLSKKLDPVAAGWPPCLRIMAATAMLVKDSAKLTLGQPLTVITPHTLEAIVRQPPDRWITNARLTHYQALLLDTDRVQFGPPVTLNPATLLPVPENQPSPHDCRQVLAETHGTREDLKDQELPDADHTWYTDGSSYLDSGTRRAGAAVVDGHNTIWAQSLPPGTSAQKAELIALTKALELSKGKKANIYTDSRYAFATAHTHGSIYERRGWLTSEGKEIKNKAEIIALLKALFLPQEVAIIHCPGHQKGQDPVAVGNRQADRVARQAAMAEVLTLATEPDNTSHITAGKRTADGSEFEKRTADGSEFESPKKKAKVE

SEQ ID NO: 1986 - protein, 2099 aa, synthetic construct
  source 1..2099: note = Description of Artificial Sequence: Synthetic polypeptide
MPAAKRVKLDGGDKKYSIGLDIGTNSVGWAVITDEYKVPSKKFKVLGNTDRHSIKKNLIGALLFDSGETAEATRLKRTARRRYTRRKNRICYLQEIFSNEMAKVDDSFFHRLEESFLVEEDKKHERHPIFGNIVDEVAYHEKYPTIYHLRKKLVDSTDKADLRLIYLALAHMIKFRGHFLIEGDLNPDNSDVDKLFIQLVQTYNQLFEENPINASGVDAKAILSARLSKSRRLENLIAQLPGEKKNGLFGNLIALSLGLTPNFKSNFDLAEDAKLQLSKDTYDDDLDNLLAQIGDQYADLFLAAKNLSDAILLSDILRVNTEITKAPLSASMIKRYDEHHQDLTLLKALVRQQLPEKYKEIFFDQSKNGYAGYIDGGASQEEFYKFIKPILEKMDGTEELLVKLNREDLLRKQRTFDNGSIPHQIHLGELHAILRRQEDFYPFLKDNREKIEKILTFRIPYYVGPLARGNSRFAWMTRKSEETITPWNFEEVVDKGASAQSFIERMTNFDKNLPNEKVLPKHSLLYEYFTVYNELTKVKYVTEGMRKPAFLSGEQKKAIVDLLFKTNRKVTVKQLKEDYFKKIECFDSVEISGVEDRFNASLGTYHDLLKIIKDKDFLDNEENEDILEDIVLTLTLFEDREMIEERLKTYAHLFDDKVMKQLKRRRYTGWGRLSRKLINGIRDKQSGKTILDFLKSDGFANRNFMQLIHDDSLTFKEDIQKAQVSGQGDSLHEHIANLAGSPAIKKGILQTVKVVDELVKVMGRHKPENIVIEMARENQTTQKGQKNSRERMKRIEEGIKELGSQILKEHPVENTQLQNEKLYLYYLQNGRDMYVDQELDINRLSDYDVDHIVPQSFLKDDSIDNKVLTRSDKARGKSDNVPSEEVVKKMKNYWRQLLNAKLITQRKFDNLTKAERGGLSELDKAGFIKRQLVETRQITKHVAQILDSRMNTKYDENDKLIREVKVITLKSKLVSDFRKDFQFYKVREINNYHHAHDAYLNAVVGTALIKKYPKLESEFVYGDYKVYDVRKMIAKSEQEIGKATAKYFFYSNIMNFFKTEITLANGEIRKRPLIETNGETGEIVWDKGRDFATVRKVLSMPQVNIVKKTEVQTGGFSKESILPKRNSDKLIARKKDWDPKKYGGFDSPTVAYSVLVVAKVEKGKSKKLKSVKELLGITIMERSSFEKNPIDFLEAKGYKEVKKDLIIKLPKYSLFELENGRKRMLASAGELQKGNELALPSKYVNFLYLASHYEKLKGSPEDNEQKQLFVEQHKHYLDEIIEQISEFSKRVILADANLDKVLSAYNKHRDKPIREQAENIIHLFTLTNLGAPAAFKYFDTTIDRKRYTSTKEVLDATLIHQSITGLYETRIDLSQLGGDGGEAAAKGGGGGTVSLQDEHRLFDIPVTTSLPDVWLQDFPQAWAETGGLGRAKCQAPIIIDLKPTAVPVSIKQYPMSLEAHMGIRQHIIKFLELGVLRPCRSPWNTPLLPVKKPGTQDYRPVQDLREINKRTVDIHPTVPNPYNLLSTLKPDYSWYTVLDLKDAFFCLPLAPQSQELFAFEWKDPERGISGQLTWTRLPQGFKNSPTLFNEALHRDLTDFRTQHPEVTLLQYVDDLLLAAPTKKACTQGTRHLLQELGEKGYRASAKKAQICQTKVTYLGYILSEGKRWLTPGRIETVARIPPPRNPREVREFLGKAGFCRLFIPGFAELAAPLYALTKPSTPFTWQTEHQLAFEALKKALLSAPALGLPDTSKPFTLFLDERQGIAKGVLTQKLGPWKRPVAYLSKKLDPVAAGWPPCLRIMAATAMLVKDSAKLTLGQPLTVITPHTLEAIVRQPPDRWITNARLTHYQALLLDTDRVQFGPPVTLNPATLLPVPENQPSPHDCRQVLAETHGTREDLKDQELPDADHTWYTDGSSYLDSGTRRAGAAVVDGHNTIWAQSLPPGTSAQKAELIALTKALELSKGKKANIYTDSRYAFATAHTHGSIYERRGWLTSEGKEIKNKAEIIALLKALFLPQEVAIIHCPGHQKGQDPVAVGNRQADRVARQAAMAEVLTLATEPDNTSHITAGKRTADGSEFEKRTADGSEFESPKKKAKVE

SEQ ID NO: 1987 - protein, 2106 aa, synthetic construct
  source 1..2106: note = Description of Artificial Sequence: Synthetic polypeptide
MPAAKRVKLDGGDKKYSIGLDIGTNSVGWAVITDEYKVPSKKFKVLGNTDRHSIKKNLIGALLFDSGETAEATRLKRTARRRYTRRKNRICYLQEIFSNEMAKVDDSFFHRLEESFLVEEDKKHERHPIFGNIVDEVAYHEKYPTIYHLRKKLVDSTDKADLRLIYLALAHMIKFRGHFLIEGDLNPDNSDVDKLFIQLVQTYNQLFEENPINASGVDAKAILSARLSKSRRLENLIAQLPGEKKNGLFGNLIALSLGLTPNFKSNFDLAEDAKLQLSKDTYDDDLDNLLAQIGDQYADLFLAAKNLSDAILLSDILRVNTEITKAPLSASMIKRYDEHHQDLTLLKALVRQQLPEKYKEIFFDQSKNGYAGYIDGGASQEEFYKFIKPILEKMDGTEELLVKLNREDLLRKQRTFDNGSIPHQIHLGELHAILRRQEDFYPFLKDNREKIEKILTFRIPYYVGPLARGNSRFAWMTRKSEETITPWNFEEVVDKGASAQSFIERMTNFDKNLPNEKVLPKHSLLYEYFTVYNELTKVKYVTEGMRKPAFLSGEQKKAIVDLLFKTNRKVTVKQLKEDYFKKIECFDSVEISGVEDRFNASLGTYHDLLKIIKDKDFLDNEENEDILEDIVLTLTLFEDREMIEERLKTYAHLFDDKVMKQLKRRRYTGWGRLSRKLINGIRDKQSGKTILDFLKSDGFANRNFMQLIHDDSLTFKEDIQKAQVSGQGDSLHEHIANLAGSPAIKKGILQTVKVVDELVKVMGRHKPENIVIEMARENQTTQKGQKNSRERMKRIEEGIKELGSQILKEHPVENTQLQNEKLYLYYLQNGRDMYVDQELDINRLSDYDVDHIVPQSFLKDDSIDNKVLTRSDKARGKSDNVPSEEVVKKMKNYWRQLLNAKLITQRKFDNLTKAERGGLSELDKAGFIKRQLVETRQITKHVAQILDSRMNTKYDENDKLIREVKVITLKSKLVSDFRKDFQFYKVREINNYHHAHDAYLNAVVGTALIKKYPKLESEFVYGDYKVYDVRKMIAKSEQEIGKATAKYFFYSNIMNFFKTEITLANGEIRKRPLIETNGETGEIVWDKGRDFATVRKVLSMPQVNIVKKTEVQTGGFSKESILPKRNSDKLIARKKDWDPKKYGGFDSPTVAYSVLVVAKVEKGKSKKLKSVKELLGITIMERSSFEKNPIDFLEAKGYKEVKKDLIIKLPKYSLFELENGRKRMLASAGELQKGNELALPSKYVNFLYLASHYEKLKGSPEDNEQKQLFVEQHKHYLDEIIEQISEFSKRVILADANLDKVLSAYNKHRDKPIREQAENIIHLFTLTNLGAPAAFKYFDTTIDRKRYTSTKEVLDATLIHQSITGLYETRIDLSQLGGDGGGGGGSGGGGSGGGGSGGTVSLQDEHRLFDIPVTTSLPDVWLQDFPQAWAETGGLGRAKCQAPIIIDLKPTAVPVSIKQYPMSLEAHMGIRQHIIKFLELGVLRPCRSPWNTPLLPVKKPGTQDYRPVQDLREINKRTVDIHPTVPNPYNLLSTLKPDYSWYTVLDLKDAFFCLPLAPQSQELFAFEWKDPERGISGQLTWTRLPQGFKNSPTLFNEALHRDLTDFRTQHPEVTLLQYVDDLLLAAPTKKACTQGTRHLLQELGEKGYRASAKKAQICQTKVTYLGYILSEGKRWLTPGRIETVARIPPPRNPREVREFLGKAGFCRLFIPGFAELAAPLYALTKPSTPFTWQTEHQLAFEALKKALLSAPALGLPDTSKPFTLFLDERQGIAKGVLTQKLGPWKRPVAYLSKKLDPVAAGWPPCLRIMAATAMLVKDSAKLTLGQPLTVITPHTLEAIVRQPPDRWITNARLTHYQALLLDTDRVQFGPPVTLNPATLLPVPENQPSPHDCRQVLAETHGTREDLKDQELPDADHTWYTDGSSYLDSGTRRAGAAVVDGHNTIWAQSLPPGTSAQKAELIALTKALELSKGKKANIYTDSRYAFATAHTHGSIYERRGWLTSEGKEIKNKAEIIALLKALFLPQEVAIIHCPGHQKGQDPVAVGNRQADRVARQAAMAEVLTLATEPDNTSHITAGKRTADGSEFEKRTADGSEFESPKKKAKVE

SEQ ID NO: 1988 - protein, 2100 aa, synthetic construct
  source 1..2100: note = Description of Artificial Sequence: Synthetic polypeptide
MPAAKRVKLDGGDKKYSIGLDIGTNSVGWAVITDEYKVPSKKFKVLGNTDRHSIKKNLIGALLFDSGETAEATRLKRTARRRYTRRKNRICYLQEIFSNEMAKVDDSFFHRLEESFLVEEDKKHERHPIFGNIVDEVAYHEKYPTIYHLRKKLVDSTDKADLRLIYLALAHMIKFRGHFLIEGDLNPDNSDVDKLFIQLVQTYNQLFEENPINASGVDAKAILSARLSKSRRLENLIAQLPGEKKNGLFGNLIALSLGLTPNFKSNFDLAEDAKLQLSKDTYDDDLDNLLAQIGDQYADLFLAAKNLSDAILLSDILRVNTEITKAPLSASMIKRYDEHHQDLTLLKALVRQQLPEKYKEIFFDQSKNGYAGYIDGGASQEEFYKFIKPILEKMDGTEELLVKLNREDLLRKQRTFDNGSIPHQIHLGELHAILRRQEDFYPFLKDNREKIEKILTFRIPYYVGPLARGNSRFAWMTRKSEETITPWNFEEVVDKGASAQSFIERMTNFDKNLPNEKVLPKHSLLYEYFTVYNELTKVKYVTEGMRKPAFLSGEQKKAIVDLLFKTNRKVTVKQLKEDYFKKIECFDSVEISGVEDRFNASLGTYHDLLKIIKDKDFLDNEENEDILEDIVLTLTLFEDREMIEERLKTYAHLFDDKVMKQLKRRRYTGWGRLSRKLINGIRDKQSGKTILDFLKSDGFANRNFMQLIHDDSLTFKEDIQKAQVSGQGDSLHEHIANLAGSPAIKKGILQTVKVVDELVKVMGRHKPENIVIEMARENQTTQKGQKNSRERMKRIEEGIKELGSQILKEHPVENTQLQNEKLYLYYLQNGRDMYVDQELDINRLSDYDVDHIVPQSFLKDDSIDNKVLTRSDKARGKSDNVPSEEVVKKMKNYWRQLLNAKLITQRKFDNLTKAERGGLSELDKAGFIKRQLVETRQITKHVAQILDSRMNTKYDENDKLIREVKVITLKSKLVSDFRKDFQFYKVREINNYHHAHDAYLNAVVGTALIKKYPKLESEFVYGDYKVYDVRKMIAKSEQEIGKATAKYFFYSNIMNFFKTEITLANGEIRKRPLIETNGETGEIVWDKGRDFATVRKVLSMPQVNIVKKTEVQTGGFSKESILPKRNSDKLIARKKDWDPKKYGGFDSPTVAYSVLVVAKVEKGKSKKLKSVKELLGITIMERSSFEKNPIDFLEAKGYKEVKKDLIIKLPKYSLFELENGRKRMLASAGELQKGNELALPSKYVNFLYLASHYEKLKGSPEDNEQKQLFVEQHKHYLDEIIEQISEFSKRVILADANLDKVLSAYNKHRDKPIREQAENIIHLFTLTNLGAPAAFKYFDTTIDRKRYTSTKEVLDATLIHQSITGLYETRIDLSQLGGDGGGGGPAPGSSGGTVSLQDEHRLFDIPVTTSLPDVWLQDFPQAWAETGGLGRAKCQAPIIIDLKPTAVPVSIKQYPMSLEAHMGIRQHIIKFLELGVLRPCRSPWNTPLLPVKKPGTQDYRPVQDLREINKRTVDIHPTVPNPYNLLSTLKPDYSWYTVLDLKDAFFCLPLAPQSQELFAFEWKDPERGISGQLTWTRLPQGFKNSPTLFNEALHRDLTDFRTQHPEVTLLQYVDDLLLAAPTKKACTQGTRHLLQELGEKGYRASAKKAQICQTKVTYLGYILSEGKRWLTPGRIETVARIPPPRNPREVREFLGKAGFCRLFIPGFAELAAPLYALTKPSTPFTWQTEHQLAFEALKKALLSAPALGLPDTSKPFTLFLDERQGIAKGVLTQKLGPWKRPVAYLSKKLDPVAAGWPPCLRIMAATAMLVKDSAKLTLGQPLTVITPHTLEAIVRQPPDRWITNARLTHYQALLLDTDRVQFGPPVTLNPATLLPVPENQPSPHDCRQVLAETHGTREDLKDQELPDADHTWYTDGSSYLDSGTRRAGAAVVDGHNTIWAQSLPPGTSAQKAELIALTKALELSKGKKANIYTDSRYAFATAHTHGSIYERRGWLTSEGKEIKNKAEIIALLKALFLPQEVAIIHCPGHQKGQDPVAVGNRQADRVARQAAMAEVLTLATEPDNTSHITAGKRTADGSEFEKRTADGSEFESPKKKAKVE

SEQ ID NO: 1989 - protein, 2102 aa, synthetic construct
  source 1..2102: note = Description of Artificial Sequence: Synthetic polypeptide
MPAAKRVKLDGGDKKYSIGLDIGTNSVGWAVITDEYKVPSKKFKVLGNTDRHSIKKNLIGALLFDSGETAEATRLKRTARRRYTRRKNRICYLQEIFSNEMAKVDDSFFHRLEESFLVEEDKKHERHPIFGNIVDEVAYHEKYPTIYHLRKKLVDSTDKADLRLIYLALAHMIKFRGHFLIEGDLNPDNSDVDKLFIQLVQTYNQLFEENPINASGVDAKAILSARLSKSRRLENLIAQLPGEKKNGLFGNLIALSLGLTPNFKSNFDLAEDAKLQLSKDTYDDDLDNLLAQIGDQYADLFLAAKNLSDAILLSDILRVNTEITKAPLSASMIKRYDEHHQDLTLLKALVRQQLPEKYKEIFFDQSKNGYAGYIDGGASQEEFYKFIKPILEKMDGTEELLVKLNREDLLRKQRTFDNGSIPHQIHLGELHAILRRQEDFYPFLKDNREKIEKILTFRIPYYVGPLARGNSRFAWMTRKSEETITPWNFEEVVDKGASAQSFIERMTNFDKNLPNEKVLPKHSLLYEYFTVYNELTKVKYVTEGMRKPAFLSGEQKKAIVDLLFKTNRKVTVKQLKEDYFKKIECFDSVEISGVEDRFNASLGTYHDLLKIIKDKDFLDNEENEDILEDIVLTLTLFEDREMIEERLKTYAHLFDDKVMKQLKRRRYTGWGRLSRKLINGIRDKQSGKTILDFLKSDGFANRNFMQLIHDDSLTFKEDIQKAQVSGQGDSLHEHIANLAGSPAIKKGILQTVKVVDELVKVMGRHKPENIVIEMARENQTTQKGQKNSRERMKRIEEGIKELGSQILKEHPVENTQLQNEKLYLYYLQNGRDMYVDQELDINRLSDYDVDHIVPQSFLKDDSIDNKVLTRSDKARGKSDNVPSEEVVKKMKNYWRQLLNAKLITQRKFDNLTKAERGGLSELDKAGFIKRQLVETRQITKHVAQILDSRMNTKYDENDKLIREVKVITLKSKLVSDFRKDFQFYKVREINNYHHAHDAYLNAVVGTALIKKYPKLESEFVYGDYKVYDVRKMIAKSEQEIGKATAKYFFYSNIMNFFKTEITLANGEIRKRPLIETNGETGEIVWDKGRDFATVRKVLSMPQVNIVKKTEVQTGGFSKESILPKRNSDKLIARKKDWDPKKYGGFDSPTVAYSVLVVAKVEKGKSKKLKSVKELLGITIMERSSFEKNPIDFLEAKGYKEVKKDLIIKLPKYSLFELENGRKRMLASAGELQKGNELALPSKYVNFLYLASHYEKLKGSPEDNEQKQLFVEQHKHYLDEIIEQISEFSKRVILADANLDKVLSAYNKHRDKPIREQAENIIHLFTLTNLGAPAAFKYFDTTIDRKRYTSTKEVLDATLIHQSITGLYETRIDLSQLGGDGGGGSEAAAKPAPGGTVSLQDEHRLFDIPVTTSLPDVWLQDFPQAWAETGGLGRAKCQAPIIIDLKPTAVPVSIKQYPMSLEAHMGIRQHIIKFLELGVLRPCRSPWNTPLLPVKKPGTQDYRPVQDLREINKRTVDIHPTVPNPYNLLSTLKPDYSWYTVLDLKDAFFCLPLAPQSQELFAFEWKDPERGISGQLTWTRLPQGFKNSPTLFNEALHRDLTDFRTQHPEVTLLQYVDDLLLAAPTKKACTQGTRHLLQELGEKGYRASAKKAQICQTKVTYLGYILSEGKRWLTPGRIETVARIPPPRNPREVREFLGKAGFCRLFIPGFAELAAPLYALTKPSTPFTWQTEHQLAFEALKKALLSAPALGLPDTSKPFTLFLDERQGIAKGVLTQKLGPWKRPVAYLSKKLDPVAAGWPPCLRIMAATAMLVKDSAKLTLGQPLTVITPHTLEAIVRQPPDRWITNARLTHYQALLLDTDRVQFGPPVTLNPATLLPVPENQPSPHDCRQVLAETHGTREDLKDQELPDADHTWYTDGSSYLDSGTRRAGAAVVDGHNTIWAQSLPPGTSAQKAELIALTKALELSKGKKANIYTDSRYAFATAHTHGSIYERRGWLTSEGKEIKNKAEIIALLKALFLPQEVAIIHCPGHQKGQDPVAVGNRQADRVARQAAMAEVLTLATEPDNTSHITAGKRTADGSEFEKRTADGSEFESPKKKAKVE

SEQ ID NO: 1990 - protein, 2100 aa, synthetic construct
  source 1..2100: note = Description of Artificial Sequence: Synthetic polypeptide
MPAAKRVKLDGGDKKYSIGLDIGTNSVGWAVITDEYKVPSKKFKVLGNTDRHSIKKNLIGALLFDSGETAEATRLKRTARRRYTRRKNRICYLQEIFSNEMAKVDDSFFHRLEESFLVEEDKKHERHPIFGNIVDEVAYHEKYPTIYHLRKKLVDSTDKADLRLIYLALAHMIKFRGHFLIEGDLNPDNSDVDKLFIQLVQTYNQLFEENPINASGVDAKAILSARLSKSRRLENLIAQLPGEKKNGLFGNLIALSLGLTPNFKSNFDLAEDAKLQLSKDTYDDDLDNLLAQIGDQYADLFLAAKNLSDAILLSDILRVNTEITKAPLSASMIKRYDEHHQDLTLLKALVRQQLPEKYKEIFFDQSKNGYAGYIDGGASQEEFYKFIKPILEKMDGTEELLVKLNREDLLRKQRTFDNGSIPHQIHLGELHAILRRQEDFYPFLKDNREKIEKILTFRIPYYVGPLARGNSRFAWMTRKSEETITPWNFEEVVDKGASAQSFIERMTNFDKNLPNEKVLPKHSLLYEYFTVYNELTKVKYVTEGMRKPAFLSGEQKKAIVDLLFKTNRKVTVKQLKEDYFKKIECFDSVEISGVEDRFNASLGTYHDLLKIIKDKDFLDNEENEDILEDIVLTLTLFEDREMIEERLKTYAHLFDDKVMKQLKRRRYTGWGRLSRKLINGIRDKQSGKTILDFLKSDGFANRNFMQLIHDDSLTFKEDIQKAQVSGQGDSLHEHIANLAGSPAIKKGILQTVKVVDELVKVMGRHKPENIVIEMARENQTTQKGQKNSRERMKRIEEGIKELGSQILKEHPVENTQLQNEKLYLYYLQNGRDMYVDQELDINRLSDYDVDHIVPQSFLKDDSIDNKVLTRSDKARGKSDNVPSEEVVKKMKNYWRQLLNAKLITQRKFDNLTKAERGGLSELDKAGFIKRQLVETRQITKHVAQILDSRMNTKYDENDKLIREVKVITLKSKLVSDFRKDFQFYKVREINNYHHAHDAYLNAVVGTALIKKYPKLESEFVYGDYKVYDVRKMIAKSEQEIGKATAKYFFYSNIMNFFKTEITLANGEIRKRPLIETNGETGEIVWDKGRDFATVRKVLSMPQVNIVKKTEVQTGGFSKESILPKRNSDKLIARKKDWDPKKYGGFDSPTVAYSVLVVAKVEKGKSKKLKSVKELLGITIMERSSFEKNPIDFLEAKGYKEVKKDLIIKLPKYSLFELENGRKRMLASAGELQKGNELALPSKYVNFLYLASHYEKLKGSPEDNEQKQLFVEQHKHYLDEIIEQISEFSKRVILADANLDKVLSAYNKHRDKPIREQAENIIHLFTLTNLGAPAAFKYFDTTIDRKRYTSTKEVLDATLIHQSITGLYETRIDLSQLGGDGGPAPGGSGSSGGTVSLQDEHRLFDIPVTTSLPDVWLQDFPQAWAETGGLGRAKCQAPIIIDLKPTAVPVSIKQYPMSLEAHMGIRQHIIKFLELGVLRPCRSPWNTPLLPVKKPGTQDYRPVQDLREINKRTVDIHPTVPNPYNLLSTLKPDYSWYTVLDLKDAFFCLPLAPQSQELFAFEWKDPERGISGQLTWTRLPQGFKNSPTLFNEALHRDLTDFRTQHPEVTLLQYVDDLLLAAPTKKACTQGTRHLLQELGEKGYRASAKKAQICQTKVTYLGYILSEGKRWLTPGRIETVARIPPPRNPREVREFLGKAGFCRLFIPGFAELAAPLYALTKPSTPFTWQTEHQLAFEALKKALLSAPALGLPDTSKPFTLFLDERQGIAKGVLTQKLGPWKRPVAYLSKKLDPVAAGWPPCLRIMAATAMLVKDSAKLTLGQPLTVITPHTLEAIVRQPPDRWITNARLTHYQALLLDTDRVQFGPPVTLNPATLLPVPENQPSPHDCRQVLAETHGTREDLKDQELPDADHTWYTDGSSYLDSGTRRAGAAVVDGHNTIWAQSLPPGTSAQKAELIALTKALELSKGKKANIYTDSRYAFATAHTHGSIYERRGWLTSEGKEIKNKAEIIALLKALFLPQEVAIIHCPGHQKGQDPVAVGNRQADRVARQAAMAEVLTLATEPDNTSHITAGKRTADGSEFEKRTADGSEFESPKKKAKVE

SEQ ID NO: 1991 - protein, 2100 aa, synthetic construct
  source 1..2100: note = Description of Artificial Sequence: Synthetic polypeptide
MPAAKRVKLDGGDKKYSIGLDIGTNSVGWAVITDEYKVPSKKFKVLGNTDRHSIKKNLIGALLFDSGETAEATRLKRTARRRYTRRKNRICYLQEIFSNEMAKVDDSFFHRLEESFLVEEDKKHERHPIFGNIVDEVAYHEKYPTIYHLRKKLVDSTDKADLRLIYLALAHMIKFRGHFLIEGDLNPDNSDVDKLFIQLVQTYNQLFEENPINASGVDAKAILSARLSKSRRLENLIAQLPGEKKNGLFGNLIALSLGLTPNFKSNFDLAEDAKLQLSKDTYDDDLDNLLAQIGDQYADLFLAAKNLSDAILLSDILRVNTEITKAPLSASMIKRYDEHHQDLTLLKALVRQQLPEKYKEIFFDQSKNGYAGYIDGGASQEEFYKFIKPILEKMDGTEELLVKLNREDLLRKQRTFDNGSIPHQIHLGELHAILRRQEDFYPFLKDNREKIEKILTFRIPYYVGPLARGNSRFAWMTRKSEETITPWNFEEVVDKGASAQSFIERMTNFDKNLPNEKVLPKHSLLYEYFTVYNELTKVKYVTEGMRKPAFLSGEQKKAIVDLLFKTNRKVTVKQLKEDYFKKIECFDSVEISGVEDRFNASLGTYHDLLKIIKDKDFLDNEENEDILEDIVLTLTLFEDREMIEERLKTYAHLFDDKVMKQLKRRRYTGWGRLSRKLINGIRDKQSGKTILDFLKSDGFANRNFMQLIHDDSLTFKEDIQKAQVSGQGDSLHEHIANLAGSPAIKKGILQTVKVVDELVKVMGRHKPENIVIEMARENQTTQKGQKNSRERMKRIEEGIKELGSQILKEHPVENTQLQNEKLYLYYLQNGRDMYVDQELDINRLSDYDVDHIVPQSFLKDDSIDNKVLTRSDKARGKSDNVPSEEVVKKMKNYWRQLLNAKLITQRKFDNLTKAERGGLSELDKAGFIKRQLVETRQITKHVAQILDSRMNTKYDENDKLIREVKVITLKSKLVSDFRKDFQFYKVREINNYHHAHDAYLNAVVGTALIKKYPKLESEFVYGDYKVYDVRKMIAKSEQEIGKATAKYFFYSNIMNFFKTEITLANGEIRKRPLIETNGETGEIVWDKGRDFATVRKVLSMPQVNIVKKTEVQTGGFSKESILPKRNSDKLIARKKDWDPKKYGGFDSPTVAYSVLVVAKVEKGKSKKLKSVKELLGITIMERSSFEKNPIDFLEAKGYKEVKKDLIIKLPKYSLFELENGRKRMLASAGELQKGNELALPSKYVNFLYLASHYEKLKGSPEDNEQKQLFVEQHKHYLDEIIEQISEFSKRVILADANLDKVLSAYNKHRDKPIREQAENIIHLFTLTNLGAPAAFKYFDTTIDRKRYTSTKEVLDATLIHQSITGLYETRIDLSQLGGDGGGGGGSSGGSGGTVSLQDEHRLFDIPVTTSLPDVWLQDFPQAWAETGGLGRAKCQAPIIIDLKPTAVPVSIKQYPMSLEAHMGIRQHIIKFLELGVLRPCRSPWNTPLLPVKKPGTQDYRPVQDLREINKRTVDIHPTVPNPYNLLSTLKPDYSWYTVLDLKDAFFCLPLAPQSQELFAFEWKDPERGISGQLTWTRLPQGFKNSPTLFNEALHRDLTDFRTQHPEVTLLQYVDDLLLAAPTKKACTQGTRHLLQELGEKGYRASAKKAQICQTKVTYLGYILSEGKRWLTPGRIETVARIPPPRNPREVREFLGKAGFCRLFIPGFAELAAPLYALTKPSTPFTWQTEHQLAFEALKKALLSAPALGLPDTSKPFTLFLDERQGIAKGVLTQKLGPWKRPVAYLSKKLDPVAAGWPPCLRIMAATAMLVKDSAKLTLGQPLTVITPHTLEAIVRQPPDRWITNARLTHYQALLLDTDRVQFGPPVTLNPATLLPVPENQPSPHDCRQVLAETHGTREDLKDQELPDADHTWYTDGSSYLDSGTRRAGAAVVDGHNTIWAQSLPPGTSAQKAELIALTKALELSKGKKANIYTDSRYAFATAHTHGSIYERRGWLTSEGKEIKNKAEIIALLKALFLPQEVAIIHCPGHQKGQDPVAVGNRQADRVARQAAMAEVLTLATEPDNTSHITAGKRTADGSEFEKRTADGSEFESPKKKAKVE

SEQ ID NO: 1992 - protein, 2106 aa, synthetic construct
  source 1..2106: note = Description of Artificial Sequence: Synthetic polypeptide
MPAAKRVKLDGGDKKYSIGLDIGTNSVGWAVITDEYKVPSKKFKVLGNTDRHSIKKNLIGALLFDSGETAEATRLKRTARRRYTRRKNRICYLQEIFSNEMAKVDDSFFHRLEESFLVEEDKKHERHPIFGNIVDEVAYHEKYPTIYHLRKKLVDSTDKADLRLIYLALAHMIKFRGHFLIEGDLNPDNSDVDKLFIQLVQTYNQLFEENPINASGVDAKAILSARLSKSRRLENLIAQLPGEKKNGLFGNLIALSLGLTPNFKSNFDLAEDAKLQLSKDTYDDDLDNLLAQIGDQYADLFLAAKNLSDAILLSDILRVNTEITKAPLSASMIKRYDEHHQDLTLLKALVRQQLPEKYKEIFFDQSKNGYAGYIDGGASQEEFYKFIKPILEKMDGTEELLVKLNREDLLRKQRTFDNGSIPHQIHLGELHAILRRQEDFYPFLKDNREKIEKILTFRIPYYVGPLARGNSRFAWMTRKSEETITPWNFEEVVDKGASAQSFIERMTNFDKNLPNEKVLPKHSLLYEYFTVYNELTKVKYVTEGMRKPAFLSGEQKKAIVDLLFKTNRKVTVKQLKEDYFKKIECFDSVEISGVEDRFNASLGTYHDLLKIIKDKDFLDNEENEDILEDIVLTLTLFEDREMIEERLKTYAHLFDDKVMKQLKRRRYTGWGRLSRKLINGIRDKQSGKTILDFLKSDGFANRNFMQLIHDDSLTFKEDIQKAQVSGQGDSLHEHIANLAGSPAIKKGILQTVKVVDELVKVMGRHKPENIVIEMARENQTTQKGQKNSRERMKRIEEGIKELGSQILKEHPVENTQLQNEKLYLYYLQNGRDMYVDQELDINRLSDYDVDHIVPQSFLKDDSIDNKVLTRSDKARGKSDNVPSEEVVKKMKNYWRQLLNAKLITQRKFDNLTKAERGGLSELDKAGFIKRQLVETRQITKHVAQILDSRMNTKYDENDKLIREVKVITLKSKLVSDFRKDFQFYKVREINNYHHAHDAYLNAVVGTALIKKYPKLESEFVYGDYKVYDVRKMIAKSEQEIGKATAKYFFYSNIMNFFKTEITLANGEIRKRPLIETNGETGEIVWDKGRDFATVRKVLSMPQVNIVKKTEVQTGGFSKESILPKRNSDKLIARKKDWDPKKYGGFDSPTVAYSVLVVAKVEKGKSKKLKSVKELLGITIMERSSFEKNPIDFLEAKGYKEVKKDLIIKLPKYSLFELENGRKRMLASAGELQKGNELALPSKYVNFLYLASHYEKLKGSPEDNEQKQLFVEQHKHYLDEIIEQISEFSKRVILADANLDKVLSAYNKHRDKPIREQAENIIHLFTLTNLGAPAAFKYFDTTIDRKRYTSTKEVLDATLIHQSITGLYETRIDLSQLGGDGGGGSGGSGGSGGSGGSGGTVSLQDEHRLFDIPVTTSLPDVWLQDFPQAWAETGGLGRAKCQAPIIIDLKPTAVPVSIKQYPMSLEAHMGIRQHIIKFLELGVLRPCRSPWNTPLLPVKKPGTQDYRPVQDLREINKRTVDIHPTVPNPYNLLSTLKPDYSWYTVLDLKDAFFCLPLAPQSQELFAFEWKDPERGISGQLTWTRLPQGFKNSPTLFNEALHRDLTDFRTQHPEVTLLQYVDDLLLAAPTKKACTQGTRHLLQELGEKGYRASAKKAQICQTKVTYLGYILSEGKRWLTPGRIETVARIPPPRNPREVREFLGKAGFCRLFIPGFAELAAPLYALTKPSTPFTWQTEHQLAFEALKKALLSAPALGLPDTSKPFTLFLDERQGIAKGVLTQKLGPWKRPVAYLSKKLDPVAAGWPPCLRIMAATAMLVKDSAKLTLGQPLTVITPHTLEAIVRQPPDRWITNARLTHYQALLLDTDRVQFGPPVTLNPATLLPVPENQPSPHDCRQVLAETHGTREDLKDQELPDADHTWYTDGSSYLDSGTRRAGAAVVDGHNTIWAQSLPPGTSAQKAELIALTKALELSKGKKANIYTDSRYAFATAHTHGSIYERRGWLTSEGKEIKNKAEIIALLKALFLPQEVAIIHCPGHQKGQDPVAVGNRQADRVARQAAMAEVLTLATEPDNTSHITAGKRTADGSEFEKRTADGSEFESPKKKAKVE

SEQ ID NO: 1993 - protein, 2100 aa, synthetic construct
  source 1..2100: note = Description of Artificial Sequence: Synthetic polypeptide
MPAAKRVKLDGGDKKYSIGLDIGTNSVGWAVITDEYKVPSKKFKVLGNTDRHSIKKNLIGALLFDSGETAEATRLKRTARRRYTRRKNRICYLQEIFSNEMAKVDDSFFHRLEESFLVEEDKKHERHPIFGNIVDEVAYHEKYPTIYHLRKKLVDSTDKADLRLIYLALAHMIKFRGHFLIEGDLNPDNSDVDKLFIQLVQTYNQLFEENPINASGVDAKAILSARLSKSRRLENLIAQLPGEKKNGLFGNLIALSLGLTPNFKSNFDLAEDAKLQLSKDTYDDDLDNLLAQIGDQYADLFLAAKNLSDAILLSDILRVNTEITKAPLSASMIKRYDEHHQDLTLLKALVRQQLPEKYKEIFFDQSKNGYAGYIDGGASQEEFYKFIKPILEKMDGTEELLVKLNREDLLRKQRTFDNGSIPHQIHLGELHAILRRQEDFYPFLKDNREKIEKILTFRIPYYVGPLARGNSRFAWMTRKSEETITPWNFEEVVDKGASAQSFIERMTNFDKNLPNEKVLPKHSLLYEYFTVYNELTKVKYVTEGMRKPAFLSGEQKKAIVDLLFKTNRKVTVKQLKEDYFKKIECFDSVEISGVEDRFNASLGTYHDLLKIIKDKDFLDNEENEDILEDIVLTLTLFEDREMIEERLKTYAHLFDDKVMKQLKRRRYTGWGRLSRKLINGIRDKQSGKTILDFLKSDGFANRNFMQLIHDDSLTFKEDIQKAQVSGQGDSLHEHIANLAGSPAIKKGILQTVKVVDELVKVMGRHKPENIVIEMARENQTTQKGQKNSRERMKRIEEGIKELGSQILKEHPVENTQLQNEKLYLYYLQNGRDMYVDQELDINRLSDYDVDHIVPQSFLKDDSIDNKVLTRSDKARGKSDNVPSEEVVKKMKNYWRQLLNAKLITQRKFDNLTKAERGGLSELDKAGFIKRQLVETRQITKHVAQILDSRMNTKYDENDKLIREVKVITLKSKLVSDFRKDFQFYKVREINNYHHAHDAYLNAVVGTALIKKYPKLESEFVYGDYKVYDVRKMIAKSEQEIGKATAKYFFYSNIMNFFKTEITLANGEIRKRPLIETNGETGEIVWDKGRDFATVRKVLSMPQVNIVKKTEVQTGGFSKESILPKRNSDKLIARKKDWDPKKYGGFDSPTVAYSVLVVAKVEKGKSKKLKSVKELLGITIMERSSFEKNPIDFLEAKGYKEVKKDLIIKLPKYSLFELENGRKRMLASAGELQKGNELALPSKYVNFLYLASHYEKLKGSPEDNEQKQLFVEQHKHYLDEIIEQISEFSKRVILADANLDKVLSAYNKHRDKPIREQAENIIHLFTLTNLGAPAAFKYFDTTIDRKRYTSTKEVLDATLIHQSITGLYETRIDLSQLGGDGGGSSGGSGGGGGTVSLQDEHRLFDIPVTTSLPDVWLQDFPQAWAETGGLGRAKCQAPIIIDLKPTAVPVSIKQYPMSLEAHMGIRQHIIKFLELGVLRPCRSPWNTPLLPVKKPGTQDYRPVQDLREINKRTVDIHPTVPNPYNLLSTLKPDYSWYTVLDLKDAFFCLPLAPQSQELFAFEWKDPERGISGQLTWTRLPQGFKNSPTLFNEALHRDLTDFRTQHPEVTLLQYVDDLLLAAPTKKACTQGTRHLLQELGEKGYRASAKKAQICQTKVTYLGYILSEGKRWLTPGRIETVARIPPPRNPREVREFLGKAGFCRLFIPGFAELAAPLYALTKPSTPFTWQTEHQLAFEALKKALLSAPALGLPDTSKPFTLFLDERQGIAKGVLTQKLGPWKRPVAYLSKKLDPVAAGWPPCLRIMAATAMLVKDSAKLTLGQPLTVITPHTLEAIVRQPPDRWITNARLTHYQALLLDTDRVQFGPPVTLNPATLLPVPENQPSPHDCRQVLAETHGTREDLKDQELPDADHTWYTDGSSYLDSGTRRAGAAVVDGHNTIWAQSLPPGTSAQKAELIALTKALELSKGKKANIYTDSRYAFATAHTHGSIYERRGWLTSEGKEIKNKAEIIALLKALFLPQEVAIIHCPGHQKGQDPVAVGNRQADRVARQAAMAEVLTLATEPDNTSHITAGKRTADGSEFEKRTADGSEFESPKKKAKVE

SEQ ID NO: 1994 - protein, 2103 aa, synthetic construct
  source 1..2103: note = Description of Artificial Sequence: Synthetic polypeptide
MPAAKRVKLDGGDKKYSIGLDIGTNSVGWAVITDEYKVPSKKFKVLGNTDRHSIKKNLIGALLFDSGETAEATRLKRTARRRYTRRKNRICYLQEIFSNEMAKVDDSFFHRLEESFLVEEDKKHERHPIFGNIVDEVAYHEKYPTIYHLRKKLVDSTDKADLRLIYLALAHMIKFRGHFLIEGDLNPDNSDVDKLFIQLVQTYNQLFEENPINASGVDAKAILSARLSKSRRLENLIAQLPGEKKNGLFGNLIALSLGLTPNFKSNFDLAEDAKLQLSKDTYDDDLDNLLAQIGDQYADLFLAAKNLSDAILLSDILRVNTEITKAPLSASMIKRYDEHHQDLTLLKALVRQQLPEKYKEIFFDQSKNGYAGYIDGGASQEEFYKFIKPILEKMDGTEELLVKLNREDLLRKQRTFDNGSIPHQIHLGELHAILRRQEDFYPFLKDNREKIEKILTFRIPYYVGPLARGNSRFAWMTRKSEETITPWNFEEVVDKGASAQSFIERMTNFDKNLPNEKVLPKHSLLYEYFTVYNELTKVKYVTEGMRKPAFLSGEQKKAIVDLLFKTNRKVTVKQLKEDYFKKIECFDSVEISGVEDRFNASLGTYHDLLKIIKDKDFLDNEENEDILEDIVLTLTLFEDREMIEERLKTYAHLFDDKVMKQLKRRRYTGWGRLSRKLINGIRDKQSGKTILDFLKSDGFANRNFMQLIHDDSLTFKEDIQKAQVSGQGDSLHEHIANLAGSPAIKKGILQTVKVVDELVKVMGRHKPENIVIEMARENQTTQKGQKNSRERMKRIEEGIKELGSQILKEHPVENTQLQNEKLYLYYLQNGRDMYVDQELDINRLSDYDVDHIVPQSFLKDDSIDNKVLTRSDKARGKSDNVPSEEVVKKMKNYWRQLLNAKLITQRKFDNLTKAERGGLSELDKAGFIKRQLVETRQITKHVAQILDSRMNTKYDENDKLIREVKVITLKSKLVSDFRKDFQFYKVREINNYHHAHDAYLNAVVGTALIKKYPKLESEFVYGDYKVYDVRKMIAKSEQEIGKATAKYFFYSNIMNFFKTEITLANGEIRKRPLIETNGETGEIVWDKGRDFATVRKVLSMPQVNIVKKTEVQTGGFSKESILPKRNSDKLIARKKDWDPKKYGGFDSPTVAYSVLVVAKVEKGKSKKLKSVKELLGITIMERSSFEKNPIDFLEAKGYKEVKKDLIIKLPKYSLFELENGRKRMLASAGELQKGNELALPSKYVNFLYLASHYEKLKGSPEDNEQKQLFVEQHKHYLDEIIEQISEFSKRVILADANLDKVLSAYNKHRDKPIREQAENIIHLFTLTNLGAPAAFKYFDTTIDRKRYTSTKEVLDATLIHQSITGLYETRIDLSQLGGDGGGSSGSSGSSGSSGGTVSLQDEHRLFDIPVTTSLPDVWLQDFPQAWAETGGLGRAKCQAPIIIDLKPTAVPVSIKQYPMSLEAHMGIRQHIIKFLELGVLRPCRSPWNTPLLPVKKPGTQDYRPVQDLREINKRTVDIHPTVPNPYNLLSTLKPDYSWYTVLDLKDAFFCLPLAPQSQELFAFEWKDPERGISGQLTWTRLPQGFKNSPTLFNEALHRDLTDFRTQHPEVTLLQYVDDLLLAAPTKKACTQGTRHLLQELGEKGYRASAKKAQICQTKVTYLGYILSEGKRWLTPGRIETVARIPPPRNPREVREFLGKAGFCRLFIPGFAELAAPLYALTKPSTPFTWQTEHQLAFEALKKALLSAPALGLPDTSKPFTLFLDERQGIAKGVLTQKLGPWKRPVAYLSKKLDPVAAGWPPCLRIMAATAMLVKDSAKLTLGQPLTVITPHTLEAIVRQPPDRWITNARLTHYQALLLDTDRVQFGPPVTLNPATLLPVPENQPSPHDCRQVLAETHGTREDLKDQELPDADHTWYTDGSSYLDSGTRRAGAAVVDGHNTIWAQSLPPGTSAQKAELIALTKALELSKGKKANIYTDSRYAFATAHTHGSIYERRGWLTSEGKEIKNKAEIIALLKALFLPQEVAIIHCPGHQKGQDPVAVGNRQADRVARQAAMAEVLTLATEPDNTSHITAGKRTADGSEFEKRTADGSEFESPKKKAKVE

SEQ ID NO: 1995 - protein, 2099 aa, synthetic construct
  source 1..2099: note = Description of Artificial Sequence: Synthetic polypeptide
MPAAKRVKLDGGDKKYSIGLDIGTNSVGWAVITDEYKVPSKKFKVLGNTDRHSIKKNLIGALLFDSGETAEATRLKRTARRRYTRRKNRICYLQEIFSNEMAKVDDSFFHRLEESFLVEEDKKHERHPIFGNIVDEVAYHEKYPTIYHLRKKLVDSTDKADLRLIYLALAHMIKFRGHFLIEGDLNPDNSDVDKLFIQLVQTYNQLFEENPINASGVDAKAILSARLSKSRRLENLIAQLPGEKKNGLFGNLIALSLGLTPNFKSNFDLAEDAKLQLSKDTYDDDLDNLLAQIGDQYADLFLAAKNLSDAILLSDILRVNTEITKAPLSASMIKRYDEHHQDLTLLKALVRQQLPEKYKEIFFDQSKNGYAGYIDGGASQEEFYKFIKPILEKMDGTEELLVKLNREDLLRKQRTFDNGSIPHQIHLGELHAILRRQEDFYPFLKDNREKIEKILTFRIPYYVGPLARGNSRFAWMTRKSEETITPWNFEEVVDKGASAQSFIERMTNFDKNLPNEKVLPKHSLLYEYFTVYNELTKVKYVTEGMRKPAFLSGEQKKAIVDLLFKTNRKVTVKQLKEDYFKKIECFDSVEISGVEDRFNASLGTYHDLLKIIKDKDFLDNEENEDILEDIVLTLTLFEDREMIEERLKTYAHLFDDKVMKQLKRRRYTGWGRLSRKLINGIRDKQSGKTILDFLKSDGFANRNFMQLIHDDSLTFKEDIQKAQVSGQGDSLHEHIANLAGSPAIKKGILQTVKVVDELVKVMGRHKPENIVIEMARENQTTQKGQKNSRERMKRIEEGIKELGSQILKEHPVENTQLQNEKLYLYYLQNGRDMYVDQELDINRLSDYDVDHIVPQSFLKDDSIDNKVLTRSDKARGKSDNVPSEEVVKKMKNYWRQLLNAKLITQRKFDNLTKAERGGLSELDKAGFIKRQLVETRQITKHVAQILDSRMNTKYDENDKLIREVKVITLKSKLVSDFRKDFQFYKVREINNYHHAHDAYLNAVVGTALIKKYPKLESEFVYGDYKVYDVRKMIAKSEQEIGKATAKYFFYSNIMNFFKTEITLANGEIRKRPLIETNGETGEIVWDKGRDFATVRKVLSMPQVNIVKKTEVQTGGFSKESILPKRNSDKLIARKKDWDPKKYGGFDSPTVAYSVLVVAKVEKGKSKKLKSVKELLGITIMERSSFEKNPIDFLEAKGYKEVKKDLIIKLPKYSLFELENGRKRMLASAGELQKGNELALPSKYVNFLYLASHYEKLKGSPEDNEQKQLFVEQHKHYLDEIIEQISEFSKRVILADANLDKVLSAYNKHRDKPIREQAENIIHLFTLTNLGAPAAFKYFDTTIDRKRYTSTKEVLDATLIHQSITGLYETRIDLSQLGGDGGPAPEAAAKGGTVSLQDEHRLFDIPVTTSLPDVWLQDFPQAWAETGGLGRAKCQAPIIIDLKPTAVPVSIKQYPMSLEAHMGIRQHIIKFLELGVLRPCRSPWNTPLLPVKKPGTQDYRPVQDLREINKRTVDIHPTVPNPYNLLSTLKPDYSWYTVLDLKDAFFCLPLAPQSQELFAFEWKDPERGISGQLTWTRLPQGFKNSPTLFNEALHRDLTDFRTQHPEVTLLQYVDDLLLAAPTKKACTQGTRHLLQELGEKGYRASAKKAQICQTKVTYLGYILSEGKRWLTPGRIETVARIPPPRNPREVREFLGKAGFCRLFIPGFAELAAPLYALTKPSTPFTWQTEHQLAFEALKKALLSAPALGLPDTSKPFTLFLDERQGIAKGVLTQKLGPWKRPVAYLSKKLDPVAAGWPPCLRIMAATAMLVKDSAKLTLGQPLTVITPHTLEAIVRQPPDRWITNARLTHYQALLLDTDRVQFGPPVTLNPATLLPVPENQPSPHDCRQVLAETHGTREDLKDQELPDADHTWYTDGSSYLDSGTRRAGAAVVDGHNTIWAQSLPPGTSAQKAELIALTKALELSKGKKANIYTDSRYAFATAHTHGSIYERRGWLTSEGKEIKNKAEIIALLKALFLPQEVAIIHCPGHQKGQDPVAVGNRQADRVARQAAMAEVLTLATEPDNTSHITAGKRTADGSEFEKRTADGSEFESPKKKAKVE

SEQ ID NO: 1996 - protein, 2097 aa, synthetic construct
  source 1..2097: note = Description of Artificial Sequence: Synthetic polypeptide
MPAAKRVKLDGGDKKYSIGLDIGTNSVGWAVITDEYKVPSKKFKVLGNTDRHSIKKNLIGALLFDSGETAEATRLKRTARRRYTRRKNRICYLQEIFSNEMAKVDDSFFHRLEESFLVEEDKKHERHPIFGNIVDEVAYHEKYPTIYHLRKKLVDSTDKADLRLIYLALAHMIKFRGHFLIEGDLNPDNSDVDKLFIQLVQTYNQLFEENPINASGVDAKAILSARLSKSRRLENLIAQLPGEKKNGLFGNLIALSLGLTPNFKSNFDLAEDAKLQLSKDTYDDDLDNLLAQIGDQYADLFLAAKNLSDAILLSDILRVNTEITKAPLSASMIKRYDEHHQDLTLLKALVRQQLPEKYKEIFFDQSKNGYAGYIDGGASQEEFYKFIKPILEKMDGTEELLVKLNREDLLRKQRTFDNGSIPHQIHLGELHAILRRQEDFYPFLKDNREKIEKILTFRIPYYVGPLARGNSRFAWMTRKSEETITPWNFEEVVDKGASAQSFIERMTNFDKNLPNEKVLPKHSLLYEYFTVYNELTKVKYVTEGMRKPAFLSGEQKKAIVDLLFKTNRKVTVKQLKEDYFKKIECFDSVEISGVEDRFNASLGTYHDLLKIIKDKDFLDNEENEDILEDIVLTLTLFEDREMIEERLKTYAHLFDDKVMKQLKRRRYTGWGRLSRKLINGIRDKQSGKTILDFLKSDGFANRNFMQLIHDDSLTFKEDIQKAQVSGQGDSLHEHIANLAGSPAIKKGILQTVKVVDELVKVMGRHKPENIVIEMARENQTTQKGQKNSRERMKRIEEGIKELGSQILKEHPVENTQLQNEKLYLYYLQNGRDMYVDQELDINRLSDYDVDHIVPQSFLKDDSIDNKVLTRSDKARGKSDNVPSEEVVKKMKNYWRQLLNAKLITQRKFDNLTKAERGGLSELDKAGFIKRQLVETRQITKHVAQILDSRMNTKYDENDKLIREVKVITLKSKLVSDFRKDFQFYKVREINNYHHAHDAYLNAVVGTALIKKYPKLESEFVYGDYKVYDVRKMIAKSEQEIGKATAKYFFYSNIMNFFKTEITLANGEIRKRPLIETNGETGEIVWDKGRDFATVRKVLSMPQVNIVKKTEVQTGGFSKESILPKRNSDKLIARKKDWDPKKYGGFDSPTVAYSVLVVAKVEKGKSKKLKSVKELLGITIMERSSFEKNPIDFLEAKGYKEVKKDLIIKLPKYSLFELENGRKRMLASAGELQKGNELALPSKYVNFLYLASHYEKLKGSPEDNEQKQLFVEQHKHYLDEIIEQISEFSKRVILADANLDKVLSAYNKHRDKPIREQAENIIHLFTLTNLGAPAAFKYFDTTIDRKRYTSTKEVLDATLIHQSITGLYETRIDLSQLGGDGGGGGPAPGGTVSLQDEHRLFDIPVTTSLPDVWLQDFPQAWAETGGLGRAKCQAPIIIDLKPTAVPVSIKQYPMSLEAHMGIRQHIIKFLELGVLRPCRSPWNTPLLPVKKPGTQDYRPVQDLREINKRTVDIHPTVPNPYNLLSTLKPDYSWYTVLDLKDAFFCLPLAPQSQELFAFEWKDPERGISGQLTWTRLPQGFKNSPTLFNEALHRDLTDFRTQHPEVTLLQYVDDLLLAAPTKKACTQGTRHLLQELGEKGYRASAKKAQICQTKVTYLGYILSEGKRWLTPGRIETVARIPPPRNPREVREFLGKAGFCRLFIPGFAELAAPLYALTKPSTPFTWQTEHQLAFEALKKALLSAPALGLPDTSKPFTLFLDERQGIAKGVLTQKLGPWKRPVAYLSKKLDPVAAGWPPCLRIMAATAMLVKDSAKLTLGQPLTVITPHTLEAIVRQPPDRWITNARLTHYQALLLDTDRVQFGPPVTLNPATLLPVPENQPSPHDCRQVLAETHGTREDLKDQELPDADHTWYTDGSSYLDSGTRRAGAAVVDGHNTIWAQSLPPGTSAQKAELIALTKALELSKGKKANIYTDSRYAFATAHTHGSIYERRGWLTSEGKEIKNKAEIIALLKALFLPQEVAIIHCPGHQKGQDPVAVGNRQADRVARQAAMAEVLTLATEPDNTSHITAGKRTADGSEFEKRTADGSEFESPKKKAKVE

SEQ ID NO: 1997 - protein, 2099 aa, synthetic construct
  source 1..2099: note = Description of Artificial Sequence: Synthetic polypeptide
MPAAKRVKLDGGDKKYSIGLDIGTNSVGWAVITDEYKVPSKKFKVLGNTDRHSIKKNLIGALLFDSGETAEATRLKRTARRRYTRRKNRICYLQEIFSNEMAKVDDSFFHRLEESFLVEEDKKHERHPIFGNIVDEVAYHEKYPTIYHLRKKLVDSTDKADLRLIYLALAHMIKFRGHFLIEGDLNPDNSDVDKLFIQLVQTYNQLFEENPINASGVDAKAILSARLSKSRRLENLIAQLPGEKKNGLFGNLIALSLGLTPNFKSNFDLAEDAKLQLSKDTYDDDLDNLLAQIGDQYADLFLAAKNLSDAILLSDILRVNTEITKAPLSASMIKRYDEHHQDLTLLKALVRQQLPEKYKEIFFDQSKNGYAGYIDGGASQEEFYKFIKPILEKMDGTEELLVKLNREDLLRKQRTFDNGSIPHQIHLGELHAILRRQEDFYPFLKDNREKIEKILTFRIPYYVGPLARGNSRFAWMTRKSEETITPWNFEEVVDKGASAQSFIERMTNFDKNLPNEKVLPKHSLLYEYFTVYNELTKVKYVTEGMRKPAFLSGEQKKAIVDLLFKTNRKVTVKQLKEDYFKKIECFDSVEISGVEDRFNASLGTYHDLLKIIKDKDFLDNEENEDILEDIVLTLTLFEDREMIEERLKTYAHLFDDKVMKQLKRRRYTGWGRLSRKLINGIRDKQSGKTILDFLKSDGFANRNFMQLIHDDSLTFKEDIQKAQVSGQGDSLHEHIANLAGSPAIKKGILQTVKVVDELVKVMGRHKPENIVIEMARENQTTQKGQKNSRERMKRIEEGIKELGSQILKEHPVENTQLQNEKLYLYYLQNGRDMYVDQELDINRLSDYDVDHIVPQSFLKDDSIDNKVLTRSDKARGKSDNVPSEEVVKKMKNYWRQLLNAKLITQRKFDNLTKAERGGLSELDKAGFIKRQLVETRQITKHVAQILDSRMNTKYDENDKLIREVKVITLKSKLVSDFRKDFQFYKVREINNYHHAHDAYLNAVVGTALIKKYPKLESEFVYGDYKVYDVRKMIAKSEQEIGKATAKYFFYSNIMNFFKTEITLANGEIRKRPLIETNGETGEIVWDKGRDFATVRKVLSMPQVNIVKKTEVQTGGFSKESILPKRNSDKLIARKKDWDPKKYGGFDSPTVAYSVLVVAKVEKGKSKKLKSVKELLGITIMERSSFEKNPIDFLEAKGYKEVKKDLIIKLPKYSLFELENGRKRMLASAGELQKGNELALPSKYVNFLYLASHYEKLKGSPEDNEQKQLFVEQHKHYLDEIIEQISEFSKRVILADANLDKVLSAYNKHRDKPIREQAENIIHLFTLTNLGAPAAFKYFDTTIDRKRYTSTKEVLDATLIHQSITGLYETRIDLSQLGGDGGGGSEAAAKGGTVSLQDEHRLFDIPVTTSLPDVWLQDFPQAWAETGGLGRAKCQAPIIIDLKPTAVPVSIKQYPMSLEAHMGIRQHIIKFLELGVLRPCRSPWNTPLLPVKKPGTQDYRPVQDLREINKRTVDIHPTVPNPYNLLSTLKPDYSWYTVLDLKDAFFCLPLAPQSQELFAFEWKDPERGISGQLTWTRLPQGFKNSPTLFNEALHRDLTDFRTQHPEVTLLQYVDDLLLAAPTKKACTQGTRHLLQELGEKGYRASAKKAQICQTKVTYLGYILSEGKRWLTPGRIETVARIPPPRNPREVREFLGKAGFCRLFIPGFAELAAPLYALTKPSTPFTWQTEHQLAFEALKKALLSAPALGLPDTSKPFTLFLDERQGIAKGVLTQKLGPWKRPVAYLSKKLDPVAAGWPPCLRIMAATAMLVKDSAKLTLGQPLTVITPHTLEAIVRQPPDRWITNARLTHYQALLLDTDRVQFGPPVTLNPATLLPVPENQPSPHDCRQVLAETHGTREDLKDQELPDADHTWYTDGSSYLDSGTRRAGAAVVDGHNTIWAQSLPPGTSAQKAELIALTKALELSKGKKANIYTDSRYAFATAHTHGSIYERRGWLTSEGKEIKNKAEIIALLKALFLPQEVAIIHCPGHQKGQDPVAVGNRQADRVARQAAMAEVLTLATEPDNTSHITAGKRTADGSEFEKRTADGSEFESPKKKAKVE

SEQ ID NO: 1998 - protein, 2096 aa, synthetic construct
  source 1..2096: note = Description of Artificial Sequence: Synthetic polypeptide
MPAAKRVKLDGGDKKYSIGLDIGTNSVGWAVITDEYKVPSKKFKVLGNTDRHSIKKNLIGALLFDSGETAEATRLKRTARRRYTRRKNRICYLQEIFSNEMAKVDDSFFHRLEESFLVEEDKKHERHPIFGNIVDEVAYHEKYPTIYHLRKKLVDSTDKADLRLIYLALAHMIKFRGHFLIEGDLNPDNSDVDKLFIQLVQTYNQLFEENPINASGVDAKAILSARLSKSRRLENLIAQLPGEKKNGLFGNLIALSLGLTPNFKSNFDLAEDAKLQLSKDTYDDDLDNLLAQIGDQYADLFLAAKNLSDAILLSDILRVNTEITKAPLSASMIKRYDEHHQDLTLLKALVRQQLPEKYKEIFFDQSKNGYAGYIDGGASQEEFYKFIKPILEKMDGTEELLVKLNREDLLRKQRTFDNGSIPHQIHLGELHAILRRQEDFYPFLKDNREKIEKILTFRIPYYVGPLARGNSRFAWMTRKSEETITPWNFEEVVDKGASAQSFIERMTNFDKNLPNEKVLPKHSLLYEYFTVYNELTKVKYVTEGMRKPAFLSGEQKKAIVDLLFKTNRKVTVKQLKEDYFKKIECFDSVEISGVEDRFNASLGTYHDLLKIIKDKDFLDNEENEDILEDIVLTLTLFEDREMIEERLKTYAHLFDDKVMKQLKRRRYTGWGRLSRKLINGIRDKQSGKTILDFLKSDGFANRNFMQLIHDDSLTFKEDIQKAQVSGQGDSLHEHIANLAGSPAIKKGILQTVKVVDELVKVMGRHKPENIVIEMARENQTTQKGQKNSRERMKRIEEGIKELGSQILKEHPVENTQLQNEKLYLYYLQNGRDMYVDQELDINRLSDYDVDHIVPQSFLKDDSIDNKVLTRSDKARGKSDNVPSEEVVKKMKNYWRQLLNAKLITQRKFDNLTKAERGGLSELDKAGFIKRQLVETRQITKHVAQILDSRMNTKYDENDKLIREVKVITLKSKLVSDFRKDFQFYKVREINNYHHAHDAYLNAVVGTALIKKYPKLESEFVYGDYKVYDVRKMIAKSEQEIGKATAKYFFYSNIMNFFKTEITLANGEIRKRPLIETNGETGEIVWDKGRDFATVRKVLSMPQVNIVKKTEVQTGGFSKESILPKRNSDKLIARKKDWDPKKYGGFDSPTVAYSVLVVAKVEKGKSKKLKSVKELLGITIMERSSFEKNPIDFLEAKGYKEVKKDLIIKLPKYSLFELENGRKRMLASAGELQKGNELALPSKYVNFLYLASHYEKLKGSPEDNEQKQLFVEQHKHYLDEIIEQISEFSKRVILADANLDKVLSAYNKHRDKPIREQAENIIHLFTLTNLGAPAAFKYFDTTIDRKRYTSTKEVLDATLIHQSITGLYETRIDLSQLGGDGGGGGGGGGTVSLQDEHRLFDIPVTTSLPDVWLQDFPQAWAETGGLGRAKCQAPIIIDLKPTAVPVSIKQYPMSLEAHMGIRQHIIKFLELGVLRPCRSPWNTPLLPVKKPGTQDYRPVQDLREINKRTVDIHPTVPNPYNLLSTLKPDYSWYTVLDLKDAFFCLPLAPQSQELFAFEWKDPERGISGQLTWTRLPQGFKNSPTLFNEALHRDLTDFRTQHPEVTLLQYVDDLLLAAPTKKACTQGTRHLLQELGEKGYRASAKKAQICQTKVTYLGYILSEGKRWLTPGRIETVARIPPPRNPREVREFLGKAGFCRLFIPGFAELAAPLYALTKPSTPFTWQTEHQLAFEALKKALLSAPALGLPDTSKPFTLFLDERQGIAKGVLTQKLGPWKRPVAYLSKKLDPVAAGWPPCLRIMAATAMLVKDSAKLTLGQPLTVITPHTLEAIVRQPPDRWITNARLTHYQALLLDTDRVQFGPPVTLNPATLLPVPENQPSPHDCRQVLAETHGTREDLKDQELPDADHTWYTDGSSYLDSGTRRAGAAVVDGHNTIWAQSLPPGTSAQKAELIALTKALELSKGKKANIYTDSRYAFATAHTHGSIYERRGWLTSEGKEIKNKAEIIALLKALFLPQEVAIIHCPGHQKGQDPVAVGNRQADRVARQAAMAEVLTLATEPDNTSHITAGKRTADGSEFEKRTADGSEFESPKKKAKVE

SEQ ID NO: 1999 - protein, 2094 aa, synthetic construct
  source 1..2094: note = Description of Artificial Sequence: Synthetic polypeptide
MPAAKRVKLDGGDKKYSIGLDIGTNSVGWAVITDEYKVPSKKFKVLGNTDRHSIKKNLIGALLFDSGETAEATRLKRTARRRYTRRKNRICYLQEIFSNEMAKVDDSFFHRLEESFLVEEDKKHERHPIFGNIVDEVAYHEKYPTIYHLRKKLVDSTDKADLRLIYLALAHMIKFRGHFLIEGDLNPDNSDVDKLFIQLVQTYNQLFEENPINASGVDAKAILSARLSKSRRLENLIAQLPGEKKNGLFGNLIALSLGLTPNFKSNFDLAEDAKLQLSKDTYDDDLDNLLAQIGDQYADLFLAAKNLSDAILLSDILRVNTEITKAPLSASMIKRYDEHHQDLTLLKALVRQQLPEKYKEIFFDQSKNGYAGYIDGGASQEEFYKFIKPILEKMDGTEELLVKLNREDLLRKQRTFDNGSIPHQIHLGELHAILRRQEDFYPFLKDNREKIEKILTFRIPYYVGPLARGNSRFAWMTRKSEETITPWNFEEVVDKGASAQSFIERMTNFDKNLPNEKVLPKHSLLYEYFTVYNELTKVKYVTEGMRKPAFLSGEQKKAIVDLLFKTNRKVTVKQLKEDYFKKIECFDSVEISGVEDRFNASLGTYHDLLKIIKDKDFLDNEENEDILEDIVLTLTLFEDREMIEERLKTYAHLFDDKVMKQLKRRRYTGWGRLSRKLINGIRDKQSGKTILDFLKSDGFANRNFMQLIHDDSLTFKEDIQKAQVSGQGDSLHEHIANLAGSPAIKKGILQTVKVVDELVKVMGRHKPENIVIEMARENQTTQKGQKNSRERMKRIEEGIKELGSQILKEHPVENTQLQNEKLYLYYLQNGRDMYVDQELDINRLSDYDVDHIVPQSFLKDDSIDNKVLTRSDKARGKSDNVPSEEVVKKMKNYWRQLLNAKLITQRKFDNLTKAERGGLSELDKAGFIKRQLVETRQITKHVAQILDSRMNTKYDENDKLIREVKVITLKSKLVSDFRKDFQFYKVREINNYHHAHDAYLNAVVGTALIKKYPKLESEFVYGDYKVYDVRKMIAKSEQEIGKATAKYFFYSNIMNFFKTEITLANGEIRKRPLIETNGETGEIVWDKGRDFATVRKVLSMPQVNIVKKTEVQTGGFSKESILPKRNSDKLIARKKDWDPKKYGGFDSPTVAYSVLVVAKVEKGKSKKLKSVKELLGITIMERSSFEKNPIDFLEAKGYKEVKKDLIIKLPKYSLFELENGRKRMLASAGELQKGNELALPSKYVNFLYLASHYEKLKGSPEDNEQKQLFVEQHKHYLDEIIEQISEFSKRVILADANLDKVLSAYNKHRDKPIREQAENIIHLFTLTNLGAPAAFKYFDTTIDRKRYTSTKEVLDATLIHQSITGLYETRIDLSQLGGDGGGGSGGTVSLQDEHRLFDIPVTTSLPDVWLQDFPQAWAETGGLGRAKCQAPIIIDLKPTAVPVSIKQYPMSLEAHMGIRQHIIKFLELGVLRPCRSPWNTPLLPVKKPGTQDYRPVQDLREINKRTVDIHPTVPNPYNLLSTLKPDYSWYTVLDLKDAFFCLPLAPQSQELFAFEWKDPERGISGQLTWTRLPQGFKNSPTLFNEALHRDLTDFRTQHPEVTLLQYVDDLLLAAPTKKACTQGTRHLLQELGEKGYRASAKKAQICQTKVTYLGYILSEGKRWLTPGRIETVARIPPPRNPREVREFLGKAGFCRLFIPGFAELAAPLYALTKPSTPFTWQTEHQLAFEALKKALLSAPALGLPDTSKPFTLFLDERQGIAKGVLTQKLGPWKRPVAYLSKKLDPVAAGWPPCLRIMAATAMLVKDSAKLTLGQPLTVITPHTLEAIVRQPPDRWITNARLTHYQALLLDTDRVQFGPPVTLNPATLLPVPENQPSPHDCRQVLAETHGTREDLKDQELPDADHTWYTDGSSYLDSGTRRAGAAVVDGHNTIWAQSLPPGTSAQKAELIALTKALELSKGKKANIYTDSRYAFATAHTHGSIYERRGWLTSEGKEIKNKAEIIALLKALFLPQEVAIIHCPGHQKGQDPVAVGNRQADRVARQAAMAEVLTLATEPDNTSHITAGKRTADGSEFEKRTADGSEFESPKKKAKVE

SEQ ID NO: 2000 - protein, 2121 aa, synthetic construct
  source 1..2121: note = Description of Artificial Sequence: Synthetic polypeptide
MPAAKRVKLDGGDKKYSIGLDIGTNSVGWAVITDEYKVPSKKFKVLGNTDRHSIKKNLIGALLFDSGETAEATRLKRTARRRYTRRKNRICYLQEIFSNEMAKVDDSFFHRLEESFLVEEDKKHERHPIFGNIVDEVAYHEKYPTIYHLRKKLVDSTDKADLRLIYLALAHMIKFRGHFLIEGDLNPDNSDVDKLFIQLVQTYNQLFEENPINASGVDAKAILSARLSKSRRLENLIAQLPGEKKNGLFGNLIALSLGLTPNFKSNFDLAEDAKLQLSKDTYDDDLDNLLAQIGDQYADLFLAAKNLSDAILLSDILRVNTEITKAPLSASMIKRYDEHHQDLTLLKALVRQQLPEKYKEIFFDQSKNGYAGYIDGGASQEEFYKFIKPILEKMDGTEELLVKLNREDLLRKQRTFDNGSIPHQIHLGELHAILRRQEDFYPFLKDNREKIEKILTFRIPYYVGPLARGNSRFAWMTRKSEETITPWNFEEVVDKGASAQSFIERMTNFDKNLPNEKVLPKHSLLYEYFTVYNELTKVKYVTEGMRKPAFLSGEQKKAIVDLLFKTNRKVTVKQLKEDYFKKIECFDSVEISGVEDRFNASLGTYHDLLKIIKDKDFLDNEENEDILEDIVLTLTLFEDREMIEERLKTYAHLFDDKVMKQLKRRRYTGWGRLSRKLINGIRDKQSGKTILDFLKSDGFANRNFMQLIHDDSLTFKEDIQKAQVSGQGDSLHEHIANLAGSPAIKKGILQTVKVVDELVKVMGRHKPENIVIEMARENQTTQKGQKNSRERMKRIEEGIKELGSQILKEHPVENTQLQNEKLYLYYLQNGRDMYVDQELDINRLSDYDVDHIVPQSFLKDDSIDNKVLTRSDKARGKSDNVPSEEVVKKMKNYWRQLLNAKLITQRKFDNLTKAERGGLSELDKAGFIKRQLVETRQITKHVAQILDSRMNTKYDENDKLIREVKVITLKSKLVSDFRKDFQFYKVREINNYHHAHDAYLNAVVGTALIKKYPKLESEFVYGDYKVYDVRKMIAKSEQEIGKATAKYFFYSNIMNFFKTEITLANGEIRKRPLIETNGETGEIVWDKGRDFATVRKVLSMPQVNIVKKTEVQTGGFSKESILPKRNSDKLIARKKDWDPKKYGGFDSPTVAYSVLVVAKVEKGKSKKLKSVKELLGITIMERSSFEKNPIDFLEAKGYKEVKKDLIIKLPKYSLFELENGRKRMLASAGELQKGNELALPSKYVNFLYLASHYEKLKGSPEDNEQKQLFVEQHKHYLDEIIEQISEFSKRVILADANLDKVLSAYNKHRDKPIREQAENIIHLFTLTNLGAPAAFKYFDTTIDRKRYTSTKEVLDATLIHQSITGLYETRIDLSQLGGDGGEAAAKEAAAKEAAAKEAAAKEAAAKEAAAKGGTVSLQDEHRLFDIPVTTSLPDVWLQDFPQAWAETGGLGRAKCQAPIIIDLKPTAVPVSIKQYPMSLEAHMGIRQHIIKFLELGVLRPCRSPWNTPLLPVKKPGTQDYRPVQDLREINKRTVDIHPTVPNPYNLLSTLKPDYSWYTVLDLKDAFFCLPLAPQSQELFAFEWKDPERGISGQLTWTRLPQGFKNSPTLFNEALHRDLTDFRTQHPEVTLLQYVDDLLLAAPTKKACTQGTRHLLQELGEKGYRASAKKAQICQTKVTYLGYILSEGKRWLTPGRIETVARIPPPRNPREVREFLGKAGFCRLFIPGFAELAAPLYALTKPSTPFTWQTEHQLAFEALKKALLSAPALGLPDTSKPFTLFLDERQGIAKGVLTQKLGPWKRPVAYLSKKLDPVAAGWPPCLRIMAATAMLVKDSAKLTLGQPLTVITPHTLEAIVRQPPDRWITNARLTHYQALLLDTDRVQFGPPVTLNPATLLPVPENQPSPHDCRQVLAETHGTREDLKDQELPDADHTWYTDGSSYLDSGTRRAGAAVVDGHNTIWAQSLPPGTSAQKAELIALTKALELSKGKKANIYTDSRYAFATAHTHGSIYERRGWLTSEGKEIKNKAEIIALLKALFLPQEVAIIHCPGHQKGQDPVAVGNRQADRVARQAAMAEVLTLATEPDNTSHITAGKRTADGSEFEKRTADGSEFESPKKKAKVE

SEQ ID NO: 2001 - protein, 2102 aa, synthetic construct
  source 1..2102: note = Description of Artificial Sequence: Synthetic polypeptide
MPAAKRVKLDGGDKKYSIGLDIGTNSVGWAVITDEYKVPSKKFKVLGNTDRHSIKKNLIGALLFDSGETAEATRLKRTARRRYTRRKNRICYLQEIFSNEMAKVDDSFFHRLEESFLVEEDKKHERHPIFGNIVDEVAYHEKYPTIYHLRKKLVDSTDKADLRLIYLALAHMIKFRGHFLIEGDLNPDNSDVDKLFIQLVQTYNQLFEENPINASGVDAKAILSARLSKSRRLENLIAQLPGEKKNGLFGNLIALSLGLTPNFKSNFDLAEDAKLQLSKDTYDDDLDNLLAQIGDQYADLFLAAKNLSDAILLSDILRVNTEITKAPLSASMIKRYDEHHQDLTLLKALVRQQLPEKYKEIFFDQSKNGYAGYIDGGASQEEFYKFIKPILEKMDGTEELLVKLNREDLLRKQRTFDNGSIPHQIHLGELHAILRRQEDFYPFLKDNREKIEKILTFRIPYYVGPLARGNSRFAWMTRKSEETITPWNFEEVVDKGASAQSFIERMTNFDKNLPNEKVLPKHSLLYEYFTVYNELTKVKYVTEGMRKPAFLSGEQKKAIVDLLFKTNRKVTVKQLKEDYFKKIECFDSVEISGVEDRFNASLGTYHDLLKIIKDKDFLDNEENEDILEDIVLTLTLFEDREMIEERLKTYAHLFDDKVMKQLKRRRYTGWGRLSRKLINGIRDKQSGKTILDFLKSDGFANRNFMQLIHDDSLTFKEDIQKAQVSGQGDSLHEHIANLAGSPAIKKGILQTVKVVDELVKVMGRHKPENIVIEMARENQTTQKGQKNSRERMKRIEEGIKELGSQILKEHPVENTQLQNEKLYLYYLQNGRDMYVDQELDINRLSDYDVDHIVPQSFLKDDSIDNKVLTRSDKARGKSDNVPSEEVVKKMKNYWRQLLNAKLITQRKFDNLTKAERGGLSELDKAGFIKRQLVETRQITKHVAQILDSRMNTKYDENDKLIREVKVITLKSKLVSDFRKDFQFYKVREINNYHHAHDAYLNAVVGTALIKKYPKLESEFVYGDYKVYDVRKMIAKSEQEIGKATAKYFFYSNIMNFFKTEITLANGEIRKRPLIETNGETGEIVWDKGRDFATVRKVLSMPQVNIVKKTEVQTGGFSKESILPKRNSDKLIARKKDWDPKKYGGFDSPTVAYSVLVVAKVEKGKSKKLKSVKELLGITIMERSSFEKNPIDFLEAKGYKEVKKDLIIKLPKYSLFELENGRKRMLASAGELQKGNELALPSKYVNFLYLASHYEKLKGSPEDNEQKQLFVEQHKHYLDEIIEQISEFSKRVILADANLDKVLSAYNKHRDKPIREQAENIIHLFTLTNLGAPAAFKYFDTTIDRKRYTSTKEVLDATLIHQSITGLYETRIDLSQLGGDGGEAAAKGGSGSSGGTVSLQDEHRLFDIPVTTSLPDVWLQDFPQAWAETGGLGRAKCQAPIIIDLKPTAVPVSIKQYPMSLEAHMGIRQHIIKFLELGVLRPCRSPWNTPLLPVKKPGTQDYRPVQDLREINKRTVDIHPTVPNPYNLLSTLKPDYSWYTVLDLKDAFFCLPLAPQSQELFAFEWKDPERGISGQLTWTRLPQGFKNSPTLFNEALHRDLTDFRTQHPEVTLLQYVDDLLLAAPTKKACTQGTRHLLQELGEKGYRASAKKAQICQTKVTYLGYILSEGKRWLTPGRIETVARIPPPRNPREVREFLGKAGFCRLFIPGFAELAAPLYALTKPSTPFTWQTEHQLAFEALKKALLSAPALGLPDTSKPFTLFLDERQGIAKGVLTQKLGPWKRPVAYLSKKLDPVAAGWPPCLRIMAATAMLVKDSAKLTLGQPLTVITPHTLEAIVRQPPDRWITNARLTHYQALLLDTDRVQFGPPVTLNPATLLPVPENQPSPHDCRQVLAETHGTREDLKDQELPDADHTWYTDGSSYLDSGTRRAGAAVVDGHNTIWAQSLPPGTSAQKAELIALTKALELSKGKKANIYTDSRYAFATAHTHGSIYERRGWLTSEGKEIKNKAEIIALLKALFLPQEVAIIHCPGHQKGQDPVAVGNRQADRVARQAAMAEVLTLATEPDNTSHITAGKRTADGSEFEKRTADGSEFESPKKKAKVE

SEQ ID NO: 2002 - protein, 2100 aa, synthetic construct
  source 1..2100: note = Description of Artificial Sequence: Synthetic polypeptide
MPAAKRVKLDGGDKKYSIGLDIGTNSVGWAVITDEYKVPSKKFKVLGNTDRHSIKKNLIGALLFDSGETAEATRLKRTARRRYTRRKNRICYLQEIFSNEMAKVDDSFFHRLEESFLVEEDKKHERHPIFGNIVDEVAYHEKYPTIYHLRKKLVDSTDKADLRLIYLALAHMIKFRGHFLIEGDLNPDNSDVDKLFIQLVQTYNQLFEENPINASGVDAKAILSARLSKSRRLENLIAQLPGEKKNGLFGNLIALSLGLTPNFKSNFDLAEDAKLQLSKDTYDDDLDNLLAQIGDQYADLFLAAKNLSDAILLSDILRVNTEITKAPLSASMIKRYDEHHQDLTLLKALVRQQLPEKYKEIFFDQSKNGYAGYIDGGASQEEFYKFIKPILEKMDGTEELLVKLNREDLLRKQRTFDNGSIPHQIHLGELHAILRRQEDFYPFLKDNREKIEKILTFRIPYYVGPLARGNSRFAWMTRKSEETITPWNFEEVVDKGASAQSFIERMTNFDKNLPNEKVLPKHSLLYEYFTVYNELTKVKYVTEGMRKPAFLSGEQKKAIVDLLFKTNRKVTVKQLKEDYFKKIECFDSVEISGVEDRFNASLGTYHDLLKIIKDKDFLDNEENEDILEDIVLTLTLFEDREMIEERLKTYAHLFDDKVMKQLKRRRYTGWGRLSRKLINGIRDKQSGKTILDFLKSDGFANRNFMQLIHDDSLTFKEDIQKAQVSGQGDSLHEHIANLAGSPAIKKGILQTVKVVDELVKVMGRHKPENIVIEMARENQTTQKGQKNSRERMKRIEEGIKELGSQILKEHPVENTQLQNEKLYLYYLQNGRDMYVDQELDINRLSDYDVDHIVPQSFLKDDSIDNKVLTRSDKARGKSDNVPSEEVVKKMKNYWRQLLNAKLITQRKFDNLTKAERGGLSELDKAGFIKRQLVETRQITKHVAQILDSRMNTKYDENDKLIREVKVITLKSKLVSDFRKDFQFYKVREINNYHHAHDAYLNAVVGTALIKKYPKLESEFVYGDYKVYDVRKMIAKSEQEIGKATAKYFFYSNIMNFFKTEITLANGEIRKRPLIETNGETGEIVWDKGRDFATVRKVLSMPQVNIVKKTEVQTGGFSKESILPKRNSDKLIARKKDWDPKKYGGFDSPTVAYSVLVVAKVEKGKSKKLKSVKELLGITIMERSSFEKNPIDFLEAKGYKEVKKDLIIKLPKYSLFELENGRKRMLASAGELQKGNELALPSKYVNFLYLASHYEKLKGSPEDNEQKQLFVEQHKHYLDEIIEQISEFSKRVILADANLDKVLSAYNKHRDKPIREQAENIIHLFTLTNLGAPAAFKYFDTTIDRKRYTSTKEVLDATLIHQSITGLYETRIDLSQLGGDGGGGGGSSPAPGGTVSLQDEHRLFDIPVTTSLPDVWLQDFPQAWAETGGLGRAKCQAPIIIDLKPTAVPVSIKQYPMSLEAHMGIRQHIIKFLELGVLRPCRSPWNTPLLPVKKPGTQDYRPVQDLREINKRTVDIHPTVPNPYNLLSTLKPDYSWYTVLDLKDAFFCLPLAPQSQELFAFEWKDPERGISGQLTWTRLPQGFKNSPTLFNEALHRDLTDFRTQHPEVTLLQYVDDLLLAAPTKKACTQGTRHLLQELGEKGYRASAKKAQICQTKVTYLGYILSEGKRWLTPGRIETVARIPPPRNPREVREFLGKAGFCRLFIPGFAELAAPLYALTKPSTPFTWQTEHQLAFEALKKALLSAPALGLPDTSKPFTLFLDERQGIAKGVLTQKLGPWKRPVAYLSKKLDPVAAGWPPCLRIMAATAMLVKDSAKLTLGQPLTVITPHTLEAIVRQPPDRWITNARLTHYQALLLDTDRVQFGPPVTLNPATLLPVPENQPSPHDCRQVLAETHGTREDLKDQELPDADHTWYTDGSSYLDSGTRRAGAAVVDGHNTIWAQSLPPGTSAQKAELIALTKALELSKGKKANIYTDSRYAFATAHTHGSIYERRGWLTSEGKEIKNKAEIIALLKALFLPQEVAIIHCPGHQKGQDPVAVGNRQADRVARQAAMAEVLTLATEPDNTSHITAGKRTADGSEFEKRTADGSEFESPKKKAKVE

SEQ ID NO: 2003 - protein, 2102 aa, synthetic construct
  source 1..2102: note = Description of Artificial Sequence: Synthetic polypeptide
MPAAKRVKLDGGDKKYSIGLDIGTNSVGWAVITDEYKVPSKKFKVLGNTDRHSIKKNLIGALLFDSGETAEATRLKRTARRRYTRRKNRICYLQEIFSNEMAKVDDSFFHRLEESFLVEEDKKHERHPIFGNIVDEVAYHEKYPTIYHLRKKLVDSTDKADLRLIYLALAHMIKFRGHFLIEGDLNPDNSDVDKLFIQLVQTYNQLFEENPINASGVDAKAILSARLSKSRRLENLIAQLPGEKKNGLFGNLIALSLGLTPNFKSNFDLAEDAKLQLSKDTYDDDLDNLLAQIGDQYADLFLAAKNLSDAILLSDILRVNTEITKAPLSASMIKRYDEHHQDLTLLKALVRQQLPEKYKEIFFDQSKNGYAGYIDGGASQEEFYKFIKPILEKMDGTEELLVKLNREDLLRKQRTFDNGSIPHQIHLGELHAILRRQEDFYPFLKDNREKIEKILTFRIPYYVGPLARGNSRFAWMTRKSEETITPWNFEEVVDKGASAQSFIERMTNFDKNLPNEKVLPKHSLLYEYFTVYNELTKVKYVTEGMRKPAFLSGEQKKAIVDLLFKTNRKVTVKQLKEDYFKKIECFDSVEISGVEDRFNASLGTYHDLLKIIKDKDFLDNEENEDILEDIVLTLTLFEDREMIEERLKTYAHLFDDKVMKQLKRRRYTGWGRLSRKLINGIRDKQSGKTILDFLKSDGFANRNFMQLIHDDSLTFKEDIQKAQVSGQGDSLHEHIANLAGSPAIKKGILQTVKVVDELVKVMGRHKPENIVIEMARENQTTQKGQKNSRERMKRIEEGIKELGSQILKEHPVENTQLQNEKLYLYYLQNGRDMYVDQELDINRLSDYDVDHIVPQSFLKDDSIDNKVLTRSDKARGKSDNVPSEEVVKKMKNYWRQLLNAKLITQRKFDNLTKAERGGLSELDKAGFIKRQLVETRQITKHVAQILDSRMNTKYDENDKLIREVKVITLKSKLVSDFRKDFQFYKVREINNYHHAHDAYLNAVVGTALIKKYPKLESEFVYGDYKVYDVRKMIAKSEQEIGKATAKYFFYSNIMNFFKTEITLANGEIRKRPLIETNGETGEIVWDKGRDFATVRKVLSMPQVNIVKKTEVQTGGFSKESILPKRNSDKLIARKKDWDPKKYGGFDSPTVAYSVLVVAKVEKGKSKKLKSVKELLGITIMERSSFEKNPIDFLEAKGYKEVKKDLIIKLPKYSLFELENGRKRMLASAGELQKGNELALPSKYVNFLYLASHYEKLKGSPEDNEQKQLFVEQHKHYLDEIIEQISEFSKRVILADANLDKVLSAYNKHRDKPIREQAENIIHLFTLTNLGAPAAFKYFDTTIDRKRYTSTKEVLDATLIHQSITGLYETRIDLSQLGGDGGGGSGGGEAAAKGGTVSLQDEHRLFDIPVTTSLPDVWLQDFPQAWAETGGLGRAKCQAPIIIDLKPTAVPVSIKQYPMSLEAHMGIRQHIIKFLELGVLRPCRSPWNTPLLPVKKPGTQDYRPVQDLREINKRTVDIHPTVPNPYNLLSTLKPDYSWYTVLDLKDAFFCLPLAPQSQELFAFEWKDPERGISGQLTWTRLPQGFKNSPTLFNEALHRDLTDFRTQHPEVTLLQYVDDLLLAAPTKKACTQGTRHLLQELGEKGYRASAKKAQICQTKVTYLGYILSEGKRWLTPGRIETVARIPPPRNPREVREFLGKAGFCRLFIPGFAELAAPLYALTKPSTPFTWQTEHQLAFEALKKALLSAPALGLPDTSKPFTLFLDERQGIAKGVLTQKLGPWKRPVAYLSKKLDPVAAGWPPCLRIMAATAMLVKDSAKLTLGQPLTVITPHTLEAIVRQPPDRWITNARLTHYQALLLDTDRVQFGPPVTLNPATLLPVPENQPSPHDCRQVLAETHGTREDLKDQELPDADHTWYTDGSSYLDSGTRRAGAAVVDGHNTIWAQSLPPGTSAQKAELIALTKALELSKGKKANIYTDSRYAFATAHTHGSIYERRGWLTSEGKEIKNKAEIIALLKALFLPQEVAIIHCPGHQKGQDPVAVGNRQADRVARQAAMAEVLTLATEPDNTSHITAGKRTADGSEFEKRTADGSEFESPKKKAKVE

SEQ ID NO: 2004 - protein, 2099 aa, synthetic construct
  source 1..2099: note = Description of Artificial Sequence: Synthetic polypeptide
MPAAKRVKLDGGDKKYSIGLDIGTNSVGWAVITDEYKVPSKKFKVLGNTDRHSIKKNLIGALLFDSGETAEATRLKRTARRRYTRRKNRICYLQEIFSNEMAKVDDSFFHRLEESFLVEEDKKHERHPIFGNIVDEVAYHEKYPTIYHLRKKLVDSTDKADLRLIYLALAHMIKFRGHFLIEGDLNPDNSDVDKLFIQLVQTYNQLFEENPINASGVDAKAILSARLSKSRRLENLIAQLPGEKKNGLFGNLIALSLGLTPNFKSNFDLAEDAKLQLSKDTYDDDLDNLLAQIGDQYADLFLAAKNLSDAILLSDILRVNTEITKAPLSASMIKRYDEHHQDLTLLKALVRQQLPEKYKEIFFDQSKNGYAGYIDGGASQEEFYKFIKPILEKMDGTEELLVKLNREDLLRKQRTFDNGSIPHQIHLGELHAILRRQEDFYPFLKDNREKIEKILTFRIPYYVGPLARGNSRFAWMTRKSEETITPWNFEEVVDKGASAQSFIERMTNFDKNLPNEKVLPKHSLLYEYFTVYNELTKVKYVTEGMRKPAFLSGEQKKAIVDLLFKTNRKVTVKQLKEDYFKKIECFDSVEISGVEDRFNASLGTYHDLLKIIKDKDFLDNEENEDILEDIVLTLTLFEDREMIEERLKTYAHLFDDKVMKQLKRRRYTGWGRLSRKLINGIRDKQSGKTILDFLKSDGFANRNFMQLIHDDSLTFKEDIQKAQVSGQGDSLHEHIANLAGSPAIKKGILQTVKVVDELVKVMGRHKPENIVIEMARENQTTQKGQKNSRERMKRIEEGIKELGSQILKEHPVENTQLQNEKLYLYYLQNGRDMYVDQELDINRLSDYDVDHIVPQSFLKDDSIDNKVLTRSDKARGKSDNVPSEEVVKKMKNYWRQLLNAKLITQRKFDNLTKAERGGLSELDKAGFIKRQLVETRQITKHVAQILDSRMNTKYDENDKLIREVKVITLKSKLVSDFRKDFQFYKVREINNYHHAHDAYLNAVVGTALIKKYPKLESEFVYGDYKVYDVRKMIAKSEQEIGKATAKYFFYSNIMNFFKTEITLANGEIRKRPLIETNGETGEIVWDKGRDFATVRKVLSMPQVNIVKKTEVQTGGFSKESILPKRNSDKLIARKKDWDPKKYGGFDSPTVAYSVLVVAKVEKGKSKKLKSVKELLGITIMERSSFEKNPIDFLEAKGYKEVKKDLIIKLPKYSLFELENGRKRMLASAGELQKGNELALPSKYVNFLYLASHYEKLKGSPEDNEQKQLFVEQHKHYLDEIIEQISEFSKRVILADANLDKVLSAYNKHRDKPIREQAENIIHLFTLTNLGAPAAFKYFDTTIDRKRYTSTKEVLDATLIHQSITGLYETRIDLSQLGGDGGGGGEAAAKGGTVSLQDEHRLFDIPVTTSLPDVWLQDFPQAWAETGGLGRAKCQAPIIIDLKPTAVPVSIKQYPMSLEAHMGIRQHIIKFLELGVLRPCRSPWNTPLLPVKKPGTQDYRPVQDLREINKRTVDIHPTVPNPYNLLSTLKPDYSWYTVLDLKDAFFCLPLAPQSQELFAFEWKDPERGISGQLTWTRLPQGFKNSPTLFNEALHRDLTDFRTQHPEVTLLQYVDDLLLAAPTKKACTQGTRHLLQELGEKGYRASAKKAQICQTKVTYLGYILSEGKRWLTPGRIETVARIPPPRNPREVREFLGKAGFCRLFIPGFAELAAPLYALTKPSTPFTWQTEHQLAFEALKKALLSAPALGLPDTSKPFTLFLDERQGIAKGVLTQKLGPWKRPVAYLSKKLDPVAAGWPPCLRIMAATAMLVKDSAKLTLGQPLTVITPHTLEAIVRQPPDRWITNARLTHYQALLLDTDRVQFGPPVTLNPATLLPVPENQPSPHDCRQVLAETHGTREDLKDQELPDADHTWYTDGSSYLDSGTRRAGAAVVDGHNTIWAQSLPPGTSAQKAELIALTKALELSKGKKANIYTDSRYAFATAHTHGSIYERRGWLTSEGKEIKNKAEIIALLKALFLPQEVAIIHCPGHQKGQDPVAVGNRQADRVARQAAMAEVLTLATEPDNTSHITAGKRTADGSEFEKRTADGSEFESPKKKAKVE

SEQ ID NO: 2005 - protein, 2103 aa, synthetic construct
  source 1..2103: note = Description of Artificial Sequence: Synthetic polypeptide
MPAAKRVKLDGGDKKYSIGLDIGTNSVGWAVITDEYKVPSKKFKVLGNTDRHSIKKNLIGALLFDSGETAEATRLKRTARRRYTRRKNRICYLQEIFSNEMAKVDDSFFHRLEESFLVEEDKKHERHPIFGNIVDEVAYHEKYPTIYHLRKKLVDSTDKADLRLIYLALAHMIKFRGHFLIEGDLNPDNSDVDKLFIQLVQTYNQLFEENPINASGVDAKAILSARLSKSRRLENLIAQLPGEKKNGLFGNLIALSLGLTPNFKSNFDLAEDAKLQLSKDTYDDDLDNLLAQIGDQYADLFLAAKNLSDAILLSDILRVNTEITKAPLSASMIKRYDEHHQDLTLLKALVRQQLPEKYKEIFFDQSKNGYAGYIDGGASQEEFYKFIKPILEKMDGTEELLVKLNREDLLRKQRTFDNGSIPHQIHLGELHAILRRQEDFYPFLKDNREKIEKILTFRIPYYVGPLARGNSRFAWMTRKSEETITPWNFEEVVDKGASAQSFIERMTNFDKNLPNEKVLPKHSLLYEYFTVYNELTKVKYVTEGMRKPAFLSGEQKKAIVDLLFKTNRKVTVKQLKEDYFKKIECFDSVEISGVEDRFNASLGTYHDLLKIIKDKDFLDNEENEDILEDIVLTLTLFEDREMIEERLKTYAHLFDDKVMKQLKRRRYTGWGRLSRKLINGIRDKQSGKTILDFLKSDGFANRNFMQLIHDDSLTFKEDIQKAQVSGQGDSLHEHIANLAGSPAIKKGILQTVKVVDELVKVMGRHKPENIVIEMARENQTTQKGQKNSRERMKRIEEGIKELGSQILKEHPVENTQLQNEKLYLYYLQNGRDMYVDQELDINRLSDYDVDHIVPQSFLKDDSIDNKVLTRSDKARGKSDNVPSEEVVKKMKNYWRQLLNAKLITQRKFDNLTKAERGGLSELDKAGFIKRQLVETRQITKHVAQILDSRMNTKYDENDKLIREVKVITLKSKLVSDFRKDFQFYKVREINNYHHAHDAYLNAVVGTALIKKYPKLESEFVYGDYKVYDVRKMIAKSEQEIGKATAKYFFYSNIMNFFKTEITLANGEIRKRPLIETNGETGEIVWDKGRDFATVRKVLSMPQVNIVKKTEVQTGGFSKESILPKRNSDKLIARKKDWDPKKYGGFDSPTVAYSVLVVAKVEKGKSKKLKSVKELLGITIMERSSFEKNPIDFLEAKGYKEVKKDLIIKLPKYSLFELENGRKRMLASAGELQKGNELALPSKYVNFLYLASHYEKLKGSPEDNEQKQLFVEQHKHYLDEIIEQISEFSKRVILADANLDKVLSAYNKHRDKPIREQAENIIHLFTLTNLGAPAAFKYFDTTIDRKRYTSTKEVLDATLIHQSITGLYETRIDLSQLGGDGGGSAGSAAGSGEFGGTVSLQDEHRLFDIPVTTSLPDVWLQDFPQAWAETGGLGRAKCQAPIIIDLKPTAVPVSIKQYPMSLEAHMGIRQHIIKFLELGVLRPCRSPWNTPLLPVKKPGTQDYRPVQDLREINKRTVDIHPTVPNPYNLLSTLKPDYSWYTVLDLKDAFFCLPLAPQSQELFAFEWKDPERGISGQLTWTRLPQGFKNSPTLFNEALHRDLTDFRTQHPEVTLLQYVDDLLLAAPTKKACTQGTRHLLQELGEKGYRASAKKAQICQTKVTYLGYILSEGKRWLTPGRIETVARIPPPRNPREVREFLGKAGFCRLFIPGFAELAAPLYALTKPSTPFTWQTEHQLAFEALKKALLSAPALGLPDTSKPFTLFLDERQGIAKGVLTQKLGPWKRPVAYLSKKLDPVAAGWPPCLRIMAATAMLVKDSAKLTLGQPLTVITPHTLEAIVRQPPDRWITNARLTHYQALLLDTDRVQFGPPVTLNPATLLPVPENQPSPHDCRQVLAETHGTREDLKDQELPDADHTWYTDGSSYLDSGTRRAGAAVVDGHNTIWAQSLPPGTSAQKAELIALTKALELSKGKKANIYTDSRYAFATAHTHGSIYERRGWLTSEGKEIKNKAEIIALLKALFLPQEVAIIHCPGHQKGQDPVAVGNRQADRVARQAAMAEVLTLATEPDNTSHITAGKRTADGSEFEKRTADGSEFESPKKKAKVE

SEQ ID NO: 2006 - protein, 2096 aa, synthetic construct
  source 1..2096: note = Description of Artificial Sequence: Synthetic polypeptide
MPAAKRVKLDGGDKKYSIGLDIGTNSVGWAVITDEYKVPSKKFKVLGNTDRHSIKKNLIGALLFDSGETAEATRLKRTARRRYTRRKNRICYLQEIFSNEMAKVDDSFFHRLEESFLVEEDKKHERHPIFGNIVDEVAYHEKYPTIYHLRKKLVDSTDKADLRLIYLALAHMIKFRGHFLIEGDLNPDNSDVDKLFIQLVQTYNQLFEENPINASGVDAKAILSARLSKSRRLENLIAQLPGEKKNGLFGNLIALSLGLTPNFKSNFDLAEDAKLQLSKDTYDDDLDNLLAQIGDQYADLFLAAKNLSDAILLSDILRVNTEITKAPLSASMIKRYDEHHQDLTLLKALVRQQLPEKYKEIFFDQSKNGYAGYIDGGASQEEFYKFIKPILEKMDGTEELLVKLNREDLLRKQRTFDNGSIPHQIHLGELHAILRRQEDFYPFLKDNREKIEKILTFRIPYYVGPLARGNSRFAWMTRKSEETITPWNFEEVVDKGASAQSFIERMTNFDKNLPNEKVLPKHSLLYEYFTVYNELTKVKYVTEGMRKPAFLSGEQKKAIVDLLFKTNRKVTVKQLKEDYFKKIECFDSVEISGVEDRFNASLGTYHDLLKIIKDKDFLDNEENEDILEDIVLTLTLFEDREMIEERLKTYAHLFDDKVMKQLKRRRYTGWGRLSRKLINGIRDKQSGKTILDFLKSDGFANRNFMQLIHDDSLTFKEDIQKAQVSGQGDSLHEHIANLAGSPAIKKGILQTVKVVDELVKVMGRHKPENIVIEMARENQTTQKGQKNSRERMKRIEEGIKELGSQILKEHPVENTQLQNEKLYLYYLQNGRDMYVDQELDINRLSDYDVDHIVPQSFLKDDSIDNKVLTRSDKARGKSDNVPSEEVVKKMKNYWRQLLNAKLITQRKFDNLTKAERGGLSELDKAGFIKRQLVETRQITKHVAQILDSRMNTKYDENDKLIREVKVITLKSKLVSDFRKDFQFYKVREINNYHHAHDAYLNAVVGTALIKKYPKLESEFVYGDYKVYDVRKMIAKSEQEIGKATAKYFFYSNIMNFFKTEITLANGEIRKRPLIETNGETGEIVWDKGRDFATVRKVLSMPQVNIVKKTEVQTGGFSKESILPKRNSDKLIARKKDWDPKKYGGFDSPTVAYSVLVVAKVEKGKSKKLKSVKELLGITIMERSSFEKNPIDFLEAKGYKEVKKDLIIKLPKYSLFELENGRKRMLASAGELQKGNELALPSKYVNFLYLASHYEKLKGSPEDNEQKQLFVEQHKHYLDEIIEQISEFSKRVILADANLDKVLSAYNKHRDKPIREQAENIIHLFTLTNLGAPAAFKYFDTTIDRKRYTSTKEVLDATLIHQSITGLYETRIDLSQLGGDGGGGGGSGGTVSLQDEHRLFDIPVTTSLPDVWLQDFPQAWAETGGLGRAKCQAPIIIDLKPTAVPVSIKQYPMSLEAHMGIRQHIIKFLELGVLRPCRSPWNTPLLPVKKPGTQDYRPVQDLREINKRTVDIHPTVPNPYNLLSTLKPDYSWYTVLDLKDAFFCLPLAPQSQELFAFEWKDPERGISGQLTWTRLPQGFKNSPTLFNEALHRDLTDFRTQHPEVTLLQYVDDLLLAAPTKKACTQGTRHLLQELGEKGYRASAKKAQICQTKVTYLGYILSEGKRWLTPGRIETVARIPPPRNPREVREFLGKAGFCRLFIPGFAELAAPLYALTKPSTPFTWQTEHQLAFEALKKALLSAPALGLPDTSKPFTLFLDERQGIAKGVLTQKLGPWKRPVAYLSKKLDPVAAGWPPCLRIMAATAMLVKDSAKLTLGQPLTVITPHTLEAIVRQPPDRWITNARLTHYQALLLDTDRVQFGPPVTLNPATLLPVPENQPSPHDCRQVLAETHGTREDLKDQELPDADHTWYTDGSSYLDSGTRRAGAAVVDGHNTIWAQSLPPGTSAQKAELIALTKALELSKGKKANIYTDSRYAFATAHTHGSIYERRGWLTSEGKEIKNKAEIIALLKALFLPQEVAIIHCPGHQKGQDPVAVGNRQADRVARQAAMAEVLTLATEPDNTSHITAGKRTADGSEFEKRTADGSEFESPKKKAKVE

SEQ ID NO: 2007 - protein, 2100 aa, synthetic construct
  source 1..2100: note = Description of Artificial Sequence: Synthetic polypeptide
MPAAKRVKLDGGDKKYSIGLDIGTNSVGWAVITDEYKVPSKKFKVLGNTDRHSIKKNLIGALLFDSGETAEATRLKRTARRRYTRRKNRICYLQEIFSNEMAKVDDSFFHRLEESFLVEEDKKHERHPIFGNIVDEVAYHEKYPTIYHLRKKLVDSTDKADLRLIYLALAHMIKFRGHFLIEGDLNPDNSDVDKLFIQLVQTYNQLFEENPINASGVDAKAILSARLSKSRRLENLIAQLPGEKKNGLFGNLIALSLGLTPNFKSNFDLAEDAKLQLSKDTYDDDLDNLLAQIGDQYADLFLAAKNLSDAILLSDILRVNTEITKAPLSASMIKRYDEHHQDLTLLKALVRQQLPEKYKEIFFDQSKNGYAGYIDGGASQEEFYKFIKPILEKMDGTEELLVKLNREDLLRKQRTFDNGSIPHQIHLGELHAILRRQEDFYPFLKDNREKIEKILTFRIPYYVGPLARGNSRFAWMTRKSEETITPWNFEEVVDKGASAQSFIERMTNFDKNLPNEKVLPKHSLLYEYFTVYNELTKVKYVTEGMRKPAFLSGEQKKAIVDLLFKTNRKVTVKQLKEDYFKKIECFDSVEISGVEDRFNASLGTYHDLLKIIKDKDFLDNEENEDILEDIVLTLTLFEDREMIEERLKTYAHLFDDKVMKQLKRRRYTGWGRLSRKLINGIRDKQSGKTILDFLKSDGFANRNFMQLIHDDSLTFKEDIQKAQVSGQGDSLHEHIANLAGSPAIKKGILQTVKVVDELVKVMGRHKPENIVIEMARENQTTQKGQKNSRERMKRIEEGIKELGSQILKEHPVENTQLQNEKLYLYYLQNGRDMYVDQELDINRLSDYDVDHIVPQSFLKDDSIDNKVLTRSDKARGKSDNVPSEEVVKKMKNYWRQLLNAKLITQRKFDNLTKAERGGLSELDKAGFIKRQLVETRQITKHVAQILDSRMNTKYDENDKLIREVKVITLKSKLVSDFRKDFQFYKVREINNYHHAHDAYLNAVVGTALIKKYPKLESEFVYGDYKVYDVRKMIAKSEQEIGKATAKYFFYSNIMNFFKTEITLANGEIRKRPLIETNGETGEIVWDKGRDFATVRKVLSMPQVNIVKKTEVQTGGFSKESILPKRNSDKLIARKKDWDPKKYGGFDSPTVAYSVLVVAKVEKGKSKKLKSVKELLGITIMERSSFEKNPIDFLEAKGYKEVKKDLIIKLPKYSLFELENGRKRMLASAGELQKGNELALPSKYVNFLYLASHYEKLKGSPEDNEQKQLFVEQHKHYLDEIIEQISEFSKRVILADANLDKVLSAYNKHRDKPIREQAENIIHLFTLTNLGAPAAFKYFDTTIDRKRYTSTKEVLDATLIHQSITGLYETRIDLSQLGGDGGGSSGGGPAPGGTVSLQDEHRLFDIPVTTSLPDVWLQDFPQAWAETGGLGRAKCQAPIIIDLKPTAVPVSIKQYPMSLEAHMGIRQHIIKFLELGVLRPCRSPWNTPLLPVKKPGTQDYRPVQDLREINKRTVDIHPTVPNPYNLLSTLKPDYSWYTVLDLKDAFFCLPLAPQSQELFAFEWKDPERGISGQLTWTRLPQGFKNSPTLFNEALHRDLTDFRTQHPEVTLLQYVDDLLLAAPTKKACTQGTRHLLQELGEKGYRASAKKAQICQTKVTYLGYILSEGKRWLTPGRIETVARIPPPRNPREVREFLGKAGFCRLFIPGFAELAAPLYALTKPSTPFTWQTEHQLAFEALKKALLSAPALGLPDTSKPFTLFLDERQGIAKGVLTQKLGPWKRPVAYLSKKLDPVAAGWPPCLRIMAATAMLVKDSAKLTLGQPLTVITPHTLEAIVRQPPDRWITNARLTHYQALLLDTDRVQFGPPVTLNPATLLPVPENQPSPHDCRQVLAETHGTREDLKDQELPDADHTWYTDGSSYLDSGTRRAGAAVVDGHNTIWAQSLPPGTSAQKAELIALTKALELSKGKKANIYTDSRYAFATAHTHGSIYERRGWLTSEGKEIKNKAEIIALLKALFLPQEVAIIHCPGHQKGQDPVAVGNRQADRVARQAAMAEVLTLATEPDNTSHITAGKRTADGSEFEKRTADGSEFESPKKKAKVE

SEQ ID NO: 2008 - protein, 2096 aa, synthetic construct
  source 1..2096: note = Description of Artificial Sequence: Synthetic polypeptide
MPAAKRVKLDGGDKKYSIGLDIGTNSVGWAVITDEYKVPSKKFKVLGNTDRHSIKKNLIGALLFDSGETAEATRLKRTARRRYTRRKNRICYLQEIFSNEMAKVDDSFFHRLEESFLVEEDKKHERHPIFGNIVDEVAYHEKYPTIYHLRKKLVDSTDKADLRLIYLALAHMIKFRGHFLIEGDLNPDNSDVDKLFIQLVQTYNQLFEENPINASGVDAKAILSARLSKSRRLENLIAQLPGEKKNGLFGNLIALSLGLTPNFKSNFDLAEDAKLQLSKDTYDDDLDNLLAQIGDQYADLFLAAKNLSDAILLSDILRVNTEITKAPLSASMIKRYDEHHQDLTLLKALVRQQLPEKYKEIFFDQSKNGYAGYIDGGASQEEFYKFIKPILEKMDGTEELLVKLNREDLLRKQRTFDNGSIPHQIHLGELHAILRRQEDFYPFLKDNREKIEKILTFRIPYYVGPLARGNSRFAWMTRKSEETITPWNFEEVVDKGASAQSFIERMTNFDKNLPNEKVLPKHSLLYEYFTVYNELTKVKYVTEGMRKPAFLSGEQKKAIVDLLFKTNRKVTVKQLKEDYFKKIECFDSVEISGVEDRFNASLGTYHDLLKIIKDKDFLDNEENEDILEDIVLTLTLFEDREMIEERLKTYAHLFDDKVMKQLKRRRYTGWGRLSRKLINGIRDKQSGKTILDFLKSDGFANRNFMQLIHDDSLTFKEDIQKAQVSGQGDSLHEHIANLAGSPAIKKGILQTVKVVDELVKVMGRHKPENIVIEMARENQTTQKGQKNSRERMKRIEEGIKELGSQILKEHPVENTQLQNEKLYLYYLQNGRDMYVDQELDINRLSDYDVDHIVPQSFLKDDSIDNKVLTRSDKARGKSDNVPSEEVVKKMKNYWRQLLNAKLITQRKFDNLTKAERGGLSELDKAGFIKRQLVETRQITKHVAQILDSRMNTKYDENDKLIREVKVITLKSKLVSDFRKDFQFYKVREINNYHHAHDAYLNAVVGTALIKKYPKLESEFVYGDYKVYDVRKMIAKSEQEIGKATAKYFFYSNIMNFFKTEITLANGEIRKRPLIETNGETGEIVWDKGRDFATVRKVLSMPQVNIVKKTEVQTGGFSKESILPKRNSDKLIARKKDWDPKKYGGFDSPTVAYSVLVVAKVEKGKSKKLKSVKELLGITIMERSSFEKNPIDFLEAKGYKEVKKDLIIKLPKYSLFELENGRKRMLASAGELQKGNELALPSKYVNFLYLASHYEKLKGSPEDNEQKQLFVEQHKHYLDEIIEQISEFSKRVILADANLDKVLSAYNKHRDKPIREQAENIIHLFTLTNLGAPAAFKYFDTTIDRKRYTSTKEVLDATLIHQSITGLYETRIDLSQLGGDGGEAAAKGGTVSLQDEHRLFDIPVTTSLPDVWLQDFPQAWAETGGLGRAKCQAPIIIDLKPTAVPVSIKQYPMSLEAHMGIRQHIIKFLELGVLRPCRSPWNTPLLPVKKPGTQDYRPVQDLREINKRTVDIHPTVPNPYNLLSTLKPDYSWYTVLDLKDAFFCLPLAPQSQELFAFEWKDPERGISGQLTWTRLPQGFKNSPTLFNEALHRDLTDFRTQHPEVTLLQYVDDLLLAAPTKKACTQGTRHLLQELGEKGYRASAKKAQICQTKVTYLGYILSEGKRWLTPGRIETVARIPPPRNPREVREFLGKAGFCRLFIPGFAELAAPLYALTKPSTPFTWQTEHQLAFEALKKALLSAPALGLPDTSKPFTLFLDERQGIAKGVLTQKLGPWKRPVAYLSKKLDPVAAGWPPCLRIMAATAMLVKDSAKLTLGQPLTVITPHTLEAIVRQPPDRWITNARLTHYQALLLDTDRVQFGPPVTLNPATLLPVPENQPSPHDCRQVLAETHGTREDLKDQELPDADHTWYTDGSSYLDSGTRRAGAAVVDGHNTIWAQSLPPGTSAQKAELIALTKALELSKGKKANIYTDSRYAFATAHTHGSIYERRGWLTSEGKEIKNKAEIIALLKALFLPQEVAIIHCPGHQKGQDPVAVGNRQADRVARQAAMAEVLTLATEPDNTSHITAGKRTADGSEFEKRTADGSEFESPKKKAKVE

SEQ ID NO: 2009 - protein, 2102 aa, synthetic construct
  source 1..2102: note = Description of Artificial Sequence: Synthetic polypeptide
MPAAKRVKLDGGDKKYSIGLDIGTNSVGWAVITDEYKVPSKKFKVLGNTDRHSIKKNLIGALLFDSGETAEATRLKRTARRRYTRRKNRICYLQEIFSNEMAKVDDSFFHRLEESFLVEEDKKHERHPIFGNIVDEVAYHEKYPTIYHLRKKLVDSTDKADLRLIYLALAHMIKFRGHFLIEGDLNPDNSDVDKLFIQLVQTYNQLFEENPINASGVDAKAILSARLSKSRRLENLIAQLPGEKKNGLFGNLIALSLGLTPNFKSNFDLAEDAKLQLSKDTYDDDLDNLLAQIGDQYADLFLAAKNLSDAILLSDILRVNTEITKAPLSASMIKRYDEHHQDLTLLKALVRQQLPEKYKEIFFDQSKNGYAGYIDGGASQEEFYKFIKPILEKMDGTEELLVKLNREDLLRKQRTFDNGSIPHQIHLGELHAILRRQEDFYPFLKDNREKIEKILTFRIPYYVGPLARGNSRFAWMTRKSEETITPWNFEEVVDKGASAQSFIERMTNFDKNLPNEKVLPKHSLLYEYFTVYNELTKVKYVTEGMRKPAFLSGEQKKAIVDLLFKTNRKVTVKQLKEDYFKKIECFDSVEISGVEDRFNASLGTYHDLLKIIKDKDFLDNEENEDILEDIVLTLTLFEDREMIEERLKTYAHLFDDKVMKQLKRRRYTGWGRLSRKLINGIRDKQSGKTILDFLKSDGFANRNFMQLIHDDSLTFKEDIQKAQVSGQGDSLHEHIANLAGSPAIKKGILQTVKVVDELVKVMGRHKPENIVIEMARENQTTQKGQKNSRERMKRIEEGIKELGSQILKEHPVENTQLQNEKLYLYYLQNGRDMYVDQELDINRLSDYDVDHIVPQSFLKDDSIDNKVLTRSDKARGKSDNVPSEEVVKKMKNYWRQLLNAKLITQRKFDNLTKAERGGLSELDKAGFIKRQLVETRQITKHVAQILDSRMNTKYDENDKLIREVKVITLKSKLVSDFRKDFQFYKVREINNYHHAHDAYLNAVVGTALIKKYPKLESEFVYGDYKVYDVRKMIAKSEQEIGKATAKYFFYSNIMNFFKTEITLANGEIRKRPLIETNGETGEIVWDKGRDFATVRKVLSMPQVNIVKKTEVQTGGFSKESILPKRNSDKLIARKKDWDPKKYGGFDSPTVAYSVLVVAKVEKGKSKKLKSVKELLGITIMERSSFEKNPIDFLEAKGYKEVKKDLIIKLPKYSLFELENGRKRMLASAGELQKGNELALPSKYVNFLYLASHYEKLKGSPEDNEQKQLFVEQHKHYLDEIIEQISEFSKRVILADANLDKVLSAYNKHRDKPIREQAENIIHLFTLTNLGAPAAFKYFDTTIDRKRYTSTKEVLDATLIHQSITGLYETRIDLSQLGGDGGEAAAKGGGGSSGGTVSLQDEHRLFDIPVTTSLPDVWLQDFPQAWAETGGLGRAKCQAPIIIDLKPTAVPVSIKQYPMSLEAHMGIRQHIIKFLELGVLRPCRSPWNTPLLPVKKPGTQDYRPVQDLREINKRTVDIHPTVPNPYNLLSTLKPDYSWYTVLDLKDAFFCLPLAPQSQELFAFEWKDPERGISGQLTWTRLPQGFKNSPTLFNEALHRDLTDFRTQHPEVTLLQYVDDLLLAAPTKKACTQGTRHLLQELGEKGYRASAKKAQICQTKVTYLGYILSEGKRWLTPGRIETVARIPPPRNPREVREFLGKAGFCRLFIPGFAELAAPLYALTKPSTPFTWQTEHQLAFEALKKALLSAPALGLPDTSKPFTLFLDERQGIAKGVLTQKLGPWKRPVAYLSKKLDPVAAGWPPCLRIMAATAMLVKDSAKLTLGQPLTVITPHTLEAIVRQPPDRWITNARLTHYQALLLDTDRVQFGPPVTLNPATLLPVPENQPSPHDCRQVLAETHGTREDLKDQELPDADHTWYTDGSSYLDSGTRRAGAAVVDGHNTIWAQSLPPGTSAQKAELIALTKALELSKGKKANIYTDSRYAFATAHTHGSIYERRGWLTSEGKEIKNKAEIIALLKALFLPQEVAIIHCPGHQKGQDPVAVGNRQADRVARQAAMAEVLTLATEPDNTSHITAGKRTADGSEFEKRTADGSEFESPKKKAKVE

SEQ ID NO: 2010 - protein, 2100 aa, synthetic construct
  source 1..2100: note = Description of Artificial Sequence: Synthetic polypeptide
MPAAKRVKLDGGDKKYSIGLDIGTNSVGWAVITDEYKVPSKKFKVLGNTDRHSIKKNLIGALLFDSGETAEATRLKRTARRRYTRRKNRICYLQEIFSNEMAKVDDSFFHRLEESFLVEEDKKHERHPIFGNIVDEVAYHEKYPTIYHLRKKLVDSTDKADLRLIYLALAHMIKFRGHFLIEGDLNPDNSDVDKLFIQLVQTYNQLFEENPINASGVDAKAILSARLSKSRRLENLIAQLPGEKKNGLFGNLIALSLGLTPNFKSNFDLAEDAKLQLSKDTYDDDLDNLLAQIGDQYADLFLAAKNLSDAILLSDILRVNTEITKAPLSASMIKRYDEHHQDLTLLKALVRQQLPEKYKEIFFDQSKNGYAGYIDGGASQEEFYKFIKPILEKMDGTEELLVKLNREDLLRKQRTFDNGSIPHQIHLGELHAILRRQEDFYPFLKDNREKIEKILTFRIPYYVGPLARGNSRFAWMTRKSEETITPWNFEEVVDKGASAQSFIERMTNFDKNLPNEKVLPKHSLLYEYFTVYNELTKVKYVTEGMRKPAFLSGEQKKAIVDLLFKTNRKVTVKQLKEDYFKKIECFDSVEISGVEDRFNASLGTYHDLLKIIKDKDFLDNEENEDILEDIVLTLTLFEDREMIEERLKTYAHLFDDKVMKQLKRRRYTGWGRLSRKLINGIRDKQSGKTILDFLKSDGFANRNFMQLIHDDSLTFKEDIQKAQVSGQGDSLHEHIANLAGSPAIKKGILQTVKVVDELVKVMGRHKPENIVIEMARENQTTQKGQKNSRERMKRIEEGIKELGSQILKEHPVENTQLQNEKLYLYYLQNGRDMYVDQELDINRLSDYDVDHIVPQSFLKDDSIDNKVLTRSDKARGKSDNVPSEEVVKKMKNYWRQLLNAKLITQRKFDNLTKAERGGLSELDKAGFIKRQLVETRQITKHVAQILDSRMNTKYDENDKLIREVKVITLKSKLVSDFRKDFQFYKVREINNYHHAHDAYLNAVVGTALIKKYPKLESEFVYGDYKVYDVRKMIAKSEQEIGKATAKYFFYSNIMNFFKTEITLANGEIRKRPLIETNGETGEIVWDKGRDFATVRKVLSMPQVNIVKKTEVQTGGFSKESILPKRNSDKLIARKKDWDPKKYGGFDSPTVAYSVLVVAKVEKGKSKKLKSVKELLGITIMERSSFEKNPIDFLEAKGYKEVKKDLIIKLPKYSLFELENGRKRMLASAGELQKGNELALPSKYVNFLYLASHYEKLKGSPEDNEQKQLFVEQHKHYLDEIIEQISEFSKRVILADANLDKVLSAYNKHRDKPIREQAENIIHLFTLTNLGAPAAFKYFDTTIDRKRYTSTKEVLDATLIHQSITGLYETRIDLSQLGGDGGPAPGGSGGGGGTVSLQDEHRLFDIPVTTSLPDVWLQDFPQAWAETGGLGRAKCQAPIIIDLKPTAVPVSIKQYPMSLEAHMGIRQHIIKFLELGVLRPCRSPWNTPLLPVKKPGTQDYRPVQDLREINKRTVDIHPTVPNPYNLLSTLKPDYSWYTVLDLKDAFFCLPLAPQSQELFAFEWKDPERGISGQLTWTRLPQGFKNSPTLFNEALHRDLTDFRTQHPEVTLLQYVDDLLLAAPTKKACTQGTRHLLQELGEKGYRASAKKAQICQTKVTYLGYILSEGKRWLTPGRIETVARIPPPRNPREVREFLGKAGFCRLFIPGFAELAAPLYALTKPSTPFTWQTEHQLAFEALKKALLSAPALGLPDTSKPFTLFLDERQGIAKGVLTQKLGPWKRPVAYLSKKLDPVAAGWPPCLRIMAATAMLVKDSAKLTLGQPLTVITPHTLEAIVRQPPDRWITNARLTHYQALLLDTDRVQFGPPVTLNPATLLPVPENQPSPHDCRQVLAETHGTREDLKDQELPDADHTWYTDGSSYLDSGTRRAGAAVVDGHNTIWAQSLPPGTSAQKAELIALTKALELSKGKKANIYTDSRYAFATAHTHGSIYERRGWLTSEGKEIKNKAEIIALLKALFLPQEVAIIHCPGHQKGQDPVAVGNRQADRVARQAAMAEVLTLATEPDNTSHITAGKRTADGSEFEKRTADGSEFESPKKKAKVE

SEQ ID NO: 2011 - protein, 2100 aa, synthetic construct
  source 1..2100: note = Description of Artificial Sequence: Synthetic polypeptide
MPAAKRVKLDGGDKKYSIGLDIGTNSVGWAVITDEYKVPSKKFKVLGNTDRHSIKKNLIGALLFDSGETAEATRLKRTARRRYTRRKNRICYLQEIFSNEMAKVDDSFFHRLEESFLVEEDKKHERHPIFGNIVDEVAYHEKYPTIYHLRKKLVDSTDKADLRLIYLALAHMIKFRGHFLIEGDLNPDNSDVDKLFIQLVQTYNQLFEENPINASGVDAKAILSARLSKSRRLENLIAQLPGEKKNGLFGNLIALSLGLTPNFKSNFDLAEDAKLQLSKDTYDDDLDNLLAQIGDQYADLFLAAKNLSDAILLSDILRVNTEITKAPLSASMIKRYDEHHQDLTLLKALVRQQLPEKYKEIFFDQSKNGYAGYIDGGASQEEFYKFIKPILEKMDGTEELLVKLNREDLLRKQRTFDNGSIPHQIHLGELHAILRRQEDFYPFLKDNREKIEKILTFRIPYYVGPLARGNSRFAWMTRKSEETITPWNFEEVVDKGASAQSFIERMTNFDKNLPNEKVLPKHSLLYEYFTVYNELTKVKYVTEGMRKPAFLSGEQKKAIVDLLFKTNRKVTVKQLKEDYFKKIECFDSVEISGVEDRFNASLGTYHDLLKIIKDKDFLDNEENEDILEDIVLTLTLFEDREMIEERLKTYAHLFDDKVMKQLKRRRYTGWGRLSRKLINGIRDKQSGKTILDFLKSDGFANRNFMQLIHDDSLTFKEDIQKAQVSGQGDSLHEHIANLAGSPAIKKGILQTVKVVDELVKVMGRHKPENIVIEMARENQTTQKGQKNSRERMKRIEEGIKELGSQILKEHPVENTQLQNEKLYLYYLQNGRDMYVDQELDINRLSDYDVDHIVPQSFLKDDSIDNKVLTRSDKARGKSDNVPSEEVVKKMKNYWRQLLNAKLITQRKFDNLTKAERGGLSELDKAGFIKRQLVETRQITKHVAQILDSRMNTKYDENDKLIREVKVITLKSKLVSDFRKDFQFYKVREINNYHHAHDAYLNAVVGTALIKKYPKLESEFVYGDYKVYDVRKMIAKSEQEIGKATAKYFFYSNIMNFFKTEITLANGEIRKRPLIETNGETGEIVWDKGRDFATVRKVLSMPQVNIVKKTEVQTGGFSKESILPKRNSDKLIARKKDWDPKKYGGFDSPTVAYSVLVVAKVEKGKSKKLKSVKELLGITIMERSSFEKNPIDFLEAKGYKEVKKDLIIKLPKYSLFELENGRKRMLASAGELQKGNELALPSKYVNFLYLASHYEKLKGSPEDNEQKQLFVEQHKHYLDEIIEQISEFSKRVILADANLDKVLSAYNKHRDKPIREQAENIIHLFTLTNLGAPAAFKYFDTTIDRKRYTSTKEVLDATLIHQSITGLYETRIDLSQLGGDGGGGGPAPGGSGGTVSLQDEHRLFDIPVTTSLPDVWLQDFPQAWAETGGLGRAKCQAPIIIDLKPTAVPVSIKQYPMSLEAHMGIRQHIIKFLELGVLRPCRSPWNTPLLPVKKPGTQDYRPVQDLREINKRTVDIHPTVPNPYNLLSTLKPDYSWYTVLDLKDAFFCLPLAPQSQELFAFEWKDPERGISGQLTWTRLPQGFKNSPTLFNEALHRDLTDFRTQHPEVTLLQYVDDLLLAAPTKKACTQGTRHLLQELGEKGYRASAKKAQICQTKVTYLGYILSEGKRWLTPGRIETVARIPPPRNPREVREFLGKAGFCRLFIPGFAELAAPLYALTKPSTPFTWQTEHQLAFEALKKALLSAPALGLPDTSKPFTLFLDERQGIAKGVLTQKLGPWKRPVAYLSKKLDPVAAGWPPCLRIMAATAMLVKDSAKLTLGQPLTVITPHTLEAIVRQPPDRWITNARLTHYQALLLDTDRVQFGPPVTLNPATLLPVPENQPSPHDCRQVLAETHGTREDLKDQELPDADHTWYTDGSSYLDSGTRRAGAAVVDGHNTIWAQSLPPGTSAQKAELIALTKALELSKGKKANIYTDSRYAFATAHTHGSIYERRGWLTSEGKEIKNKAEIIALLKALFLPQEVAIIHCPGHQKGQDPVAVGNRQADRVARQAAMAEVLTLATEPDNTSHITAGKRTADGSEFEKRTADGSEFESPKKKAKVE

SEQ ID NO: 2012 - protein, 2099 aa, synthetic construct
  source 1..2099: note = Description of Artificial Sequence: Synthetic polypeptide
MPAAKRVKLDGGDKKYSIGLDIGTNSVGWAVITDEYKVPSKKFKVLGNTDRHSIKKNLIGALLFDSGETAEATRLKRTARRRYTRRKNRICYLQEIFSNEMAKVDDSFFHRLEESFLVEEDKKHERHPIFGNIVDEVAYHEKYPTIYHLRKKLVDSTDKADLRLIYLALAHMIKFRGHFLIEGDLNPDNSDVDKLFIQLVQTYNQLFEENPINASGVDAKAILSARLSKSRRLENLIAQLPGEKKNGLFGNLIALSLGLTPNFKSNFDLAEDAKLQLSKDTYDDDLDNLLAQIGDQYADLFLAAKNLSDAILLSDILRVNTEITKAPLSASMIKRYDEHHQDLTLLKALVRQQLPEKYKEIFFDQSKNGYAGYIDGGASQEEFYKFIKPILEKMDGTEELLVKLNREDLLRKQRTFDNGSIPHQIHLGELHAILRRQEDFYPFLKDNREKIEKILTFRIPYYVGPLARGNSRFAWMTRKSEETITPWNFEEVVDKGASAQSFIERMTNFDKNLPNEKVLPKHSLLYEYFTVYNELTKVKYVTEGMRKPAFLSGEQKKAIVDLLFKTNRKVTVKQLKEDYFKKIECFDSVEISGVEDRFNASLGTYHDLLKIIKDKDFLDNEENEDILEDIVLTLTLFEDREMIEERLKTYAHLFDDKVMKQLKRRRYTGWGRLSRKLINGIRDKQSGKTILDFLKSDGFANRNFMQLIHDDSLTFKEDIQKAQVSGQGDSLHEHIANLAGSPAIKKGILQTVKVVDELVKVMGRHKPENIVIEMARENQTTQKGQKNSRERMKRIEEGIKELGSQILKEHPVENTQLQNEKLYLYYLQNGRDMYVDQELDINRLSDYDVDHIVPQSFLKDDSIDNKVLTRSDKARGKSDNVPSEEVVKKMKNYWRQLLNAKLITQRKFDNLTKAERGGLSELDKAGFIKRQLVETRQITKHVAQILDSRMNTKYDENDKLIREVKVITLKSKLVSDFRKDFQFYKVREINNYHHAHDAYLNAVVGTALIKKYPKLESEFVYGDYKVYDVRKMIAKSEQEIGKATAKYFFYSNIMNFFKTEITLANGEIRKRPLIETNGETGEIVWDKGRDFATVRKVLSMPQVNIVKKTEVQTGGFSKESILPKRNSDKLIARKKDWDPKKYGGFDSPTVAYSVLVVAKVEKGKSKKLKSVKELLGITIMERSSFEKNPIDFLEAKGYKEVKKDLIIKLPKYSLFELENGRKRMLASAGELQKGNELALPSKYVNFLYLASHYEKLKGSPEDNEQKQLFVEQHKHYLDEIIEQISEFSKRVILADANLDKVLSAYNKHRDKPIREQAENIIHLFTLTNLGAPAAFKYFDTTIDRKRYTSTKEVLDATLIHQSITGLYETRIDLSQLGGDGGEAAAKGGSGGTVSLQDEHRLFDIPVTTSLPDVWLQDFPQAWAETGGLGRAKCQAPIIIDLKPTAVPVSIKQYPMSLEAHMGIRQHIIKFLELGVLRPCRSPWNTPLLPVKKPGTQDYRPVQDLREINKRTVDIHPTVPNPYNLLSTLKPDYSWYTVLDLKDAFFCLPLAPQSQELFAFEWKDPERGISGQLTWTRLPQGFKNSPTLFNEALHRDLTDFRTQHPEVTLLQYVDDLLLAAPTKKACTQGTRHLLQELGEKGYRASAKKAQICQTKVTYLGYILSEGKRWLTPGRIETVARIPPPRNPREVREFLGKAGFCRLFIPGFAELAAPLYALTKPSTPFTWQTEHQLAFEALKKALLSAPALGLPDTSKPFTLFLDERQGIAKGVLTQKLGPWKRPVAYLSKKLDPVAAGWPPCLRIMAATAMLVKDSAKLTLGQPLTVITPHTLEAIVRQPPDRWITNARLTHYQALLLDTDRVQFGPPVTLNPATLLPVPENQPSPHDCRQVLAETHGTREDLKDQELPDADHTWYTDGSSYLDSGTRRAGAAVVDGHNTIWAQSLPPGTSAQKAELIALTKALELSKGKKANIYTDSRYAFATAHTHGSIYERRGWLTSEGKEIKNKAEIIALLKALFLPQEVAIIHCPGHQKGQDPVAVGNRQADRVARQAAMAEVLTLATEPDNTSHITAGKRTADGSEFEKRTADGSEFESPKKKAKVE

SEQ ID NO: 2013 - protein, 2100 aa, synthetic construct
  source 1..2100: note = Description of Artificial Sequence: Synthetic polypeptide
MPAAKRVKLDGGDKKYSIGLDIGTNSVGWAVITDEYKVPSKKFKVLGNTDRHSIKKNLIGALLFDSGETAEATRLKRTARRRYTRRKNRICYLQEIFSNEMAKVDDSFFHRLEESFLVEEDKKHERHPIFGNIVDEVAYHEKYPTIYHLRKKLVDSTDKADLRLIYLALAHMIKFRGHFLIEGDLNPDNSDVDKLFIQLVQTYNQLFEENPINASGVDAKAILSARLSKSRRLENLIAQLPGEKKNGLFGNLIALSLGLTPNFKSNFDLAEDAKLQLSKDTYDDDLDNLLAQIGDQYADLFLAAKNLSDAILLSDILRVNTEITKAPLSASMIKRYDEHHQDLTLLKALVRQQLPEKYKEIFFDQSKNGYAGYIDGGASQEEFYKFIKPILEKMDGTEELLVKLNREDLLRKQRTFDNGSIPHQIHLGELHAILRRQEDFYPFLKDNREKIEKILTFRIPYYVGPLARGNSRFAWMTRKSEETITPWNFEEVVDKGASAQSFIERMTNFDKNLPNEKVLPKHSLLYEYFTVYNELTKVKYVTEGMRKPAFLSGEQKKAIVDLLFKTNRKVTVKQLKEDYFKKIECFDSVEISGVEDRFNASLGTYHDLLKIIKDKDFLDNEENEDILEDIVLTLTLFEDREMIEERLKTYAHLFDDKVMKQLKRRRYTGWGRLSRKLINGIRDKQSGKTILDFLKSDGFANRNFMQLIHDDSLTFKEDIQKAQVSGQGDSLHEHIANLAGSPAIKKGILQTVKVVDELVKVMGRHKPENIVIEMARENQTTQKGQKNSRERMKRIEEGIKELGSQILKEHPVENTQLQNEKLYLYYLQNGRDMYVDQELDINRLSDYDVDHIVPQSFLKDDSIDNKVLTRSDKARGKSDNVPSEEVVKKMKNYWRQLLNAKLITQRKFDNLTKAERGGLSELDKAGFIKRQLVETRQITKHVAQILDSRMNTKYDENDKLIREVKVITLKSKLVSDFRKDFQFYKVREINNYHHAHDAYLNAVVGTALIKKYPKLESEFVYGDYKVYDVRKMIAKSEQEIGKATAKYFFYSNIMNFFKTEITLANGEIRKRPLIETNGETGEIVWDKGRDFATVRKVLSMPQVNIVKKTEVQTGGFSKESILPKRNSDKLIARKKDWDPKKYGGFDSPTVAYSVLVVAKVEKGKSKKLKSVKELLGITIMERSSFEKNPIDFLEAKGYKEVKKDLIIKLPKYSLFELENGRKRMLASAGELQKGNELALPSKYVNFLYLASHYEKLKGSPEDNEQKQLFVEQHKHYLDEIIEQISEFSKRVILADANLDKVLSAYNKHRDKPIREQAENIIHLFTLTNLGAPAAFKYFDTTIDRKRYTSTKEVLDATLIHQSITGLYETRIDLSQLGGDGGPAPGGGGSSGGTVSLQDEHRLFDIPVTTSLPDVWLQDFPQAWAETGGLGRAKCQAPIIIDLKPTAVPVSIKQYPMSLEAHMGIRQHIIKFLELGVLRPCRSPWNTPLLPVKKPGTQDYRPVQDLREINKRTVDIHPTVPNPYNLLSTLKPDYSWYTVLDLKDAFFCLPLAPQSQELFAFEWKDPERGISGQLTWTRLPQGFKNSPTLFNEALHRDLTDFRTQHPEVTLLQYVDDLLLAAPTKKACTQGTRHLLQELGEKGYRASAKKAQICQTKVTYLGYILSEGKRWLTPGRIETVARIPPPRNPREVREFLGKAGFCRLFIPGFAELAAPLYALTKPSTPFTWQTEHQLAFEALKKALLSAPALGLPDTSKPFTLFLDERQGIAKGVLTQKLGPWKRPVAYLSKKLDPVAAGWPPCLRIMAATAMLVKDSAKLTLGQPLTVITPHTLEAIVRQPPDRWITNARLTHYQALLLDTDRVQFGPPVTLNPATLLPVPENQPSPHDCRQVLAETHGTREDLKDQELPDADHTWYTDGSSYLDSGTRRAGAAVVDGHNTIWAQSLPPGTSAQKAELIALTKALELSKGKKANIYTDSRYAFATAHTHGSIYERRGWLTSEGKEIKNKAEIIALLKALFLPQEVAIIHCPGHQKGQDPVAVGNRQADRVARQAAMAEVLTLATEPDNTSHITAGKRTADGSEFEKRTADGSEFESPKKKAKVE

SEQ ID NO: 2014 - protein, 2102 aa, synthetic construct
  source 1..2102: note = Description of Artificial Sequence: Synthetic polypeptide
MPAAKRVKLDGGDKKYSIGLDIGTNSVGWAVITDEYKVPSKKFKVLGNTDRHSIKKNLIGALLFDSGETAEATRLKRTARRRYTRRKNRICYLQEIFSNEMAKVDDSFFHRLEESFLVEEDKKHERHPIFGNIVDEVAYHEKYPTIYHLRKKLVDSTDKADLRLIYLALAHMIKFRGHFLIEGDLNPDNSDVDKLFIQLVQTYNQLFEENPINASGVDAKAILSARLSKSRRLENLIAQLPGEKKNGLFGNLIALSLGLTPNFKSNFDLAEDAKLQLSKDTYDDDLDNLLAQIGDQYADLFLAAKNLSDAILLSDILRVNTEITKAPLSASMIKRYDEHHQDLTLLKALVRQQLPEKYKEIFFDQSKNGYAGYIDGGASQEEFYKFIKPILEKMDGTEELLVKLNREDLLRKQRTFDNGSIPHQIHLGELHAILRRQEDFYPFLKDNREKIEKILTFRIPYYVGPLARGNSRFAWMTRKSEETITPWNFEEVVDKGASAQSFIERMTNFDKNLPNEKVLPKHSLLYEYFTVYNELTKVKYVTEGMRKPAFLSGEQKKAIVDLLFKTNRKVTVKQLKEDYFKKIECFDSVEISGVEDRFNASLGTYHDLLKIIKDKDFLDNEENEDILEDIVLTLTLFEDREMIEERLKTYAHLFDDKVMKQLKRRRYTGWGRLSRKLINGIRDKQSGKTILDFLKSDGFANRNFMQLIHDDSLTFKEDIQKAQVSGQGDSLHEHIANLAGSPAIKKGILQTVKVVDELVKVMGRHKPENIVIEMARENQTTQKGQKNSRERMKRIEEGIKELGSQILKEHPVENTQLQNEKLYLYYLQNGRDMYVDQELDINRLSDYDVDHIVPQSFLKDDSIDNKVLTRSDKARGKSDNVPSEEVVKKMKNYWRQLLNAKLITQRKFDNLTKAERGGLSELDKAGFIKRQLVETRQITKHVAQILDSRMNTKYDENDKLIREVKVITLKSKLVSDFRKDFQFYKVREINNYHHAHDAYLNAVVGTALIKKYPKLESEFVYGDYKVYDVRKMIAKSEQEIGKATAKYFFYSNIMNFFKTEITLANGEIRKRPLIETNGETGEIVWDKGRDFATVRKVLSMPQVNIVKKTEVQTGGFSKESILPKRNSDKLIARKKDWDPKKYGGFDSPTVAYSVLVVAKVEKGKSKKLKSVKELLGITIMERSSFEKNPIDFLEAKGYKEVKKDLIIKLPKYSLFELENGRKRMLASAGELQKGNELALPSKYVNFLYLASHYEKLKGSPEDNEQKQLFVEQHKHYLDEIIEQISEFSKRVILADANLDKVLSAYNKHRDKPIREQAENIIHLFTLTNLGAPAAFKYFDTTIDRKRYTSTKEVLDATLIHQSITGLYETRIDLSQLGGDGGEAAAKGSSGGGGGTVSLQDEHRLFDIPVTTSLPDVWLQDFPQAWAETGGLGRAKCQAPIIIDLKPTAVPVSIKQYPMSLEAHMGIRQHIIKFLELGVLRPCRSPWNTPLLPVKKPGTQDYRPVQDLREINKRTVDIHPTVPNPYNLLSTLKPDYSWYTVLDLKDAFFCLPLAPQSQELFAFEWKDPERGISGQLTWTRLPQGFKNSPTLFNEALHRDLTDFRTQHPEVTLLQYVDDLLLAAPTKKACTQGTRHLLQELGEKGYRASAKKAQICQTKVTYLGYILSEGKRWLTPGRIETVARIPPPRNPREVREFLGKAGFCRLFIPGFAELAAPLYALTKPSTPFTWQTEHQLAFEALKKALLSAPALGLPDTSKPFTLFLDERQGIAKGVLTQKLGPWKRPVAYLSKKLDPVAAGWPPCLRIMAATAMLVKDSAKLTLGQPLTVITPHTLEAIVRQPPDRWITNARLTHYQALLLDTDRVQFGPPVTLNPATLLPVPENQPSPHDCRQVLAETHGTREDLKDQELPDADHTWYTDGSSYLDSGTRRAGAAVVDGHNTIWAQSLPPGTSAQKAELIALTKALELSKGKKANIYTDSRYAFATAHTHGSIYERRGWLTSEGKEIKNKAEIIALLKALFLPQEVAIIHCPGHQKGQDPVAVGNRQADRVARQAAMAEVLTLATEPDNTSHITAGKRTADGSEFEKRTADGSEFESPKKKAKVE

SEQ ID NO: 2015 - protein, 2100 aa, synthetic construct
  source 1..2100: note = Description of Artificial Sequence: Synthetic polypeptide
MPAAKRVKLDGGDKKYSIGLDIGTNSVGWAVITDEYKVPSKKFKVLGNTDRHSIKKNLIGALLFDSGETAEATRLKRTARRRYTRRKNRICYLQEIFSNEMAKVDDSFFHRLEESFLVEEDKKHERHPIFGNIVDEVAYHEKYPTIYHLRKKLVDSTDKADLRLIYLALAHMIKFRGHFLIEGDLNPDNSDVDKLFIQLVQTYNQLFEENPINASGVDAKAILSARLSKSRRLENLIAQLPGEKKNGLFGNLIALSLGLTPNFKSNFDLAEDAKLQLSKDTYDDDLDNLLAQIGDQYADLFLAAKNLSDAILLSDILRVNTEITKAPLSASMIKRYDEHHQDLTLLKALVRQQLPEKYKEIFFDQSKNGYAGYIDGGASQEEFYKFIKPILEKMDGTEELLVKLNREDLLRKQRTFDNGSIPHQIHLGELHAILRRQEDFYPFLKDNREKIEKILTFRIPYYVGPLARGNSRFAWMTRKSEETITPWNFEEVVDKGASAQSFIERMTNFDKNLPNEKVLPKHSLLYEYFTVYNELTKVKYVTEGMRKPAFLSGEQKKAIVDLLFKTNRKVTVKQLKEDYFKKIECFDSVEISGVEDRFNASLGTYHDLLKIIKDKDFLDNEENEDILEDIVLTLTLFEDREMIEERLKTYAHLFDDKVMKQLKRRRYTGWGRLSRKLINGIRDKQSGKTILDFLKSDGFANRNFMQLIHDDSLTFKEDIQKAQVSGQGDSLHEHIANLAGSPAIKKGILQTVKVVDELVKVMGRHKPENIVIEMARENQTTQKGQKNSRERMKRIEEGIKELGSQILKEHPVENTQLQNEKLYLYYLQNGRDMYVDQELDINRLSDYDVDHIVPQSFLKDDSIDNKVLTRSDKARGKSDNVPSEEVVKKMKNYWRQLLNAKLITQRKFDNLTKAERGGLSELDKAGFIKRQLVETRQITKHVAQILDSRMNTKYDENDKLIREVKVITLKSKLVSDFRKDFQFYKVREINNYHHAHDAYLNAVVGTALIKKYPKLESEFVYGDYKVYDVRKMIAKSEQEIGKATAKYFFYSNIMNFFKTEITLANGEIRKRPLIETNGETGEIVWDKGRDFATVRKVLSMPQVNIVKKTEVQTGGFSKESILPKRNSDKLIARKKDWDPKKYGGFDSPTVAYSVLVVAKVEKGKSKKLKSVKELLGITIMERSSFEKNPIDFLEAKGYKEVKKDLIIKLPKYSLFELENGRKRMLASAGELQKGNELALPSKYVNFLYLASHYEKLKGSPEDNEQKQLFVEQHKHYLDEIIEQISEFSKRVILADANLDKVLSAYNKHRDKPIREQAENIIHLFTLTNLGAPAAFKYFDTTIDRKRYTSTKEVLDATLIHQSITGLYETRIDLSQLGGDGGPAPGGGGGSGGTVSLQDEHRLFDIPVTTSLPDVWLQDFPQAWAETGGLGRAKCQAPIIIDLKPTAVPVSIKQYPMSLEAHMGIRQHIIKFLELGVLRPCRSPWNTPLLPVKKPGTQDYRPVQDLREINKRTVDIHPTVPNPYNLLSTLKPDYSWYTVLDLKDAFFCLPLAPQSQELFAFEWKDPERGISGQLTWTRLPQGFKNSPTLFNEALHRDLTDFRTQHPEVTLLQYVDDLLLAAPTKKACTQGTRHLLQELGEKGYRASAKKAQICQTKVTYLGYILSEGKRWLTPGRIETVARIPPPRNPREVREFLGKAGFCRLFIPGFAELAAPLYALTKPSTPFTWQTEHQLAFEALKKALLSAPALGLPDTSKPFTLFLDERQGIAKGVLTQKLGPWKRPVAYLSKKLDPVAAGWPPCLRIMAATAMLVKDSAKLTLGQPLTVITPHTLEAIVRQPPDRWITNARLTHYQALLLDTDRVQFGPPVTLNPATLLPVPENQPSPHDCRQVLAETHGTREDLKDQELPDADHTWYTDGSSYLDSGTRRAGAAVVDGHNTIWAQSLPPGTSAQKAELIALTKALELSKGKKANIYTDSRYAFATAHTHGSIYERRGWLTSEGKEIKNKAEIIALLKALFLPQEVAIIHCPGHQKGQDPVAVGNRQADRVARQAAMAEVLTLATEPDNTSHITAGKRTADGSEFEKRTADGSEFESPKKKAKVE

SEQ ID NO: 2016 - protein, 2095 aa, synthetic construct
  source 1..2095: note = Description of Artificial Sequence: Synthetic polypeptide
MPAAKRVKLDGGDKKYSIGLDIGTNSVGWAVITDEYKVPSKKFKVLGNTDRHSIKKNLIGALLFDSGETAEATRLKRTARRRYTRRKNRICYLQEIFSNEMAKVDDSFFHRLEESFLVEEDKKHERHPIFGNIVDEVAYHEKYPTIYHLRKKLVDSTDKADLRLIYLALAHMIKFRGHFLIEGDLNPDNSDVDKLFIQLVQTYNQLFEENPINASGVDAKAILSARLSKSRRLENLIAQLPGEKKNGLFGNLIALSLGLTPNFKSNFDLAEDAKLQLSKDTYDDDLDNLLAQIGDQYADLFLAAKNLSDAILLSDILRVNTEITKAPLSASMIKRYDEHHQDLTLLKALVRQQLPEKYKEIFFDQSKNGYAGYIDGGASQEEFYKFIKPILEKMDGTEELLVKLNREDLLRKQRTFDNGSIPHQIHLGELHAILRRQEDFYPFLKDNREKIEKILTFRIPYYVGPLARGNSRFAWMTRKSEETITPWNFEEVVDKGASAQSFIERMTNFDKNLPNEKVLPKHSLLYEYFTVYNELTKVKYVTEGMRKPAFLSGEQKKAIVDLLFKTNRKVTVKQLKEDYFKKIECFDSVEISGVEDRFNASLGTYHDLLKIIKDKDFLDNEENEDILEDIVLTLTLFEDREMIEERLKTYAHLFDDKVMKQLKRRRYTGWGRLSRKLINGIRDKQSGKTILDFLKSDGFANRNFMQLIHDDSLTFKEDIQKAQVSGQGDSLHEHIANLAGSPAIKKGILQTVKVVDELVKVMGRHKPENIVIEMARENQTTQKGQKNSRERMKRIEEGIKELGSQILKEHPVENTQLQNEKLYLYYLQNGRDMYVDQELDINRLSDYDVDHIVPQSFLKDDSIDNKVLTRSDKARGKSDNVPSEEVVKKMKNYWRQLLNAKLITQRKFDNLTKAERGGLSELDKAGFIKRQLVETRQITKHVAQILDSRMNTKYDENDKLIREVKVITLKSKLVSDFRKDFQFYKVREINNYHHAHDAYLNAVVGTALIKKYPKLESEFVYGDYKVYDVRKMIAKSEQEIGKATAKYFFYSNIMNFFKTEITLANGEIRKRPLIETNGETGEIVWDKGRDFATVRKVLSMPQVNIVKKTEVQTGGFSKESILPKRNSDKLIARKKDWDPKKYGGFDSPTVAYSVLVVAKVEKGKSKKLKSVKELLGITIMERSSFEKNPIDFLEAKGYKEVKKDLIIKLPKYSLFELENGRKRMLASAGELQKGNELALPSKYVNFLYLASHYEKLKGSPEDNEQKQLFVEQHKHYLDEIIEQISEFSKRVILADANLDKVLSAYNKHRDKPIREQAENIIHLFTLTNLGAPAAFKYFDTTIDRKRYTSTKEVLDATLIHQSITGLYETRIDLSQLGGDGGGGGGGGTVSLQDEHRLFDIPVTTSLPDVWLQDFPQAWAETGGLGRAKCQAPIIIDLKPTAVPVSIKQYPMSLEAHMGIRQHIIKFLELGVLRPCRSPWNTPLLPVKKPGTQDYRPVQDLREINKRTVDIHPTVPNPYNLLSTLKPDYSWYTVLDLKDAFFCLPLAPQSQELFAFEWKDPERGISGQLTWTRLPQGFKNSPTLFNEALHRDLTDFRTQHPEVTLLQYVDDLLLAAPTKKACTQGTRHLLQELGEKGYRASAKKAQICQTKVTYLGYILSEGKRWLTPGRIETVARIPPPRNPREVREFLGKAGFCRLFIPGFAELAAPLYALTKPSTPFTWQTEHQLAFEALKKALLSAPALGLPDTSKPFTLFLDERQGIAKGVLTQKLGPWKRPVAYLSKKLDPVAAGWPPCLRIMAATAMLVKDSAKLTLGQPLTVITPHTLEAIVRQPPDRWITNARLTHYQALLLDTDRVQFGPPVTLNPATLLPVPENQPSPHDCRQVLAETHGTREDLKDQELPDADHTWYTDGSSYLDSGTRRAGAAVVDGHNTIWAQSLPPGTSAQKAELIALTKALELSKGKKANIYTDSRYAFATAHTHGSIYERRGWLTSEGKEIKNKAEIIALLKALFLPQEVAIIHCPGHQKGQDPVAVGNRQADRVARQAAMAEVLTLATEPDNTSHITAGKRTADGSEFEKRTADGSEFESPKKKAKVE

SEQ ID NO: 2017 - protein, 2102 aa, synthetic construct
  source 1..2102: note = Description of Artificial Sequence: Synthetic polypeptide
MPAAKRVKLDGGDKKYSIGLDIGTNSVGWAVITDEYKVPSKKFKVLGNTDRHSIKKNLIGALLFDSGETAEATRLKRTARRRYTRRKNRICYLQEIFSNEMAKVDDSFFHRLEESFLVEEDKKHERHPIFGNIVDEVAYHEKYPTIYHLRKKLVDSTDKADLRLIYLALAHMIKFRGHFLIEGDLNPDNSDVDKLFIQLVQTYNQLFEENPINASGVDAKAILSARLSKSRRLENLIAQLPGEKKNGLFGNLIALSLGLTPNFKSNFDLAEDAKLQLSKDTYDDDLDNLLAQIGDQYADLFLAAKNLSDAILLSDILRVNTEITKAPLSASMIKRYDEHHQDLTLLKALVRQQLPEKYKEIFFDQSKNGYAGYIDGGASQEEFYKFIKPILEKMDGTEELLVKLNREDLLRKQRTFDNGSIPHQIHLGELHAILRRQEDFYPFLKDNREKIEKILTFRIPYYVGPLARGNSRFAWMTRKSEETITPWNFEEVVDKGASAQSFIERMTNFDKNLPNEKVLPKHSLLYEYFTVYNELTKVKYVTEGMRKPAFLSGEQKKAIVDLLFKTNRKVTVKQLKEDYFKKIECFDSVEISGVEDRFNASLGTYHDLLKIIKDKDFLDNEENEDILEDIVLTLTLFEDREMIEERLKTYAHLFDDKVMKQLKRRRYTGWGRLSRKLINGIRDKQSGKTILDFLKSDGFANRNFMQLIHDDSLTFKEDIQKAQVSGQGDSLHEHIANLAGSPAIKKGILQTVKVVDELVKVMGRHKPENIVIEMARENQTTQKGQKNSRERMKRIEEGIKELGSQILKEHPVENTQLQNEKLYLYYLQNGRDMYVDQELDINRLSDYDVDHIVPQSFLKDDSIDNKVLTRSDKARGKSDNVPSEEVVKKMKNYWRQLLNAKLITQRKFDNLTKAERGGLSELDKAGFIKRQLVETRQITKHVAQILDSRMNTKYDENDKLIREVKVITLKSKLVSDFRKDFQFYKVREINNYHHAHDAYLNAVVGTALIKKYPKLESEFVYGDYKVYDVRKMIAKSEQEIGKATAKYFFYSNIMNFFKTEITLANGEIRKRPLIETNGETGEIVWDKGRDFATVRKVLSMPQVNIVKKTEVQTGGFSKESILPKRNSDKLIARKKDWDPKKYGGFDSPTVAYSVLVVAKVEKGKSKKLKSVKELLGITIMERSSFEKNPIDFLEAKGYKEVKKDLIIKLPKYSLFELENGRKRMLASAGELQKGNELALPSKYVNFLYLASHYEKLKGSPEDNEQKQLFVEQHKHYLDEIIEQISEFSKRVILADANLDKVLSAYNKHRDKPIREQAENIIHLFTLTNLGAPAAFKYFDTTIDRKRYTSTKEVLDATLIHQSITGLYETRIDLSQLGGDGGGGGEAAAKGSSGGTVSLQDEHRLFDIPVTTSLPDVWLQDFPQAWAETGGLGRAKCQAPIIIDLKPTAVPVSIKQYPMSLEAHMGIRQHIIKFLELGVLRPCRSPWNTPLLPVKKPGTQDYRPVQDLREINKRTVDIHPTVPNPYNLLSTLKPDYSWYTVLDLKDAFFCLPLAPQSQELFAFEWKDPERGISGQLTWTRLPQGFKNSPTLFNEALHRDLTDFRTQHPEVTLLQYVDDLLLAAPTKKACTQGTRHLLQELGEKGYRASAKKAQICQTKVTYLGYILSEGKRWLTPGRIETVARIPPPRNPREVREFLGKAGFCRLFIPGFAELAAPLYALTKPSTPFTWQTEHQLAFEALKKALLSAPALGLPDTSKPFTLFLDERQGIAKGVLTQKLGPWKRPVAYLSKKLDPVAAGWPPCLRIMAATAMLVKDSAKLTLGQPLTVITPHTLEAIVRQPPDRWITNARLTHYQALLLDTDRVQFGPPVTLNPATLLPVPENQPSPHDCRQVLAETHGTREDLKDQELPDADHTWYTDGSSYLDSGTRRAGAAVVDGHNTIWAQSLPPGTSAQKAELIALTKALELSKGKKANIYTDSRYAFATAHTHGSIYERRGWLTSEGKEIKNKAEIIALLKALFLPQEVAIIHCPGHQKGQDPVAVGNRQADRVARQAAMAEVLTLATEPDNTSHITAGKRTADGSEFEKRTADGSEFESPKKKAKVE

SEQ ID NO: 2018 - protein, 2104 aa, synthetic construct
  source 1..2104: note = Description of Artificial Sequence: Synthetic polypeptide
MPAAKRVKLDGGDKKYSIGLDIGTNSVGWAVITDEYKVPSKKFKVLGNTDRHSIKKNLIGALLFDSGETAEATRLKRTARRRYTRRKNRICYLQEIFSNEMAKVDDSFFHRLEESFLVEEDKKHERHPIFGNIVDEVAYHEKYPTIYHLRKKLVDSTDKADLRLIYLALAHMIKFRGHFLIEGDLNPDNSDVDKLFIQLVQTYNQLFEENPINASGVDAKAILSARLSKSRRLENLIAQLPGEKKNGLFGNLIALSLGLTPNFKSNFDLAEDAKLQLSKDTYDDDLDNLLAQIGDQYADLFLAAKNLSDAILLSDILRVNTEITKAPLSASMIKRYDEHHQDLTLLKALVRQQLPEKYKEIFFDQSKNGYAGYIDGGASQEEFYKFIKPILEKMDGTEELLVKLNREDLLRKQRTFDNGSIPHQIHLGELHAILRRQEDFYPFLKDNREKIEKILTFRIPYYVGPLARGNSRFAWMTRKSEETITPWNFEEVVDKGASAQSFIERMTNFDKNLPNEKVLPKHSLLYEYFTVYNELTKVKYVTEGMRKPAFLSGEQKKAIVDLLFKTNRKVTVKQLKEDYFKKIECFDSVEISGVEDRFNASLGTYHDLLKIIKDKDFLDNEENEDILEDIVLTLTLFEDREMIEERLKTYAHLFDDKVMKQLKRRRYTGWGRLSRKLINGIRDKQSGKTILDFLKSDGFANRNFMQLIHDDSLTFKEDIQKAQVSGQGDSLHEHIANLAGSPAIKKGILQTVKVVDELVKVMGRHKPENIVIEMARENQTTQKGQKNSRERMKRIEEGIKELGSQILKEHPVENTQLQNEKLYLYYLQNGRDMYVDQELDINRLSDYDVDHIVPQSFLKDDSIDNKVLTRSDKARGKSDNVPSEEVVKKMKNYWRQLLNAKLITQRKFDNLTKAERGGLSELDKAGFIKRQLVETRQITKHVAQILDSRMNTKYDENDKLIREVKVITLKSKLVSDFRKDFQFYKVREINNYHHAHDAYLNAVVGTALIKKYPKLESEFVYGDYKVYDVRKMIAKSEQEIGKATAKYFFYSNIMNFFKTEITLANGEIRKRPLIETNGETGEIVWDKGRDFATVRKVLSMPQVNIVKKTEVQTGGFSKESILPKRNSDKLIARKKDWDPKKYGGFDSPTVAYSVLVVAKVEKGKSKKLKSVKELLGITIMERSSFEKNPIDFLEAKGYKEVKKDLIIKLPKYSLFELENGRKRMLASAGELQKGNELALPSKYVNFLYLASHYEKLKGSPEDNEQKQLFVEQHKHYLDEIIEQISEFSKRVILADANLDKVLSAYNKHRDKPIREQAENIIHLFTLTNLGAPAAFKYFDTTIDRKRYTSTKEVLDATLIHQSITGLYETRIDLSQLGGDGGPAPAPAPAPAPAPGGTVSLQDEHRLFDIPVTTSLPDVWLQDFPQAWAETGGLGRAKCQAPIIIDLKPTAVPVSIKQYPMSLEAHMGIRQHIIKFLELGVLRPCRSPWNTPLLPVKKPGTQDYRPVQDLREINKRTVDIHPTVPNPYNLLSTLKPDYSWYTVLDLKDAFFCLPLAPQSQELFAFEWKDPERGISGQLTWTRLPQGFKNSPTLFNEALHRDLTDFRTQHPEVTLLQYVDDLLLAAPTKKACTQGTRHLLQELGEKGYRASAKKAQICQTKVTYLGYILSEGKRWLTPGRIETVARIPPPRNPREVREFLGKAGFCRLFIPGFAELAAPLYALTKPSTPFTWQTEHQLAFEALKKALLSAPALGLPDTSKPFTLFLDERQGIAKGVLTQKLGPWKRPVAYLSKKLDPVAAGWPPCLRIMAATAMLVKDSAKLTLGQPLTVITPHTLEAIVRQPPDRWITNARLTHYQALLLDTDRVQFGPPVTLNPATLLPVPENQPSPHDCRQVLAETHGTREDLKDQELPDADHTWYTDGSSYLDSGTRRAGAAVVDGHNTIWAQSLPPGTSAQKAELIALTKALELSKGKKANIYTDSRYAFATAHTHGSIYERRGWLTSEGKEIKNKAEIIALLKALFLPQEVAIIHCPGHQKGQDPVAVGNRQADRVARQAAMAEVLTLATEPDNTSHITAGKRTADGSEFEKRTADGSEFESPKKKAKVE

SEQ ID NO: 2019 - protein, 2100 aa, synthetic construct
  source 1..2100: note = Description of Artificial Sequence: Synthetic polypeptide
MPAAKRVKLDGGDKKYSIGLDIGTNSVGWAVITDEYKVPSKKFKVLGNTDRHSIKKNLIGALLFDSGETAEATRLKRTARRRYTRRKNRICYLQEIFSNEMAKVDDSFFHRLEESFLVEEDKKHERHPIFGNIVDEVAYHEKYPTIYHLRKKLVDSTDKADLRLIYLALAHMIKFRGHFLIEGDLNPDNSDVDKLFIQLVQTYNQLFEENPINASGVDAKAILSARLSKSRRLENLIAQLPGEKKNGLFGNLIALSLGLTPNFKSNFDLAEDAKLQLSKDTYDDDLDNLLAQIGDQYADLFLAAKNLSDAILLSDILRVNTEITKAPLSASMIKRYDEHHQDLTLLKALVRQQLPEKYKEIFFDQSKNGYAGYIDGGASQEEFYKFIKPILEKMDGTEELLVKLNREDLLRKQRTFDNGSIPHQIHLGELHAILRRQEDFYPFLKDNREKIEKILTFRIPYYVGPLARGNSRFAWMTRKSEETITPWNFEEVVDKGASAQSFIERMTNFDKNLPNEKVLPKHSLLYEYFTVYNELTKVKYVTEGMRKPAFLSGEQKKAIVDLLFKTNRKVTVKQLKEDYFKKIECFDSVEISGVEDRFNASLGTYHDLLKIIKDKDFLDNEENEDILEDIVLTLTLFEDREMIEERLKTYAHLFDDKVMKQLKRRRYTGWGRLSRKLINGIRDKQSGKTILDFLKSDGFANRNFMQLIHDDSLTFKEDIQKAQVSGQGDSLHEHIANLAGSPAIKKGILQTVKVVDELVKVMGRHKPENIVIEMARENQTTQKGQKNSRERMKRIEEGIKELGSQILKEHPVENTQLQNEKLYLYYLQNGRDMYVDQELDINRLSDYDVDHIVPQSFLKDDSIDNKVLTRSDKARGKSDNVPSEEVVKKMKNYWRQLLNAKLITQRKFDNLTKAERGGLSELDKAGFIKRQLVETRQITKHVAQILDSRMNTKYDENDKLIREVKVITLKSKLVSDFRKDFQFYKVREINNYHHAHDAYLNAVVGTALIKKYPKLESEFVYGDYKVYDVRKMIAKSEQEIGKATAKYFFYSNIMNFFKTEITLANGEIRKRPLIETNGETGEIVWDKGRDFATVRKVLSMPQVNIVKKTEVQTGGFSKESILPKRNSDKLIARKKDWDPKKYGGFDSPTVAYSVLVVAKVEKGKSKKLKSVKELLGITIMERSSFEKNPIDFLEAKGYKEVKKDLIIKLPKYSLFELENGRKRMLASAGELQKGNELALPSKYVNFLYLASHYEKLKGSPEDNEQKQLFVEQHKHYLDEIIEQISEFSKRVILADANLDKVLSAYNKHRDKPIREQAENIIHLFTLTNLGAPAAFKYFDTTIDRKRYTSTKEVLDATLIHQSITGLYETRIDLSQLGGDGGPAPGSSGGGGGTVSLQDEHRLFDIPVTTSLPDVWLQDFPQAWAETGGLGRAKCQAPIIIDLKPTAVPVSIKQYPMSLEAHMGIRQHIIKFLELGVLRPCRSPWNTPLLPVKKPGTQDYRPVQDLREINKRTVDIHPTVPNPYNLLSTLKPDYSWYTVLDLKDAFFCLPLAPQSQELFAFEWKDPERGISGQLTWTRLPQGFKNSPTLFNEALHRDLTDFRTQHPEVTLLQYVDDLLLAAPTKKACTQGTRHLLQELGEKGYRASAKKAQICQTKVTYLGYILSEGKRWLTPGRIETVARIPPPRNPREVREFLGKAGFCRLFIPGFAELAAPLYALTKPSTPFTWQTEHQLAFEALKKALLSAPALGLPDTSKPFTLFLDERQGIAKGVLTQKLGPWKRPVAYLSKKLDPVAAGWPPCLRIMAATAMLVKDSAKLTLGQPLTVITPHTLEAIVRQPPDRWITNARLTHYQALLLDTDRVQFGPPVTLNPATLLPVPENQPSPHDCRQVLAETHGTREDLKDQELPDADHTWYTDGSSYLDSGTRRAGAAVVDGHNTIWAQSLPPGTSAQKAELIALTKALELSKGKKANIYTDSRYAFATAHTHGSIYERRGWLTSEGKEIKNKAEIIALLKALFLPQEVAIIHCPGHQKGQDPVAVGNRQADRVARQAAMAEVLTLATEPDNTSHITAGKRTADGSEFEKRTADGSEFESPKKKAKVE

SEQ ID NO: 2020 - protein, 2100 aa, synthetic construct
  source 1..2100: note = Description of Artificial Sequence: Synthetic polypeptide
MPAAKRVKLDGGDKKYSIGLDIGTNSVGWAVITDEYKVPSKKFKVLGNTDRHSIKKNLIGALLFDSGETAEATRLKRTARRRYTRRKNRICYLQEIFSNEMAKVDDSFFHRLEESFLVEEDKKHERHPIFGNIVDEVAYHEKYPTIYHLRKKLVDSTDKADLRLIYLALAHMIKFRGHFLIEGDLNPDNSDVDKLFIQLVQTYNQLFEENPINASGVDAKAILSARLSKSRRLENLIAQLPGEKKNGLFGNLIALSLGLTPNFKSNFDLAEDAKLQLSKDTYDDDLDNLLAQIGDQYADLFLAAKNLSDAILLSDILRVNTEITKAPLSASMIKRYDEHHQDLTLLKALVRQQLPEKYKEIFFDQSKNGYAGYIDGGASQEEFYKFIKPILEKMDGTEELLVKLNREDLLRKQRTFDNGSIPHQIHLGELHAILRRQEDFYPFLKDNREKIEKILTFRIPYYVGPLARGNSRFAWMTRKSEETITPWNFEEVVDKGASAQSFIERMTNFDKNLPNEKVLPKHSLLYEYFTVYNELTKVKYVTEGMRKPAFLSGEQKKAIVDLLFKTNRKVTVKQLKEDYFKKIECFDSVEISGVEDRFNASLGTYHDLLKIIKDKDFLDNEENEDILEDIVLTLTLFEDREMIEERLKTYAHLFDDKVMKQLKRRRYTGWGRLSRKLINGIRDKQSGKTILDFLKSDGFANRNFMQLIHDDSLTFKEDIQKAQVSGQGDSLHEHIANLAGSPAIKKGILQTVKVVDELVKVMGRHKPENIVIEMARENQTTQKGQKNSRERMKRIEEGIKELGSQILKEHPVENTQLQNEKLYLYYLQNGRDMYVDQELDINRLSDYDVDHIVPQSFLKDDSIDNKVLTRSDKARGKSDNVPSEEVVKKMKNYWRQLLNAKLITQRKFDNLTKAERGGLSELDKAGFIKRQLVETRQITKHVAQILDSRMNTKYDENDKLIREVKVITLKSKLVSDFRKDFQFYKVREINNYHHAHDAYLNAVVGTALIKKYPKLESEFVYGDYKVYDVRKMIAKSEQEIGKATAKYFFYSNIMNFFKTEITLANGEIRKRPLIETNGETGEIVWDKGRDFATVRKVLSMPQVNIVKKTEVQTGGFSKESILPKRNSDKLIARKKDWDPKKYGGFDSPTVAYSVLVVAKVEKGKSKKLKSVKELLGITIMERSSFEKNPIDFLEAKGYKEVKKDLIIKLPKYSLFELENGRKRMLASAGELQKGNELALPSKYVNFLYLASHYEKLKGSPEDNEQKQLFVEQHKHYLDEIIEQISEFSKRVILADANLDKVLSAYNKHRDKPIREQAENIIHLFTLTNLGAPAAFKYFDTTIDRKRYTSTKEVLDATLIHQSITGLYETRIDLSQLGGDGGGSSGGSPAPGGTVSLQDEHRLFDIPVTTSLPDVWLQDFPQAWAETGGLGRAKCQAPIIIDLKPTAVPVSIKQYPMSLEAHMGIRQHIIKFLELGVLRPCRSPWNTPLLPVKKPGTQDYRPVQDLREINKRTVDIHPTVPNPYNLLSTLKPDYSWYTVLDLKDAFFCLPLAPQSQELFAFEWKDPERGISGQLTWTRLPQGFKNSPTLFNEALHRDLTDFRTQHPEVTLLQYVDDLLLAAPTKKACTQGTRHLLQELGEKGYRASAKKAQICQTKVTYLGYILSEGKRWLTPGRIETVARIPPPRNPREVREFLGKAGFCRLFIPGFAELAAPLYALTKPSTPFTWQTEHQLAFEALKKALLSAPALGLPDTSKPFTLFLDERQGIAKGVLTQKLGPWKRPVAYLSKKLDPVAAGWPPCLRIMAATAMLVKDSAKLTLGQPLTVITPHTLEAIVRQPPDRWITNARLTHYQALLLDTDRVQFGPPVTLNPATLLPVPENQPSPHDCRQVLAETHGTREDLKDQELPDADHTWYTDGSSYLDSGTRRAGAAVVDGHNTIWAQSLPPGTSAQKAELIALTKALELSKGKKANIYTDSRYAFATAHTHGSIYERRGWLTSEGKEIKNKAEIIALLKALFLPQEVAIIHCPGHQKGQDPVAVGNRQADRVARQAAMAEVLTLATEPDNTSHITAGKRTADGSEFEKRTADGSEFESPKKKAKVE

SEQ ID NO: 2021 - protein, 2097 aa, synthetic construct
  source 1..2097: note = Description of Artificial Sequence: Synthetic polypeptide
MPAAKRVKLDGGDKKYSIGLDIGTNSVGWAVITDEYKVPSKKFKVLGNTDRHSIKKNLIGALLFDSGETAEATRLKRTARRRYTRRKNRICYLQEIFSNEMAKVDDSFFHRLEESFLVEEDKKHERHPIFGNIVDEVAYHEKYPTIYHLRKKLVDSTDKADLRLIYLALAHMIKFRGHFLIEGDLNPDNSDVDKLFIQLVQTYNQLFEENPINASGVDAKAILSARLSKSRRLENLIAQLPGEKKNGLFGNLIALSLGLTPNFKSNFDLAEDAKLQLSKDTYDDDLDNLLAQIGDQYADLFLAAKNLSDAILLSDILRVNTEITKAPLSASMIKRYDEHHQDLTLLKALVRQQLPEKYKEIFFDQSKNGYAGYIDGGASQEEFYKFIKPILEKMDGTEELLVKLNREDLLRKQRTFDNGSIPHQIHLGELHAILRRQEDFYPFLKDNREKIEKILTFRIPYYVGPLARGNSRFAWMTRKSEETITPWNFEEVVDKGASAQSFIERMTNFDKNLPNEKVLPKHSLLYEYFTVYNELTKVKYVTEGMRKPAFLSGEQKKAIVDLLFKTNRKVTVKQLKEDYFKKIECFDSVEISGVEDRFNASLGTYHDLLKIIKDKDFLDNEENEDILEDIVLTLTLFEDREMIEERLKTYAHLFDDKVMKQLKRRRYTGWGRLSRKLINGIRDKQSGKTILDFLKSDGFANRNFMQLIHDDSLTFKEDIQKAQVSGQGDSLHEHIANLAGSPAIKKGILQTVKVVDELVKVMGRHKPENIVIEMARENQTTQKGQKNSRERMKRIEEGIKELGSQILKEHPVENTQLQNEKLYLYYLQNGRDMYVDQELDINRLSDYDVDHIVPQSFLKDDSIDNKVLTRSDKARGKSDNVPSEEVVKKMKNYWRQLLNAKLITQRKFDNLTKAERGGLSELDKAGFIKRQLVETRQITKHVAQILDSRMNTKYDENDKLIREVKVITLKSKLVSDFRKDFQFYKVREINNYHHAHDAYLNAVVGTALIKKYPKLESEFVYGDYKVYDVRKMIAKSEQEIGKATAKYFFYSNIMNFFKTEITLANGEIRKRPLIETNGETGEIVWDKGRDFATVRKVLSMPQVNIVKKTEVQTGGFSKESILPKRNSDKLIARKKDWDPKKYGGFDSPTVAYSVLVVAKVEKGKSKKLKSVKELLGITIMERSSFEKNPIDFLEAKGYKEVKKDLIIKLPKYSLFELENGRKRMLASAGELQKGNELALPSKYVNFLYLASHYEKLKGSPEDNEQKQLFVEQHKHYLDEIIEQISEFSKRVILADANLDKVLSAYNKHRDKPIREQAENIIHLFTLTNLGAPAAFKYFDTTIDRKRYTSTKEVLDATLIHQSITGLYETRIDLSQLGGDGGGGSPAPGGTVSLQDEHRLFDIPVTTSLPDVWLQDFPQAWAETGGLGRAKCQAPIIIDLKPTAVPVSIKQYPMSLEAHMGIRQHIIKFLELGVLRPCRSPWNTPLLPVKKPGTQDYRPVQDLREINKRTVDIHPTVPNPYNLLSTLKPDYSWYTVLDLKDAFFCLPLAPQSQELFAFEWKDPERGISGQLTWTRLPQGFKNSPTLFNEALHRDLTDFRTQHPEVTLLQYVDDLLLAAPTKKACTQGTRHLLQELGEKGYRASAKKAQICQTKVTYLGYILSEGKRWLTPGRIETVARIPPPRNPREVREFLGKAGFCRLFIPGFAELAAPLYALTKPSTPFTWQTEHQLAFEALKKALLSAPALGLPDTSKPFTLFLDERQGIAKGVLTQKLGPWKRPVAYLSKKLDPVAAGWPPCLRIMAATAMLVKDSAKLTLGQPLTVITPHTLEAIVRQPPDRWITNARLTHYQALLLDTDRVQFGPPVTLNPATLLPVPENQPSPHDCRQVLAETHGTREDLKDQELPDADHTWYTDGSSYLDSGTRRAGAAVVDGHNTIWAQSLPPGTSAQKAELIALTKALELSKGKKANIYTDSRYAFATAHTHGSIYERRGWLTSEGKEIKNKAEIIALLKALFLPQEVAIIHCPGHQKGQDPVAVGNRQADRVARQAAMAEVLTLATEPDNTSHITAGKRTADGSEFEKRTADGSEFESPKKKAKVE

SEQ ID NO: 2022 - protein, 2102 aa, synthetic construct
  source 1..2102: note = Description of Artificial Sequence: Synthetic polypeptide
MPAAKRVKLDGGDKKYSIGLDIGTNSVGWAVITDEYKVPSKKFKVLGNTDRHSIKKNLIGALLFDSGETAEATRLKRTARRRYTRRKNRICYLQEIFSNEMAKVDDSFFHRLEESFLVEEDKKHERHPIFGNIVDEVAYHEKYPTIYHLRKKLVDSTDKADLRLIYLALAHMIKFRGHFLIEGDLNPDNSDVDKLFIQLVQTYNQLFEENPINASGVDAKAILSARLSKSRRLENLIAQLPGEKKNGLFGNLIALSLGLTPNFKSNFDLAEDAKLQLSKDTYDDDLDNLLAQIGDQYADLFLAAKNLSDAILLSDILRVNTEITKAPLSASMIKRYDEHHQDLTLLKALVRQQLPEKYKEIFFDQSKNGYAGYIDGGASQEEFYKFIKPILEKMDGTEELLVKLNREDLLRKQRTFDNGSIPHQIHLGELHAILRRQEDFYPFLKDNREKIEKILTFRIPYYVGPLARGNSRFAWMTRKSEETITPWNFEEVVDKGASAQSFIERMTNFDKNLPNEKVLPKHSLLYEYFTVYNELTKVKYVTEGMRKPAFLSGEQKKAIVDLLFKTNRKVTVKQLKEDYFKKIECFDSVEISGVEDRFNASLGTYHDLLKIIKDKDFLDNEENEDILEDIVLTLTLFEDREMIEERLKTYAHLFDDKVMKQLKRRRYTGWGRLSRKLINGIRDKQSGKTILDFLKSDGFANRNFMQLIHDDSLTFKEDIQKAQVSGQGDSLHEHIANLAGSPAIKKGILQTVKVVDELVKVMGRHKPENIVIEMARENQTTQKGQKNSRERMKRIEEGIKELGSQILKEHPVENTQLQNEKLYLYYLQNGRDMYVDQELDINRLSDYDVDHIVPQSFLKDDSIDNKVLTRSDKARGKSDNVPSEEVVKKMKNYWRQLLNAKLITQRKFDNLTKAERGGLSELDKAGFIKRQLVETRQITKHVAQILDSRMNTKYDENDKLIREVKVITLKSKLVSDFRKDFQFYKVREINNYHHAHDAYLNAVVGTALIKKYPKLESEFVYGDYKVYDVRKMIAKSEQEIGKATAKYFFYSNIMNFFKTEITLANGEIRKRPLIETNGETGEIVWDKGRDFATVRKVLSMPQVNIVKKTEVQTGGFSKESILPKRNSDKLIARKKDWDPKKYGGFDSPTVAYSVLVVAKVEKGKSKKLKSVKELLGITIMERSSFEKNPIDFLEAKGYKEVKKDLIIKLPKYSLFELENGRKRMLASAGELQKGNELALPSKYVNFLYLASHYEKLKGSPEDNEQKQLFVEQHKHYLDEIIEQISEFSKRVILADANLDKVLSAYNKHRDKPIREQAENIIHLFTLTNLGAPAAFKYFDTTIDRKRYTSTKEVLDATLIHQSITGLYETRIDLSQLGGDGGEAAAKPAPGSSGGTVSLQDEHRLFDIPVTTSLPDVWLQDFPQAWAETGGLGRAKCQAPIIIDLKPTAVPVSIKQYPMSLEAHMGIRQHIIKFLELGVLRPCRSPWNTPLLPVKKPGTQDYRPVQDLREINKRTVDIHPTVPNPYNLLSTLKPDYSWYTVLDLKDAFFCLPLAPQSQELFAFEWKDPERGISGQLTWTRLPQGFKNSPTLFNEALHRDLTDFRTQHPEVTLLQYVDDLLLAAPTKKACTQGTRHLLQELGEKGYRASAKKAQICQTKVTYLGYILSEGKRWLTPGRIETVARIPPPRNPREVREFLGKAGFCRLFIPGFAELAAPLYALTKPSTPFTWQTEHQLAFEALKKALLSAPALGLPDTSKPFTLFLDERQGIAKGVLTQKLGPWKRPVAYLSKKLDPVAAGWPPCLRIMAATAMLVKDSAKLTLGQPLTVITPHTLEAIVRQPPDRWITNARLTHYQALLLDTDRVQFGPPVTLNPATLLPVPENQPSPHDCRQVLAETHGTREDLKDQELPDADHTWYTDGSSYLDSGTRRAGAAVVDGHNTIWAQSLPPGTSAQKAELIALTKALELSKGKKANIYTDSRYAFATAHTHGSIYERRGWLTSEGKEIKNKAEIIALLKALFLPQEVAIIHCPGHQKGQDPVAVGNRQADRVARQAAMAEVLTLATEPDNTSHITAGKRTADGSEFEKRTADGSEFESPKKKAKVE

SEQ ID NO: 2023 - protein, 2094 aa, synthetic construct
  source 1..2094: note = Description of Artificial Sequence: Synthetic polypeptide
MPAAKRVKLDGGDKKYSIGLDIGTNSVGWAVITDEYKVPSKKFKVLGNTDRHSIKKNLIGALLFDSGETAEATRLKRTARRRYTRRKNRICYLQEIFSNEMAKVDDSFFHRLEESFLVEEDKKHERHPIFGNIVDEVAYHEKYPTIYHLRKKLVDSTDKADLRLIYLALAHMIKFRGHFLIEGDLNPDNSDVDKLFIQLVQTYNQLFEENPINASGVDAKAILSARLSKSRRLENLIAQLPGEKKNGLFGNLIALSLGLTPNFKSNFDLAEDAKLQLSKDTYDDDLDNLLAQIGDQYADLFLAAKNLSDAILLSDILRVNTEITKAPLSASMIKRYDEHHQDLTLLKALVRQQLPEKYKEIFFDQSKNGYAGYIDGGASQEEFYKFIKPILEKMDGTEELLVKLNREDLLRKQRTFDNGSIPHQIHLGELHAILRRQEDFYPFLKDNREKIEKILTFRIPYYVGPLARGNSRFAWMTRKSEETITPWNFEEVVDKGASAQSFIERMTNFDKNLPNEKVLPKHSLLYEYFTVYNELTKVKYVTEGMRKPAFLSGEQKKAIVDLLFKTNRKVTVKQLKEDYFKKIECFDSVEISGVEDRFNASLGTYHDLLKIIKDKDFLDNEENEDILEDIVLTLTLFEDREMIEERLKTYAHLFDDKVMKQLKRRRYTGWGRLSRKLINGIRDKQSGKTILDFLKSDGFANRNFMQLIHDDSLTFKEDIQKAQVSGQGDSLHEHIANLAGSPAIKKGILQTVKVVDELVKVMGRHKPENIVIEMARENQTTQKGQKNSRERMKRIEEGIKELGSQILKEHPVENTQLQNEKLYLYYLQNGRDMYVDQELDINRLSDYDVDHIVPQSFLKDDSIDNKVLTRSDKARGKSDNVPSEEVVKKMKNYWRQLLNAKLITQRKFDNLTKAERGGLSELDKAGFIKRQLVETRQITKHVAQILDSRMNTKYDENDKLIREVKVITLKSKLVSDFRKDFQFYKVREINNYHHAHDAYLNAVVGTALIKKYPKLESEFVYGDYKVYDVRKMIAKSEQEIGKATAKYFFYSNIMNFFKTEITLANGEIRKRPLIETNGETGEIVWDKGRDFATVRKVLSMPQVNIVKKTEVQTGGFSKESILPKRNSDKLIARKKDWDPKKYGGFDSPTVAYSVLVVAKVEKGKSKKLKSVKELLGITIMERSSFEKNPIDFLEAKGYKEVKKDLIIKLPKYSLFELENGRKRMLASAGELQKGNELALPSKYVNFLYLASHYEKLKGSPEDNEQKQLFVEQHKHYLDEIIEQISEFSKRVILADANLDKVLSAYNKHRDKPIREQAENIIHLFTLTNLGAPAAFKYFDTTIDRKRYTSTKEVLDATLIHQSITGLYETRIDLSQLGGDGGPAPGGTVSLQDEHRLFDIPVTTSLPDVWLQDFPQAWAETGGLGRAKCQAPIIIDLKPTAVPVSIKQYPMSLEAHMGIRQHIIKFLELGVLRPCRSPWNTPLLPVKKPGTQDYRPVQDLREINKRTVDIHPTVPNPYNLLSTLKPDYSWYTVLDLKDAFFCLPLAPQSQELFAFEWKDPERGISGQLTWTRLPQGFKNSPTLFNEALHRDLTDFRTQHPEVTLLQYVDDLLLAAPTKKACTQGTRHLLQELGEKGYRASAKKAQICQTKVTYLGYILSEGKRWLTPGRIETVARIPPPRNPREVREFLGKAGFCRLFIPGFAELAAPLYALTKPSTPFTWQTEHQLAFEALKKALLSAPALGLPDTSKPFTLFLDERQGIAKGVLTQKLGPWKRPVAYLSKKLDPVAAGWPPCLRIMAATAMLVKDSAKLTLGQPLTVITPHTLEAIVRQPPDRWITNARLTHYQALLLDTDRVQFGPPVTLNPATLLPVPENQPSPHDCRQVLAETHGTREDLKDQELPDADHTWYTDGSSYLDSGTRRAGAAVVDGHNTIWAQSLPPGTSAQKAELIALTKALELSKGKKANIYTDSRYAFATAHTHGSIYERRGWLTSEGKEIKNKAEIIALLKALFLPQEVAIIHCPGHQKGQDPVAVGNRQADRVARQAAMAEVLTLATEPDNTSHITAGKRTADGSEFEKRTADGSEFESPKKKAKVE

SEQ ID NO: 2024 - protein, 2097 aa, synthetic construct
  source 1..2097: note = Description of Artificial Sequence: Synthetic polypeptide
MPAAKRVKLDGGDKKYSIGLDIGTNSVGWAVITDEYKVPSKKFKVLGNTDRHSIKKNLIGALLFDSGETAEATRLKRTARRRYTRRKNRICYLQEIFSNEMAKVDDSFFHRLEESFLVEEDKKHERHPIFGNIVDEVAYHEKYPTIYHLRKKLVDSTDKADLRLIYLALAHMIKFRGHFLIEGDLNPDNSDVDKLFIQLVQTYNQLFEENPINASGVDAKAILSARLSKSRRLENLIAQLPGEKKNGLFGNLIALSLGLTPNFKSNFDLAEDAKLQLSKDTYDDDLDNLLAQIGDQYADLFLAAKNLSDAILLSDILRVNTEITKAPLSASMIKRYDEHHQDLTLLKALVRQQLPEKYKEIFFDQSKNGYAGYIDGGASQEEFYKFIKPILEKMDGTEELLVKLNREDLLRKQRTFDNGSIPHQIHLGELHAILRRQEDFYPFLKDNREKIEKILTFRIPYYVGPLARGNSRFAWMTRKSEETITPWNFEEVVDKGASAQSFIERMTNFDKNLPNEKVLPKHSLLYEYFTVYNELTKVKYVTEGMRKPAFLSGEQKKAIVDLLFKTNRKVTVKQLKEDYFKKIECFDSVEISGVEDRFNASLGTYHDLLKIIKDKDFLDNEENEDILEDIVLTLTLFEDREMIEERLKTYAHLFDDKVMKQLKRRRYTGWGRLSRKLINGIRDKQSGKTILDFLKSDGFANRNFMQLIHDDSLTFKEDIQKAQVSGQGDSLHEHIANLAGSPAIKKGILQTVKVVDELVKVMGRHKPENIVIEMARENQTTQKGQKNSRERMKRIEEGIKELGSQILKEHPVENTQLQNEKLYLYYLQNGRDMYVDQELDINRLSDYDVDHIVPQSFLKDDSIDNKVLTRSDKARGKSDNVPSEEVVKKMKNYWRQLLNAKLITQRKFDNLTKAERGGLSELDKAGFIKRQLVETRQITKHVAQILDSRMNTKYDENDKLIREVKVITLKSKLVSDFRKDFQFYKVREINNYHHAHDAYLNAVVGTALIKKYPKLESEFVYGDYKVYDVRKMIAKSEQEIGKATAKYFFYSNIMNFFKTEITLANGEIRKRPLIETNGETGEIVWDKGRDFATVRKVLSMPQVNIVKKTEVQTGGFSKESILPKRNSDKLIARKKDWDPKKYGGFDSPTVAYSVLVVAKVEKGKSKKLKSVKELLGITIMERSSFEKNPIDFLEAKGYKEVKKDLIIKLPKYSLFELENGRKRMLASAGELQKGNELALPSKYVNFLYLASHYEKLKGSPEDNEQKQLFVEQHKHYLDEIIEQISEFSKRVILADANLDKVLSAYNKHRDKPIREQAENIIHLFTLTNLGAPAAFKYFDTTIDRKRYTSTKEVLDATLIHQSITGLYETRIDLSQLGGDGGGGSGGSGGTVSLQDEHRLFDIPVTTSLPDVWLQDFPQAWAETGGLGRAKCQAPIIIDLKPTAVPVSIKQYPMSLEAHMGIRQHIIKFLELGVLRPCRSPWNTPLLPVKKPGTQDYRPVQDLREINKRTVDIHPTVPNPYNLLSTLKPDYSWYTVLDLKDAFFCLPLAPQSQELFAFEWKDPERGISGQLTWTRLPQGFKNSPTLFNEALHRDLTDFRTQHPEVTLLQYVDDLLLAAPTKKACTQGTRHLLQELGEKGYRASAKKAQICQTKVTYLGYILSEGKRWLTPGRIETVARIPPPRNPREVREFLGKAGFCRLFIPGFAELAAPLYALTKPSTPFTWQTEHQLAFEALKKALLSAPALGLPDTSKPFTLFLDERQGIAKGVLTQKLGPWKRPVAYLSKKLDPVAAGWPPCLRIMAATAMLVKDSAKLTLGQPLTVITPHTLEAIVRQPPDRWITNARLTHYQALLLDTDRVQFGPPVTLNPATLLPVPENQPSPHDCRQVLAETHGTREDLKDQELPDADHTWYTDGSSYLDSGTRRAGAAVVDGHNTIWAQSLPPGTSAQKAELIALTKALELSKGKKANIYTDSRYAFATAHTHGSIYERRGWLTSEGKEIKNKAEIIALLKALFLPQEVAIIHCPGHQKGQDPVAVGNRQADRVARQAAMAEVLTLATEPDNTSHITAGKRTADGSEFEKRTADGSEFESPKKKAKVE

SEQ ID NO: 2025 - protein, 2102 aa, synthetic construct
  source 1..2102: note = Description of Artificial Sequence: Synthetic polypeptide
MPAAKRVKLDGGDKKYSIGLDIGTNSVGWAVITDEYKVPSKKFKVLGNTDRHSIKKNLIGALLFDSGETAEATRLKRTARRRYTRRKNRICYLQEIFSNEMAKVDDSFFHRLEESFLVEEDKKHERHPIFGNIVDEVAYHEKYPTIYHLRKKLVDSTDKADLRLIYLALAHMIKFRGHFLIEGDLNPDNSDVDKLFIQLVQTYNQLFEENPINASGVDAKAILSARLSKSRRLENLIAQLPGEKKNGLFGNLIALSLGLTPNFKSNFDLAEDAKLQLSKDTYDDDLDNLLAQIGDQYADLFLAAKNLSDAILLSDILRVNTEITKAPLSASMIKRYDEHHQDLTLLKALVRQQLPEKYKEIFFDQSKNGYAGYIDGGASQEEFYKFIKPILEKMDGTEELLVKLNREDLLRKQRTFDNGSIPHQIHLGELHAILRRQEDFYPFLKDNREKIEKILTFRIPYYVGPLARGNSRFAWMTRKSEETITPWNFEEVVDKGASAQSFIERMTNFDKNLPNEKVLPKHSLLYEYFTVYNELTKVKYVTEGMRKPAFLSGEQKKAIVDLLFKTNRKVTVKQLKEDYFKKIECFDSVEISGVEDRFNASLGTYHDLLKIIKDKDFLDNEENEDILEDIVLTLTLFEDREMIEERLKTYAHLFDDKVMKQLKRRRYTGWGRLSRKLINGIRDKQSGKTILDFLKSDGFANRNFMQLIHDDSLTFKEDIQKAQVSGQGDSLHEHIANLAGSPAIKKGILQTVKVVDELVKVMGRHKPENIVIEMARENQTTQKGQKNSRERMKRIEEGIKELGSQILKEHPVENTQLQNEKLYLYYLQNGRDMYVDQELDINRLSDYDVDHIVPQSFLKDDSIDNKVLTRSDKARGKSDNVPSEEVVKKMKNYWRQLLNAKLITQRKFDNLTKAERGGLSELDKAGFIKRQLVETRQITKHVAQILDSRMNTKYDENDKLIREVKVITLKSKLVSDFRKDFQFYKVREINNYHHAHDAYLNAVVGTALIKKYPKLESEFVYGDYKVYDVRKMIAKSEQEIGKATAKYFFYSNIMNFFKTEITLANGEIRKRPLIETNGETGEIVWDKGRDFATVRKVLSMPQVNIVKKTEVQTGGFSKESILPKRNSDKLIARKKDWDPKKYGGFDSPTVAYSVLVVAKVEKGKSKKLKSVKELLGITIMERSSFEKNPIDFLEAKGYKEVKKDLIIKLPKYSLFELENGRKRMLASAGELQKGNELALPSKYVNFLYLASHYEKLKGSPEDNEQKQLFVEQHKHYLDEIIEQISEFSKRVILADANLDKVLSAYNKHRDKPIREQAENIIHLFTLTNLGAPAAFKYFDTTIDRKRYTSTKEVLDATLIHQSITGLYETRIDLSQLGGDGGGSSGGSEAAAKGGTVSLQDEHRLFDIPVTTSLPDVWLQDFPQAWAETGGLGRAKCQAPIIIDLKPTAVPVSIKQYPMSLEAHMGIRQHIIKFLELGVLRPCRSPWNTPLLPVKKPGTQDYRPVQDLREINKRTVDIHPTVPNPYNLLSTLKPDYSWYTVLDLKDAFFCLPLAPQSQELFAFEWKDPERGISGQLTWTRLPQGFKNSPTLFNEALHRDLTDFRTQHPEVTLLQYVDDLLLAAPTKKACTQGTRHLLQELGEKGYRASAKKAQICQTKVTYLGYILSEGKRWLTPGRIETVARIPPPRNPREVREFLGKAGFCRLFIPGFAELAAPLYALTKPSTPFTWQTEHQLAFEALKKALLSAPALGLPDTSKPFTLFLDERQGIAKGVLTQKLGPWKRPVAYLSKKLDPVAAGWPPCLRIMAATAMLVKDSAKLTLGQPLTVITPHTLEAIVRQPPDRWITNARLTHYQALLLDTDRVQFGPPVTLNPATLLPVPENQPSPHDCRQVLAETHGTREDLKDQELPDADHTWYTDGSSYLDSGTRRAGAAVVDGHNTIWAQSLPPGTSAQKAELIALTKALELSKGKKANIYTDSRYAFATAHTHGSIYERRGWLTSEGKEIKNKAEIIALLKALFLPQEVAIIHCPGHQKGQDPVAVGNRQADRVARQAAMAEVLTLATEPDNTSHITAGKRTADGSEFEKRTADGSEFESPKKKAKVE

SEQ ID NO: 2026 - protein, 2100 aa, synthetic construct
  source 1..2100: note = Description of Artificial Sequence: Synthetic polypeptide
MPAAKRVKLDGGDKKYSIGLDIGTNSVGWAVITDEYKVPSKKFKVLGNTDRHSIKKNLIGALLFDSGETAEATRLKRTARRRYTRRKNRICYLQEIFSNEMAKVDDSFFHRLEESFLVEEDKKHERHPIFGNIVDEVAYHEKYPTIYHLRKKLVDSTDKADLRLIYLALAHMIKFRGHFLIEGDLNPDNSDVDKLFIQLVQTYNQLFEENPINASGVDAKAILSARLSKSRRLENLIAQLPGEKKNGLFGNLIALSLGLTPNFKSNFDLAEDAKLQLSKDTYDDDLDNLLAQIGDQYADLFLAAKNLSDAILLSDILRVNTEITKAPLSASMIKRYDEHHQDLTLLKALVRQQLPEKYKEIFFDQSKNGYAGYIDGGASQEEFYKFIKPILEKMDGTEELLVKLNREDLLRKQRTFDNGSIPHQIHLGELHAILRRQEDFYPFLKDNREKIEKILTFRIPYYVGPLARGNSRFAWMTRKSEETITPWNFEEVVDKGASAQSFIERMTNFDKNLPNEKVLPKHSLLYEYFTVYNELTKVKYVTEGMRKPAFLSGEQKKAIVDLLFKTNRKVTVKQLKEDYFKKIECFDSVEISGVEDRFNASLGTYHDLLKIIKDKDFLDNEENEDILEDIVLTLTLFEDREMIEERLKTYAHLFDDKVMKQLKRRRYTGWGRLSRKLINGIRDKQSGKTILDFLKSDGFANRNFMQLIHDDSLTFKEDIQKAQVSGQGDSLHEHIANLAGSPAIKKGILQTVKVVDELVKVMGRHKPENIVIEMARENQTTQKGQKNSRERMKRIEEGIKELGSQILKEHPVENTQLQNEKLYLYYLQNGRDMYVDQELDINRLSDYDVDHIVPQSFLKDDSIDNKVLTRSDKARGKSDNVPSEEVVKKMKNYWRQLLNAKLITQRKFDNLTKAERGGLSELDKAGFIKRQLVETRQITKHVAQILDSRMNTKYDENDKLIREVKVITLKSKLVSDFRKDFQFYKVREINNYHHAHDAYLNAVVGTALIKKYPKLESEFVYGDYKVYDVRKMIAKSEQEIGKATAKYFFYSNIMNFFKTEITLANGEIRKRPLIETNGETGEIVWDKGRDFATVRKVLSMPQVNIVKKTEVQTGGFSKESILPKRNSDKLIARKKDWDPKKYGGFDSPTVAYSVLVVAKVEKGKSKKLKSVKELLGITIMERSSFEKNPIDFLEAKGYKEVKKDLIIKLPKYSLFELENGRKRMLASAGELQKGNELALPSKYVNFLYLASHYEKLKGSPEDNEQKQLFVEQHKHYLDEIIEQISEFSKRVILADANLDKVLSAYNKHRDKPIREQAENIIHLFTLTNLGAPAAFKYFDTTIDRKRYTSTKEVLDATLIHQSITGLYETRIDLSQLGGDGGGGGGGSGSSGGTVSLQDEHRLFDIPVTTSLPDVWLQDFPQAWAETGGLGRAKCQAPIIIDLKPTAVPVSIKQYPMSLEAHMGIRQHIIKFLELGVLRPCRSPWNTPLLPVKKPGTQDYRPVQDLREINKRTVDIHPTVPNPYNLLSTLKPDYSWYTVLDLKDAFFCLPLAPQSQELFAFEWKDPERGISGQLTWTRLPQGFKNSPTLFNEALHRDLTDFRTQHPEVTLLQYVDDLLLAAPTKKACTQGTRHLLQELGEKGYRASAKKAQICQTKVTYLGYILSEGKRWLTPGRIETVARIPPPRNPREVREFLGKAGFCRLFIPGFAELAAPLYALTKPSTPFTWQTEHQLAFEALKKALLSAPALGLPDTSKPFTLFLDERQGIAKGVLTQKLGPWKRPVAYLSKKLDPVAAGWPPCLRIMAATAMLVKDSAKLTLGQPLTVITPHTLEAIVRQPPDRWITNARLTHYQALLLDTDRVQFGPPVTLNPATLLPVPENQPSPHDCRQVLAETHGTREDLKDQELPDADHTWYTDGSSYLDSGTRRAGAAVVDGHNTIWAQSLPPGTSAQKAELIALTKALELSKGKKANIYTDSRYAFATAHTHGSIYERRGWLTSEGKEIKNKAEIIALLKALFLPQEVAIIHCPGHQKGQDPVAVGNRQADRVARQAAMAEVLTLATEPDNTSHITAGKRTADGSEFEKRTADGSEFESPKKKAKVE

SEQ ID NO: 2027 - protein, 2102 aa, synthetic construct
  source 1..2102: note = Description of Artificial Sequence: Synthetic polypeptide
MPAAKRVKLDGGDKKYSIGLDIGTNSVGWAVITDEYKVPSKKFKVLGNTDRHSIKKNLIGALLFDSGETAEATRLKRTARRRYTRRKNRICYLQEIFSNEMAKVDDSFFHRLEESFLVEEDKKHERHPIFGNIVDEVAYHEKYPTIYHLRKKLVDSTDKADLRLIYLALAHMIKFRGHFLIEGDLNPDNSDVDKLFIQLVQTYNQLFEENPINASGVDAKAILSARLSKSRRLENLIAQLPGEKKNGLFGNLIALSLGLTPNFKSNFDLAEDAKLQLSKDTYDDDLDNLLAQIGDQYADLFLAAKNLSDAILLSDILRVNTEITKAPLSASMIKRYDEHHQDLTLLKALVRQQLPEKYKEIFFDQSKNGYAGYIDGGASQEEFYKFIKPILEKMDGTEELLVKLNREDLLRKQRTFDNGSIPHQIHLGELHAILRRQEDFYPFLKDNREKIEKILTFRIPYYVGPLARGNSRFAWMTRKSEETITPWNFEEVVDKGASAQSFIERMTNFDKNLPNEKVLPKHSLLYEYFTVYNELTKVKYVTEGMRKPAFLSGEQKKAIVDLLFKTNRKVTVKQLKEDYFKKIECFDSVEISGVEDRFNASLGTYHDLLKIIKDKDFLDNEENEDILEDIVLTLTLFEDREMIEERLKTYAHLFDDKVMKQLKRRRYTGWGRLSRKLINGIRDKQSGKTILDFLKSDGFANRNFMQLIHDDSLTFKEDIQKAQVSGQGDSLHEHIANLAGSPAIKKGILQTVKVVDELVKVMGRHKPENIVIEMARENQTTQKGQKNSRERMKRIEEGIKELGSQILKEHPVENTQLQNEKLYLYYLQNGRDMYVDQELDINRLSDYDVDHIVPQSFLKDDSIDNKVLTRSDKARGKSDNVPSEEVVKKMKNYWRQLLNAKLITQRKFDNLTKAERGGLSELDKAGFIKRQLVETRQITKHVAQILDSRMNTKYDENDKLIREVKVITLKSKLVSDFRKDFQFYKVREINNYHHAHDAYLNAVVGTALIKKYPKLESEFVYGDYKVYDVRKMIAKSEQEIGKATAKYFFYSNIMNFFKTEITLANGEIRKRPLIETNGETGEIVWDKGRDFATVRKVLSMPQVNIVKKTEVQTGGFSKESILPKRNSDKLIARKKDWDPKKYGGFDSPTVAYSVLVVAKVEKGKSKKLKSVKELLGITIMERSSFEKNPIDFLEAKGYKEVKKDLIIKLPKYSLFELENGRKRMLASAGELQKGNELALPSKYVNFLYLASHYEKLKGSPEDNEQKQLFVEQHKHYLDEIIEQISEFSKRVILADANLDKVLSAYNKHRDKPIREQAENIIHLFTLTNLGAPAAFKYFDTTIDRKRYTSTKEVLDATLIHQSITGLYETRIDLSQLGGDGGEAAAKGGSPAPGGTVSLQDEHRLFDIPVTTSLPDVWLQDFPQAWAETGGLGRAKCQAPIIIDLKPTAVPVSIKQYPMSLEAHMGIRQHIIKFLELGVLRPCRSPWNTPLLPVKKPGTQDYRPVQDLREINKRTVDIHPTVPNPYNLLSTLKPDYSWYTVLDLKDAFFCLPLAPQSQELFAFEWKDPERGISGQLTWTRLPQGFKNSPTLFNEALHRDLTDFRTQHPEVTLLQYVDDLLLAAPTKKACTQGTRHLLQELGEKGYRASAKKAQICQTKVTYLGYILSEGKRWLTPGRIETVARIPPPRNPREVREFLGKAGFCRLFIPGFAELAAPLYALTKPSTPFTWQTEHQLAFEALKKALLSAPALGLPDTSKPFTLFLDERQGIAKGVLTQKLGPWKRPVAYLSKKLDPVAAGWPPCLRIMAATAMLVKDSAKLTLGQPLTVITPHTLEAIVRQPPDRWITNARLTHYQALLLDTDRVQFGPPVTLNPATLLPVPENQPSPHDCRQVLAETHGTREDLKDQELPDADHTWYTDGSSYLDSGTRRAGAAVVDGHNTIWAQSLPPGTSAQKAELIALTKALELSKGKKANIYTDSRYAFATAHTHGSIYERRGWLTSEGKEIKNKAEIIALLKALFLPQEVAIIHCPGHQKGQDPVAVGNRQADRVARQAAMAEVLTLATEPDNTSHITAGKRTADGSEFEKRTADGSEFESPKKKAKVE

SEQ ID NO: 2028 - protein, 2102 aa, synthetic construct
  source 1..2102: note = Description of Artificial Sequence: Synthetic polypeptide
MPAAKRVKLDGGDKKYSIGLDIGTNSVGWAVITDEYKVPSKKFKVLGNTDRHSIKKNLIGALLFDSGETAEATRLKRTARRRYTRRKNRICYLQEIFSNEMAKVDDSFFHRLEESFLVEEDKKHERHPIFGNIVDEVAYHEKYPTIYHLRKKLVDSTDKADLRLIYLALAHMIKFRGHFLIEGDLNPDNSDVDKLFIQLVQTYNQLFEENPINASGVDAKAILSARLSKSRRLENLIAQLPGEKKNGLFGNLIALSLGLTPNFKSNFDLAEDAKLQLSKDTYDDDLDNLLAQIGDQYADLFLAAKNLSDAILLSDILRVNTEITKAPLSASMIKRYDEHHQDLTLLKALVRQQLPEKYKEIFFDQSKNGYAGYIDGGASQEEFYKFIKPILEKMDGTEELLVKLNREDLLRKQRTFDNGSIPHQIHLGELHAILRRQEDFYPFLKDNREKIEKILTFRIPYYVGPLARGNSRFAWMTRKSEETITPWNFEEVVDKGASAQSFIERMTNFDKNLPNEKVLPKHSLLYEYFTVYNELTKVKYVTEGMRKPAFLSGEQKKAIVDLLFKTNRKVTVKQLKEDYFKKIECFDSVEISGVEDRFNASLGTYHDLLKIIKDKDFLDNEENEDILEDIVLTLTLFEDREMIEERLKTYAHLFDDKVMKQLKRRRYTGWGRLSRKLINGIRDKQSGKTILDFLKSDGFANRNFMQLIHDDSLTFKEDIQKAQVSGQGDSLHEHIANLAGSPAIKKGILQTVKVVDELVKVMGRHKPENIVIEMARENQTTQKGQKNSRERMKRIEEGIKELGSQILKEHPVENTQLQNEKLYLYYLQNGRDMYVDQELDINRLSDYDVDHIVPQSFLKDDSIDNKVLTRSDKARGKSDNVPSEEVVKKMKNYWRQLLNAKLITQRKFDNLTKAERGGLSELDKAGFIKRQLVETRQITKHVAQILDSRMNTKYDENDKLIREVKVITLKSKLVSDFRKDFQFYKVREINNYHHAHDAYLNAVVGTALIKKYPKLESEFVYGDYKVYDVRKMIAKSEQEIGKATAKYFFYSNIMNFFKTEITLANGEIRKRPLIETNGETGEIVWDKGRDFATVRKVLSMPQVNIVKKTEVQTGGFSKESILPKRNSDKLIARKKDWDPKKYGGFDSPTVAYSVLVVAKVEKGKSKKLKSVKELLGITIMERSSFEKNPIDFLEAKGYKEVKKDLIIKLPKYSLFELENGRKRMLASAGELQKGNELALPSKYVNFLYLASHYEKLKGSPEDNEQKQLFVEQHKHYLDEIIEQISEFSKRVILADANLDKVLSAYNKHRDKPIREQAENIIHLFTLTNLGAPAAFKYFDTTIDRKRYTSTKEVLDATLIHQSITGLYETRIDLSQLGGDGGEAAAKPAPGGSGGTVSLQDEHRLFDIPVTTSLPDVWLQDFPQAWAETGGLGRAKCQAPIIIDLKPTAVPVSIKQYPMSLEAHMGIRQHIIKFLELGVLRPCRSPWNTPLLPVKKPGTQDYRPVQDLREINKRTVDIHPTVPNPYNLLSTLKPDYSWYTVLDLKDAFFCLPLAPQSQELFAFEWKDPERGISGQLTWTRLPQGFKNSPTLFNEALHRDLTDFRTQHPEVTLLQYVDDLLLAAPTKKACTQGTRHLLQELGEKGYRASAKKAQICQTKVTYLGYILSEGKRWLTPGRIETVARIPPPRNPREVREFLGKAGFCRLFIPGFAELAAPLYALTKPSTPFTWQTEHQLAFEALKKALLSAPALGLPDTSKPFTLFLDERQGIAKGVLTQKLGPWKRPVAYLSKKLDPVAAGWPPCLRIMAATAMLVKDSAKLTLGQPLTVITPHTLEAIVRQPPDRWITNARLTHYQALLLDTDRVQFGPPVTLNPATLLPVPENQPSPHDCRQVLAETHGTREDLKDQELPDADHTWYTDGSSYLDSGTRRAGAAVVDGHNTIWAQSLPPGTSAQKAELIALTKALELSKGKKANIYTDSRYAFATAHTHGSIYERRGWLTSEGKEIKNKAEIIALLKALFLPQEVAIIHCPGHQKGQDPVAVGNRQADRVARQAAMAEVLTLATEPDNTSHITAGKRTADGSEFEKRTADGSEFESPKKKAKVE

SEQ ID NO: 2029 - protein, 2097 aa, synthetic construct
  source 1..2097: note = Description of Artificial Sequence: Synthetic polypeptide
MPAAKRVKLDGGDKKYSIGLDIGTNSVGWAVITDEYKVPSKKFKVLGNTDRHSIKKNLIGALLFDSGETAEATRLKRTARRRYTRRKNRICYLQEIFSNEMAKVDDSFFHRLEESFLVEEDKKHERHPIFGNIVDEVAYHEKYPTIYHLRKKLVDSTDKADLRLIYLALAHMIKFRGHFLIEGDLNPDNSDVDKLFIQLVQTYNQLFEENPINASGVDAKAILSARLSKSRRLENLIAQLPGEKKNGLFGNLIALSLGLTPNFKSNFDLAEDAKLQLSKDTYDDDLDNLLAQIGDQYADLFLAAKNLSDAILLSDILRVNTEITKAPLSASMIKRYDEHHQDLTLLKALVRQQLPEKYKEIFFDQSKNGYAGYIDGGASQEEFYKFIKPILEKMDGTEELLVKLNREDLLRKQRTFDNGSIPHQIHLGELHAILRRQEDFYPFLKDNREKIEKILTFRIPYYVGPLARGNSRFAWMTRKSEETITPWNFEEVVDKGASAQSFIERMTNFDKNLPNEKVLPKHSLLYEYFTVYNELTKVKYVTEGMRKPAFLSGEQKKAIVDLLFKTNRKVTVKQLKEDYFKKIECFDSVEISGVEDRFNASLGTYHDLLKIIKDKDFLDNEENEDILEDIVLTLTLFEDREMIEERLKTYAHLFDDKVMKQLKRRRYTGWGRLSRKLINGIRDKQSGKTILDFLKSDGFANRNFMQLIHDDSLTFKEDIQKAQVSGQGDSLHEHIANLAGSPAIKKGILQTVKVVDELVKVMGRHKPENIVIEMARENQTTQKGQKNSRERMKRIEEGIKELGSQILKEHPVENTQLQNEKLYLYYLQNGRDMYVDQELDINRLSDYDVDHIVPQSFLKDDSIDNKVLTRSDKARGKSDNVPSEEVVKKMKNYWRQLLNAKLITQRKFDNLTKAERGGLSELDKAGFIKRQLVETRQITKHVAQILDSRMNTKYDENDKLIREVKVITLKSKLVSDFRKDFQFYKVREINNYHHAHDAYLNAVVGTALIKKYPKLESEFVYGDYKVYDVRKMIAKSEQEIGKATAKYFFYSNIMNFFKTEITLANGEIRKRPLIETNGETGEIVWDKGRDFATVRKVLSMPQVNIVKKTEVQTGGFSKESILPKRNSDKLIARKKDWDPKKYGGFDSPTVAYSVLVVAKVEKGKSKKLKSVKELLGITIMERSSFEKNPIDFLEAKGYKEVKKDLIIKLPKYSLFELENGRKRMLASAGELQKGNELALPSKYVNFLYLASHYEKLKGSPEDNEQKQLFVEQHKHYLDEIIEQISEFSKRVILADANLDKVLSAYNKHRDKPIREQAENIIHLFTLTNLGAPAAFKYFDTTIDRKRYTSTKEVLDATLIHQSITGLYETRIDLSQLGGDGGGGGGGSGGTVSLQDEHRLFDIPVTTSLPDVWLQDFPQAWAETGGLGRAKCQAPIIIDLKPTAVPVSIKQYPMSLEAHMGIRQHIIKFLELGVLRPCRSPWNTPLLPVKKPGTQDYRPVQDLREINKRTVDIHPTVPNPYNLLSTLKPDYSWYTVLDLKDAFFCLPLAPQSQELFAFEWKDPERGISGQLTWTRLPQGFKNSPTLFNEALHRDLTDFRTQHPEVTLLQYVDDLLLAAPTKKACTQGTRHLLQELGEKGYRASAKKAQICQTKVTYLGYILSEGKRWLTPGRIETVARIPPPRNPREVREFLGKAGFCRLFIPGFAELAAPLYALTKPSTPFTWQTEHQLAFEALKKALLSAPALGLPDTSKPFTLFLDERQGIAKGVLTQKLGPWKRPVAYLSKKLDPVAAGWPPCLRIMAATAMLVKDSAKLTLGQPLTVITPHTLEAIVRQPPDRWITNARLTHYQALLLDTDRVQFGPPVTLNPATLLPVPENQPSPHDCRQVLAETHGTREDLKDQELPDADHTWYTDGSSYLDSGTRRAGAAVVDGHNTIWAQSLPPGTSAQKAELIALTKALELSKGKKANIYTDSRYAFATAHTHGSIYERRGWLTSEGKEIKNKAEIIALLKALFLPQEVAIIHCPGHQKGQDPVAVGNRQADRVARQAAMAEVLTLATEPDNTSHITAGKRTADGSEFEKRTADGSEFESPKKKAKVE

SEQ ID NO: 2030 - protein, 2100 aa, synthetic construct
  source 1..2100: note = Description of Artificial Sequence: Synthetic polypeptide
MPAAKRVKLDGGDKKYSIGLDIGTNSVGWAVITDEYKVPSKKFKVLGNTDRHSIKKNLIGALLFDSGETAEATRLKRTARRRYTRRKNRICYLQEIFSNEMAKVDDSFFHRLEESFLVEEDKKHERHPIFGNIVDEVAYHEKYPTIYHLRKKLVDSTDKADLRLIYLALAHMIKFRGHFLIEGDLNPDNSDVDKLFIQLVQTYNQLFEENPINASGVDAKAILSARLSKSRRLENLIAQLPGEKKNGLFGNLIALSLGLTPNFKSNFDLAEDAKLQLSKDTYDDDLDNLLAQIGDQYADLFLAAKNLSDAILLSDILRVNTEITKAPLSASMIKRYDEHHQDLTLLKALVRQQLPEKYKEIFFDQSKNGYAGYIDGGASQEEFYKFIKPILEKMDGTEELLVKLNREDLLRKQRTFDNGSIPHQIHLGELHAILRRQEDFYPFLKDNREKIEKILTFRIPYYVGPLARGNSRFAWMTRKSEETITPWNFEEVVDKGASAQSFIERMTNFDKNLPNEKVLPKHSLLYEYFTVYNELTKVKYVTEGMRKPAFLSGEQKKAIVDLLFKTNRKVTVKQLKEDYFKKIECFDSVEISGVEDRFNASLGTYHDLLKIIKDKDFLDNEENEDILEDIVLTLTLFEDREMIEERLKTYAHLFDDKVMKQLKRRRYTGWGRLSRKLINGIRDKQSGKTILDFLKSDGFANRNFMQLIHDDSLTFKEDIQKAQVSGQGDSLHEHIANLAGSPAIKKGILQTVKVVDELVKVMGRHKPENIVIEMARENQTTQKGQKNSRERMKRIEEGIKELGSQILKEHPVENTQLQNEKLYLYYLQNGRDMYVDQELDINRLSDYDVDHIVPQSFLKDDSIDNKVLTRSDKARGKSDNVPSEEVVKKMKNYWRQLLNAKLITQRKFDNLTKAERGGLSELDKAGFIKRQLVETRQITKHVAQILDSRMNTKYDENDKLIREVKVITLKSKLVSDFRKDFQFYKVREINNYHHAHDAYLNAVVGTALIKKYPKLESEFVYGDYKVYDVRKMIAKSEQEIGKATAKYFFYSNIMNFFKTEITLANGEIRKRPLIETNGETGEIVWDKGRDFATVRKVLSMPQVNIVKKTEVQTGGFSKESILPKRNSDKLIARKKDWDPKKYGGFDSPTVAYSVLVVAKVEKGKSKKLKSVKELLGITIMERSSFEKNPIDFLEAKGYKEVKKDLIIKLPKYSLFELENGRKRMLASAGELQKGNELALPSKYVNFLYLASHYEKLKGSPEDNEQKQLFVEQHKHYLDEIIEQISEFSKRVILADANLDKVLSAYNKHRDKPIREQAENIIHLFTLTNLGAPAAFKYFDTTIDRKRYTSTKEVLDATLIHQSITGLYETRIDLSQLGGDGGGGSGGSGGSGGTVSLQDEHRLFDIPVTTSLPDVWLQDFPQAWAETGGLGRAKCQAPIIIDLKPTAVPVSIKQYPMSLEAHMGIRQHIIKFLELGVLRPCRSPWNTPLLPVKKPGTQDYRPVQDLREINKRTVDIHPTVPNPYNLLSTLKPDYSWYTVLDLKDAFFCLPLAPQSQELFAFEWKDPERGISGQLTWTRLPQGFKNSPTLFNEALHRDLTDFRTQHPEVTLLQYVDDLLLAAPTKKACTQGTRHLLQELGEKGYRASAKKAQICQTKVTYLGYILSEGKRWLTPGRIETVARIPPPRNPREVREFLGKAGFCRLFIPGFAELAAPLYALTKPSTPFTWQTEHQLAFEALKKALLSAPALGLPDTSKPFTLFLDERQGIAKGVLTQKLGPWKRPVAYLSKKLDPVAAGWPPCLRIMAATAMLVKDSAKLTLGQPLTVITPHTLEAIVRQPPDRWITNARLTHYQALLLDTDRVQFGPPVTLNPATLLPVPENQPSPHDCRQVLAETHGTREDLKDQELPDADHTWYTDGSSYLDSGTRRAGAAVVDGHNTIWAQSLPPGTSAQKAELIALTKALELSKGKKANIYTDSRYAFATAHTHGSIYERRGWLTSEGKEIKNKAEIIALLKALFLPQEVAIIHCPGHQKGQDPVAVGNRQADRVARQAAMAEVLTLATEPDNTSHITAGKRTADGSEFEKRTADGSEFESPKKKAKVE

SEQ ID NO: 2031 - protein, 2097 aa, synthetic construct
  source 1..2097: note = Description of Artificial Sequence: Synthetic polypeptide
MPAAKRVKLDGGDKKYSIGLDIGTNSVGWAVITDEYKVPSKKFKVLGNTDRHSIKKNLIGALLFDSGETAEATRLKRTARRRYTRRKNRICYLQEIFSNEMAKVDDSFFHRLEESFLVEEDKKHERHPIFGNIVDEVAYHEKYPTIYHLRKKLVDSTDKADLRLIYLALAHMIKFRGHFLIEGDLNPDNSDVDKLFIQLVQTYNQLFEENPINASGVDAKAILSARLSKSRRLENLIAQLPGEKKNGLFGNLIALSLGLTPNFKSNFDLAEDAKLQLSKDTYDDDLDNLLAQIGDQYADLFLAAKNLSDAILLSDILRVNTEITKAPLSASMIKRYDEHHQDLTLLKALVRQQLPEKYKEIFFDQSKNGYAGYIDGGASQEEFYKFIKPILEKMDGTEELLVKLNREDLLRKQRTFDNGSIPHQIHLGELHAILRRQEDFYPFLKDNREKIEKILTFRIPYYVGPLARGNSRFAWMTRKSEETITPWNFEEVVDKGASAQSFIERMTNFDKNLPNEKVLPKHSLLYEYFTVYNELTKVKYVTEGMRKPAFLSGEQKKAIVDLLFKTNRKVTVKQLKEDYFKKIECFDSVEISGVEDRFNASLGTYHDLLKIIKDKDFLDNEENEDILEDIVLTLTLFEDREMIEERLKTYAHLFDDKVMKQLKRRRYTGWGRLSRKLINGIRDKQSGKTILDFLKSDGFANRNFMQLIHDDSLTFKEDIQKAQVSGQGDSLHEHIANLAGSPAIKKGILQTVKVVDELVKVMGRHKPENIVIEMARENQTTQKGQKNSRERMKRIEEGIKELGSQILKEHPVENTQLQNEKLYLYYLQNGRDMYVDQELDINRLSDYDVDHIVPQSFLKDDSIDNKVLTRSDKARGKSDNVPSEEVVKKMKNYWRQLLNAKLITQRKFDNLTKAERGGLSELDKAGFIKRQLVETRQITKHVAQILDSRMNTKYDENDKLIREVKVITLKSKLVSDFRKDFQFYKVREINNYHHAHDAYLNAVVGTALIKKYPKLESEFVYGDYKVYDVRKMIAKSEQEIGKATAKYFFYSNIMNFFKTEITLANGEIRKRPLIETNGETGEIVWDKGRDFATVRKVLSMPQVNIVKKTEVQTGGFSKESILPKRNSDKLIARKKDWDPKKYGGFDSPTVAYSVLVVAKVEKGKSKKLKSVKELLGITIMERSSFEKNPIDFLEAKGYKEVKKDLIIKLPKYSLFELENGRKRMLASAGELQKGNELALPSKYVNFLYLASHYEKLKGSPEDNEQKQLFVEQHKHYLDEIIEQISEFSKRVILADANLDKVLSAYNKHRDKPIREQAENIIHLFTLTNLGAPAAFKYFDTTIDRKRYTSTKEVLDATLIHQSITGLYETRIDLSQLGGDGGGGSGSSGGTVSLQDEHRLFDIPVTTSLPDVWLQDFPQAWAETGGLGRAKCQAPIIIDLKPTAVPVSIKQYPMSLEAHMGIRQHIIKFLELGVLRPCRSPWNTPLLPVKKPGTQDYRPVQDLREINKRTVDIHPTVPNPYNLLSTLKPDYSWYTVLDLKDAFFCLPLAPQSQELFAFEWKDPERGISGQLTWTRLPQGFKNSPTLFNEALHRDLTDFRTQHPEVTLLQYVDDLLLAAPTKKACTQGTRHLLQELGEKGYRASAKKAQICQTKVTYLGYILSEGKRWLTPGRIETVARIPPPRNPREVREFLGKAGFCRLFIPGFAELAAPLYALTKPSTPFTWQTEHQLAFEALKKALLSAPALGLPDTSKPFTLFLDERQGIAKGVLTQKLGPWKRPVAYLSKKLDPVAAGWPPCLRIMAATAMLVKDSAKLTLGQPLTVITPHTLEAIVRQPPDRWITNARLTHYQALLLDTDRVQFGPPVTLNPATLLPVPENQPSPHDCRQVLAETHGTREDLKDQELPDADHTWYTDGSSYLDSGTRRAGAAVVDGHNTIWAQSLPPGTSAQKAELIALTKALELSKGKKANIYTDSRYAFATAHTHGSIYERRGWLTSEGKEIKNKAEIIALLKALFLPQEVAIIHCPGHQKGQDPVAVGNRQADRVARQAAMAEVLTLATEPDNTSHITAGKRTADGSEFEKRTADGSEFESPKKKAKVE

SEQ ID NO: 2032 - protein, 2097 aa, synthetic construct
  source 1..2097: note = Description of Artificial Sequence: Synthetic polypeptide
MPAAKRVKLDGGDKKYSIGLDIGTNSVGWAVITDEYKVPSKKFKVLGNTDRHSIKKNLIGALLFDSGETAEATRLKRTARRRYTRRKNRICYLQEIFSNEMAKVDDSFFHRLEESFLVEEDKKHERHPIFGNIVDEVAYHEKYPTIYHLRKKLVDSTDKADLRLIYLALAHMIKFRGHFLIEGDLNPDNSDVDKLFIQLVQTYNQLFEENPINASGVDAKAILSARLSKSRRLENLIAQLPGEKKNGLFGNLIALSLGLTPNFKSNFDLAEDAKLQLSKDTYDDDLDNLLAQIGDQYADLFLAAKNLSDAILLSDILRVNTEITKAPLSASMIKRYDEHHQDLTLLKALVRQQLPEKYKEIFFDQSKNGYAGYIDGGASQEEFYKFIKPILEKMDGTEELLVKLNREDLLRKQRTFDNGSIPHQIHLGELHAILRRQEDFYPFLKDNREKIEKILTFRIPYYVGPLARGNSRFAWMTRKSEETITPWNFEEVVDKGASAQSFIERMTNFDKNLPNEKVLPKHSLLYEYFTVYNELTKVKYVTEGMRKPAFLSGEQKKAIVDLLFKTNRKVTVKQLKEDYFKKIECFDSVEISGVEDRFNASLGTYHDLLKIIKDKDFLDNEENEDILEDIVLTLTLFEDREMIEERLKTYAHLFDDKVMKQLKRRRYTGWGRLSRKLINGIRDKQSGKTILDFLKSDGFANRNFMQLIHDDSLTFKEDIQKAQVSGQGDSLHEHIANLAGSPAIKKGILQTVKVVDELVKVMGRHKPENIVIEMARENQTTQKGQKNSRERMKRIEEGIKELGSQILKEHPVENTQLQNEKLYLYYLQNGRDMYVDQELDINRLSDYDVDHIVPQSFLKDDSIDNKVLTRSDKARGKSDNVPSEEVVKKMKNYWRQLLNAKLITQRKFDNLTKAERGGLSELDKAGFIKRQLVETRQITKHVAQILDSRMNTKYDENDKLIREVKVITLKSKLVSDFRKDFQFYKVREINNYHHAHDAYLNAVVGTALIKKYPKLESEFVYGDYKVYDVRKMIAKSEQEIGKATAKYFFYSNIMNFFKTEITLANGEIRKRPLIETNGETGEIVWDKGRDFATVRKVLSMPQVNIVKKTEVQTGGFSKESILPKRNSDKLIARKKDWDPKKYGGFDSPTVAYSVLVVAKVEKGKSKKLKSVKELLGITIMERSSFEKNPIDFLEAKGYKEVKKDLIIKLPKYSLFELENGRKRMLASAGELQKGNELALPSKYVNFLYLASHYEKLKGSPEDNEQKQLFVEQHKHYLDEIIEQISEFSKRVILADANLDKVLSAYNKHRDKPIREQAENIIHLFTLTNLGAPAAFKYFDTTIDRKRYTSTKEVLDATLIHQSITGLYETRIDLSQLGGDGGPAPGGSGGTVSLQDEHRLFDIPVTTSLPDVWLQDFPQAWAETGGLGRAKCQAPIIIDLKPTAVPVSIKQYPMSLEAHMGIRQHIIKFLELGVLRPCRSPWNTPLLPVKKPGTQDYRPVQDLREINKRTVDIHPTVPNPYNLLSTLKPDYSWYTVLDLKDAFFCLPLAPQSQELFAFEWKDPERGISGQLTWTRLPQGFKNSPTLFNEALHRDLTDFRTQHPEVTLLQYVDDLLLAAPTKKACTQGTRHLLQELGEKGYRASAKKAQICQTKVTYLGYILSEGKRWLTPGRIETVARIPPPRNPREVREFLGKAGFCRLFIPGFAELAAPLYALTKPSTPFTWQTEHQLAFEALKKALLSAPALGLPDTSKPFTLFLDERQGIAKGVLTQKLGPWKRPVAYLSKKLDPVAAGWPPCLRIMAATAMLVKDSAKLTLGQPLTVITPHTLEAIVRQPPDRWITNARLTHYQALLLDTDRVQFGPPVTLNPATLLPVPENQPSPHDCRQVLAETHGTREDLKDQELPDADHTWYTDGSSYLDSGTRRAGAAVVDGHNTIWAQSLPPGTSAQKAELIALTKALELSKGKKANIYTDSRYAFATAHTHGSIYERRGWLTSEGKEIKNKAEIIALLKALFLPQEVAIIHCPGHQKGQDPVAVGNRQADRVARQAAMAEVLTLATEPDNTSHITAGKRTADGSEFEKRTADGSEFESPKKKAKVE

SEQ ID NO: 2033 - protein, 2094 aa, synthetic construct
  source 1..2094: note = Description of Artificial Sequence: Synthetic polypeptide
MPAAKRVKLDGGDKKYSIGLDIGTNSVGWAVITDEYKVPSKKFKVLGNTDRHSIKKNLIGALLFDSGETAEATRLKRTARRRYTRRKNRICYLQEIFSNEMAKVDDSFFHRLEESFLVEEDKKHERHPIFGNIVDEVAYHEKYPTIYHLRKKLVDSTDKADLRLIYLALAHMIKFRGHFLIEGDLNPDNSDVDKLFIQLVQTYNQLFEENPINASGVDAKAILSARLSKSRRLENLIAQLPGEKKNGLFGNLIALSLGLTPNFKSNFDLAEDAKLQLSKDTYDDDLDNLLAQIGDQYADLFLAAKNLSDAILLSDILRVNTEITKAPLSASMIKRYDEHHQDLTLLKALVRQQLPEKYKEIFFDQSKNGYAGYIDGGASQEEFYKFIKPILEKMDGTEELLVKLNREDLLRKQRTFDNGSIPHQIHLGELHAILRRQEDFYPFLKDNREKIEKILTFRIPYYVGPLARGNSRFAWMTRKSEETITPWNFEEVVDKGASAQSFIERMTNFDKNLPNEKVLPKHSLLYEYFTVYNELTKVKYVTEGMRKPAFLSGEQKKAIVDLLFKTNRKVTVKQLKEDYFKKIECFDSVEISGVEDRFNASLGTYHDLLKIIKDKDFLDNEENEDILEDIVLTLTLFEDREMIEERLKTYAHLFDDKVMKQLKRRRYTGWGRLSRKLINGIRDKQSGKTILDFLKSDGFANRNFMQLIHDDSLTFKEDIQKAQVSGQGDSLHEHIANLAGSPAIKKGILQTVKVVDELVKVMGRHKPENIVIEMARENQTTQKGQKNSRERMKRIEEGIKELGSQILKEHPVENTQLQNEKLYLYYLQNGRDMYVDQELDINRLSDYDVDHIVPQSFLKDDSIDNKVLTRSDKARGKSDNVPSEEVVKKMKNYWRQLLNAKLITQRKFDNLTKAERGGLSELDKAGFIKRQLVETRQITKHVAQILDSRMNTKYDENDKLIREVKVITLKSKLVSDFRKDFQFYKVREINNYHHAHDAYLNAVVGTALIKKYPKLESEFVYGDYKVYDVRKMIAKSEQEIGKATAKYFFYSNIMNFFKTEITLANGEIRKRPLIETNGETGEIVWDKGRDFATVRKVLSMPQVNIVKKTEVQTGGFSKESILPKRNSDKLIARKKDWDPKKYGGFDSPTVAYSVLVVAKVEKGKSKKLKSVKELLGITIMERSSFEKNPIDFLEAKGYKEVKKDLIIKLPKYSLFELENGRKRMLASAGELQKGNELALPSKYVNFLYLASHYEKLKGSPEDNEQKQLFVEQHKHYLDEIIEQISEFSKRVILADANLDKVLSAYNKHRDKPIREQAENIIHLFTLTNLGAPAAFKYFDTTIDRKRYTSTKEVLDATLIHQSITGLYETRIDLSQLGGDGGGSSGGTVSLQDEHRLFDIPVTTSLPDVWLQDFPQAWAETGGLGRAKCQAPIIIDLKPTAVPVSIKQYPMSLEAHMGIRQHIIKFLELGVLRPCRSPWNTPLLPVKKPGTQDYRPVQDLREINKRTVDIHPTVPNPYNLLSTLKPDYSWYTVLDLKDAFFCLPLAPQSQELFAFEWKDPERGISGQLTWTRLPQGFKNSPTLFNEALHRDLTDFRTQHPEVTLLQYVDDLLLAAPTKKACTQGTRHLLQELGEKGYRASAKKAQICQTKVTYLGYILSEGKRWLTPGRIETVARIPPPRNPREVREFLGKAGFCRLFIPGFAELAAPLYALTKPSTPFTWQTEHQLAFEALKKALLSAPALGLPDTSKPFTLFLDERQGIAKGVLTQKLGPWKRPVAYLSKKLDPVAAGWPPCLRIMAATAMLVKDSAKLTLGQPLTVITPHTLEAIVRQPPDRWITNARLTHYQALLLDTDRVQFGPPVTLNPATLLPVPENQPSPHDCRQVLAETHGTREDLKDQELPDADHTWYTDGSSYLDSGTRRAGAAVVDGHNTIWAQSLPPGTSAQKAELIALTKALELSKGKKANIYTDSRYAFATAHTHGSIYERRGWLTSEGKEIKNKAEIIALLKALFLPQEVAIIHCPGHQKGQDPVAVGNRQADRVARQAAMAEVLTLATEPDNTSHITAGKRTADGSEFEKRTADGSEFESPKKKAKVE

SEQ ID NO: 2034 - protein, 2100 aa, synthetic construct
  source 1..2100: note = Description of Artificial Sequence: Synthetic polypeptide
MPAAKRVKLDGGDKKYSIGLDIGTNSVGWAVITDEYKVPSKKFKVLGNTDRHSIKKNLIGALLFDSGETAEATRLKRTARRRYTRRKNRICYLQEIFSNEMAKVDDSFFHRLEESFLVEEDKKHERHPIFGNIVDEVAYHEKYPTIYHLRKKLVDSTDKADLRLIYLALAHMIKFRGHFLIEGDLNPDNSDVDKLFIQLVQTYNQLFEENPINASGVDAKAILSARLSKSRRLENLIAQLPGEKKNGLFGNLIALSLGLTPNFKSNFDLAEDAKLQLSKDTYDDDLDNLLAQIGDQYADLFLAAKNLSDAILLSDILRVNTEITKAPLSASMIKRYDEHHQDLTLLKALVRQQLPEKYKEIFFDQSKNGYAGYIDGGASQEEFYKFIKPILEKMDGTEELLVKLNREDLLRKQRTFDNGSIPHQIHLGELHAILRRQEDFYPFLKDNREKIEKILTFRIPYYVGPLARGNSRFAWMTRKSEETITPWNFEEVVDKGASAQSFIERMTNFDKNLPNEKVLPKHSLLYEYFTVYNELTKVKYVTEGMRKPAFLSGEQKKAIVDLLFKTNRKVTVKQLKEDYFKKIECFDSVEISGVEDRFNASLGTYHDLLKIIKDKDFLDNEENEDILEDIVLTLTLFEDREMIEERLKTYAHLFDDKVMKQLKRRRYTGWGRLSRKLINGIRDKQSGKTILDFLKSDGFANRNFMQLIHDDSLTFKEDIQKAQVSGQGDSLHEHIANLAGSPAIKKGILQTVKVVDELVKVMGRHKPENIVIEMARENQTTQKGQKNSRERMKRIEEGIKELGSQILKEHPVENTQLQNEKLYLYYLQNGRDMYVDQELDINRLSDYDVDHIVPQSFLKDDSIDNKVLTRSDKARGKSDNVPSEEVVKKMKNYWRQLLNAKLITQRKFDNLTKAERGGLSELDKAGFIKRQLVETRQITKHVAQILDSRMNTKYDENDKLIREVKVITLKSKLVSDFRKDFQFYKVREINNYHHAHDAYLNAVVGTALIKKYPKLESEFVYGDYKVYDVRKMIAKSEQEIGKATAKYFFYSNIMNFFKTEITLANGEIRKRPLIETNGETGEIVWDKGRDFATVRKVLSMPQVNIVKKTEVQTGGFSKESILPKRNSDKLIARKKDWDPKKYGGFDSPTVAYSVLVVAKVEKGKSKKLKSVKELLGITIMERSSFEKNPIDFLEAKGYKEVKKDLIIKLPKYSLFELENGRKRMLASAGELQKGNELALPSKYVNFLYLASHYEKLKGSPEDNEQKQLFVEQHKHYLDEIIEQISEFSKRVILADANLDKVLSAYNKHRDKPIREQAENIIHLFTLTNLGAPAAFKYFDTTIDRKRYTSTKEVLDATLIHQSITGLYETRIDLSQLGGDGGGGGGGSPAPGGTVSLQDEHRLFDIPVTTSLPDVWLQDFPQAWAETGGLGRAKCQAPIIIDLKPTAVPVSIKQYPMSLEAHMGIRQHIIKFLELGVLRPCRSPWNTPLLPVKKPGTQDYRPVQDLREINKRTVDIHPTVPNPYNLLSTLKPDYSWYTVLDLKDAFFCLPLAPQSQELFAFEWKDPERGISGQLTWTRLPQGFKNSPTLFNEALHRDLTDFRTQHPEVTLLQYVDDLLLAAPTKKACTQGTRHLLQELGEKGYRASAKKAQICQTKVTYLGYILSEGKRWLTPGRIETVARIPPPRNPREVREFLGKAGFCRLFIPGFAELAAPLYALTKPSTPFTWQTEHQLAFEALKKALLSAPALGLPDTSKPFTLFLDERQGIAKGVLTQKLGPWKRPVAYLSKKLDPVAAGWPPCLRIMAATAMLVKDSAKLTLGQPLTVITPHTLEAIVRQPPDRWITNARLTHYQALLLDTDRVQFGPPVTLNPATLLPVPENQPSPHDCRQVLAETHGTREDLKDQELPDADHTWYTDGSSYLDSGTRRAGAAVVDGHNTIWAQSLPPGTSAQKAELIALTKALELSKGKKANIYTDSRYAFATAHTHGSIYERRGWLTSEGKEIKNKAEIIALLKALFLPQEVAIIHCPGHQKGQDPVAVGNRQADRVARQAAMAEVLTLATEPDNTSHITAGKRTADGSEFEKRTADGSEFESPKKKAKVE

SEQ ID NO: 2035 - protein, 2109 aa, synthetic construct
  source 1..2109: note = Description of Artificial Sequence: Synthetic polypeptide
MPAAKRVKLDGGDKKYSIGLDIGTNSVGWAVITDEYKVPSKKFKVLGNTDRHSIKKNLIGALLFDSGETAEATRLKRTARRRYTRRKNRICYLQEIFSNEMAKVDDSFFHRLEESFLVEEDKKHERHPIFGNIVDEVAYHEKYPTIYHLRKKLVDSTDKADLRLIYLALAHMIKFRGHFLIEGDLNPDNSDVDKLFIQLVQTYNQLFEENPINASGVDAKAILSARLSKSRRLENLIAQLPGEKKNGLFGNLIALSLGLTPNFKSNFDLAEDAKLQLSKDTYDDDLDNLLAQIGDQYADLFLAAKNLSDAILLSDILRVNTEITKAPLSASMIKRYDEHHQDLTLLKALVRQQLPEKYKEIFFDQSKNGYAGYIDGGASQEEFYKFIKPILEKMDGTEELLVKLNREDLLRKQRTFDNGSIPHQIHLGELHAILRRQEDFYPFLKDNREKIEKILTFRIPYYVGPLARGNSRFAWMTRKSEETITPWNFEEVVDKGASAQSFIERMTNFDKNLPNEKVLPKHSLLYEYFTVYNELTKVKYVTEGMRKPAFLSGEQKKAIVDLLFKTNRKVTVKQLKEDYFKKIECFDSVEISGVEDRFNASLGTYHDLLKIIKDKDFLDNEENEDILEDIVLTLTLFEDREMIEERLKTYAHLFDDKVMKQLKRRRYTGWGRLSRKLINGIRDKQSGKTILDFLKSDGFANRNFMQLIHDDSLTFKEDIQKAQVSGQGDSLHEHIANLAGSPAIKKGILQTVKVVDELVKVMGRHKPENIVIEMARENQTTQKGQKNSRERMKRIEEGIKELGSQILKEHPVENTQLQNEKLYLYYLQNGRDMYVDQELDINRLSDYDVDHIVPQSFLKDDSIDNKVLTRSDKARGKSDNVPSEEVVKKMKNYWRQLLNAKLITQRKFDNLTKAERGGLSELDKAGFIKRQLVETRQITKHVAQILDSRMNTKYDENDKLIREVKVITLKSKLVSDFRKDFQFYKVREINNYHHAHDAYLNAVVGTALIKKYPKLESEFVYGDYKVYDVRKMIAKSEQEIGKATAKYFFYSNIMNFFKTEITLANGEIRKRPLIETNGETGEIVWDKGRDFATVRKVLSMPQVNIVKKTEVQTGGFSKESILPKRNSDKLIARKKDWDPKKYGGFDSPTVAYSVLVVAKVEKGKSKKLKSVKELLGITIMERSSFEKNPIDFLEAKGYKEVKKDLIIKLPKYSLFELENGRKRMLASAGELQKGNELALPSKYVNFLYLASHYEKLKGSPEDNEQKQLFVEQHKHYLDEIIEQISEFSKRVILADANLDKVLSAYNKHRDKPIREQAENIIHLFTLTNLGAPAAFKYFDTTIDRKRYTSTKEVLDATLIHQSITGLYETRIDLSQLGGDGGGSSGSSGSSGSSGSSGSSGGTVSLQDEHRLFDIPVTTSLPDVWLQDFPQAWAETGGLGRAKCQAPIIIDLKPTAVPVSIKQYPMSLEAHMGIRQHIIKFLELGVLRPCRSPWNTPLLPVKKPGTQDYRPVQDLREINKRTVDIHPTVPNPYNLLSTLKPDYSWYTVLDLKDAFFCLPLAPQSQELFAFEWKDPERGISGQLTWTRLPQGFKNSPTLFNEALHRDLTDFRTQHPEVTLLQYVDDLLLAAPTKKACTQGTRHLLQELGEKGYRASAKKAQICQTKVTYLGYILSEGKRWLTPGRIETVARIPPPRNPREVREFLGKAGFCRLFIPGFAELAAPLYALTKPSTPFTWQTEHQLAFEALKKALLSAPALGLPDTSKPFTLFLDERQGIAKGVLTQKLGPWKRPVAYLSKKLDPVAAGWPPCLRIMAATAMLVKDSAKLTLGQPLTVITPHTLEAIVRQPPDRWITNARLTHYQALLLDTDRVQFGPPVTLNPATLLPVPENQPSPHDCRQVLAETHGTREDLKDQELPDADHTWYTDGSSYLDSGTRRAGAAVVDGHNTIWAQSLPPGTSAQKAELIALTKALELSKGKKANIYTDSRYAFATAHTHGSIYERRGWLTSEGKEIKNKAEIIALLKALFLPQEVAIIHCPGHQKGQDPVAVGNRQADRVARQAAMAEVLTLATEPDNTSHITAGKRTADGSEFEKRTADGSEFESPKKKAKVE

SEQ ID NO: 2036 - protein, 2097 aa, synthetic construct
  source 1..2097: note = Description of Artificial Sequence: Synthetic polypeptide
MPAAKRVKLDGGDKKYSIGLDIGTNSVGWAVITDEYKVPSKKFKVLGNTDRHSIKKNLIGALLFDSGETAEATRLKRTARRRYTRRKNRICYLQEIFSNEMAKVDDSFFHRLEESFLVEEDKKHERHPIFGNIVDEVAYHEKYPTIYHLRKKLVDSTDKADLRLIYLALAHMIKFRGHFLIEGDLNPDNSDVDKLFIQLVQTYNQLFEENPINASGVDAKAILSARLSKSRRLENLIAQLPGEKKNGLFGNLIALSLGLTPNFKSNFDLAEDAKLQLSKDTYDDDLDNLLAQIGDQYADLFLAAKNLSDAILLSDILRVNTEITKAPLSASMIKRYDEHHQDLTLLKALVRQQLPEKYKEIFFDQSKNGYAGYIDGGASQEEFYKFIKPILEKMDGTEELLVKLNREDLLRKQRTFDNGSIPHQIHLGELHAILRRQEDFYPFLKDNREKIEKILTFRIPYYVGPLARGNSRFAWMTRKSEETITPWNFEEVVDKGASAQSFIERMTNFDKNLPNEKVLPKHSLLYEYFTVYNELTKVKYVTEGMRKPAFLSGEQKKAIVDLLFKTNRKVTVKQLKEDYFKKIECFDSVEISGVEDRFNASLGTYHDLLKIIKDKDFLDNEENEDILEDIVLTLTLFEDREMIEERLKTYAHLFDDKVMKQLKRRRYTGWGRLSRKLINGIRDKQSGKTILDFLKSDGFANRNFMQLIHDDSLTFKEDIQKAQVSGQGDSLHEHIANLAGSPAIKKGILQTVKVVDELVKVMGRHKPENIVIEMARENQTTQKGQKNSRERMKRIEEGIKELGSQILKEHPVENTQLQNEKLYLYYLQNGRDMYVDQELDINRLSDYDVDHIVPQSFLKDDSIDNKVLTRSDKARGKSDNVPSEEVVKKMKNYWRQLLNAKLITQRKFDNLTKAERGGLSELDKAGFIKRQLVETRQITKHVAQILDSRMNTKYDENDKLIREVKVITLKSKLVSDFRKDFQFYKVREINNYHHAHDAYLNAVVGTALIKKYPKLESEFVYGDYKVYDVRKMIAKSEQEIGKATAKYFFYSNIMNFFKTEITLANGEIRKRPLIETNGETGEIVWDKGRDFATVRKVLSMPQVNIVKKTEVQTGGFSKESILPKRNSDKLIARKKDWDPKKYGGFDSPTVAYSVLVVAKVEKGKSKKLKSVKELLGITIMERSSFEKNPIDFLEAKGYKEVKKDLIIKLPKYSLFELENGRKRMLASAGELQKGNELALPSKYVNFLYLASHYEKLKGSPEDNEQKQLFVEQHKHYLDEIIEQISEFSKRVILADANLDKVLSAYNKHRDKPIREQAENIIHLFTLTNLGAPAAFKYFDTTIDRKRYTSTKEVLDATLIHQSITGLYETRIDLSQLGGDGGPAPGSSGGTVSLQDEHRLFDIPVTTSLPDVWLQDFPQAWAETGGLGRAKCQAPIIIDLKPTAVPVSIKQYPMSLEAHMGIRQHIIKFLELGVLRPCRSPWNTPLLPVKKPGTQDYRPVQDLREINKRTVDIHPTVPNPYNLLSTLKPDYSWYTVLDLKDAFFCLPLAPQSQELFAFEWKDPERGISGQLTWTRLPQGFKNSPTLFNEALHRDLTDFRTQHPEVTLLQYVDDLLLAAPTKKACTQGTRHLLQELGEKGYRASAKKAQICQTKVTYLGYILSEGKRWLTPGRIETVARIPPPRNPREVREFLGKAGFCRLFIPGFAELAAPLYALTKPSTPFTWQTEHQLAFEALKKALLSAPALGLPDTSKPFTLFLDERQGIAKGVLTQKLGPWKRPVAYLSKKLDPVAAGWPPCLRIMAATAMLVKDSAKLTLGQPLTVITPHTLEAIVRQPPDRWITNARLTHYQALLLDTDRVQFGPPVTLNPATLLPVPENQPSPHDCRQVLAETHGTREDLKDQELPDADHTWYTDGSSYLDSGTRRAGAAVVDGHNTIWAQSLPPGTSAQKAELIALTKALELSKGKKANIYTDSRYAFATAHTHGSIYERRGWLTSEGKEIKNKAEIIALLKALFLPQEVAIIHCPGHQKGQDPVAVGNRQADRVARQAAMAEVLTLATEPDNTSHITAGKRTADGSEFEKRTADGSEFESPKKKAKVE

SEQ ID NO: 2037 - protein, 2102 aa, synthetic construct
  source 1..2102: note = Description of Artificial Sequence: Synthetic polypeptide
MPAAKRVKLDGGDKKYSIGLDIGTNSVGWAVITDEYKVPSKKFKVLGNTDRHSIKKNLIGALLFDSGETAEATRLKRTARRRYTRRKNRICYLQEIFSNEMAKVDDSFFHRLEESFLVEEDKKHERHPIFGNIVDEVAYHEKYPTIYHLRKKLVDSTDKADLRLIYLALAHMIKFRGHFLIEGDLNPDNSDVDKLFIQLVQTYNQLFEENPINASGVDAKAILSARLSKSRRLENLIAQLPGEKKNGLFGNLIALSLGLTPNFKSNFDLAEDAKLQLSKDTYDDDLDNLLAQIGDQYADLFLAAKNLSDAILLSDILRVNTEITKAPLSASMIKRYDEHHQDLTLLKALVRQQLPEKYKEIFFDQSKNGYAGYIDGGASQEEFYKFIKPILEKMDGTEELLVKLNREDLLRKQRTFDNGSIPHQIHLGELHAILRRQEDFYPFLKDNREKIEKILTFRIPYYVGPLARGNSRFAWMTRKSEETITPWNFEEVVDKGASAQSFIERMTNFDKNLPNEKVLPKHSLLYEYFTVYNELTKVKYVTEGMRKPAFLSGEQKKAIVDLLFKTNRKVTVKQLKEDYFKKIECFDSVEISGVEDRFNASLGTYHDLLKIIKDKDFLDNEENEDILEDIVLTLTLFEDREMIEERLKTYAHLFDDKVMKQLKRRRYTGWGRLSRKLINGIRDKQSGKTILDFLKSDGFANRNFMQLIHDDSLTFKEDIQKAQVSGQGDSLHEHIANLAGSPAIKKGILQTVKVVDELVKVMGRHKPENIVIEMARENQTTQKGQKNSRERMKRIEEGIKELGSQILKEHPVENTQLQNEKLYLYYLQNGRDMYVDQELDINRLSDYDVDHIVPQSFLKDDSIDNKVLTRSDKARGKSDNVPSEEVVKKMKNYWRQLLNAKLITQRKFDNLTKAERGGLSELDKAGFIKRQLVETRQITKHVAQILDSRMNTKYDENDKLIREVKVITLKSKLVSDFRKDFQFYKVREINNYHHAHDAYLNAVVGTALIKKYPKLESEFVYGDYKVYDVRKMIAKSEQEIGKATAKYFFYSNIMNFFKTEITLANGEIRKRPLIETNGETGEIVWDKGRDFATVRKVLSMPQVNIVKKTEVQTGGFSKESILPKRNSDKLIARKKDWDPKKYGGFDSPTVAYSVLVVAKVEKGKSKKLKSVKELLGITIMERSSFEKNPIDFLEAKGYKEVKKDLIIKLPKYSLFELENGRKRMLASAGELQKGNELALPSKYVNFLYLASHYEKLKGSPEDNEQKQLFVEQHKHYLDEIIEQISEFSKRVILADANLDKVLSAYNKHRDKPIREQAENIIHLFTLTNLGAPAAFKYFDTTIDRKRYTSTKEVLDATLIHQSITGLYETRIDLSQLGGDGGGSSEAAAKPAPGGTVSLQDEHRLFDIPVTTSLPDVWLQDFPQAWAETGGLGRAKCQAPIIIDLKPTAVPVSIKQYPMSLEAHMGIRQHIIKFLELGVLRPCRSPWNTPLLPVKKPGTQDYRPVQDLREINKRTVDIHPTVPNPYNLLSTLKPDYSWYTVLDLKDAFFCLPLAPQSQELFAFEWKDPERGISGQLTWTRLPQGFKNSPTLFNEALHRDLTDFRTQHPEVTLLQYVDDLLLAAPTKKACTQGTRHLLQELGEKGYRASAKKAQICQTKVTYLGYILSEGKRWLTPGRIETVARIPPPRNPREVREFLGKAGFCRLFIPGFAELAAPLYALTKPSTPFTWQTEHQLAFEALKKALLSAPALGLPDTSKPFTLFLDERQGIAKGVLTQKLGPWKRPVAYLSKKLDPVAAGWPPCLRIMAATAMLVKDSAKLTLGQPLTVITPHTLEAIVRQPPDRWITNARLTHYQALLLDTDRVQFGPPVTLNPATLLPVPENQPSPHDCRQVLAETHGTREDLKDQELPDADHTWYTDGSSYLDSGTRRAGAAVVDGHNTIWAQSLPPGTSAQKAELIALTKALELSKGKKANIYTDSRYAFATAHTHGSIYERRGWLTSEGKEIKNKAEIIALLKALFLPQEVAIIHCPGHQKGQDPVAVGNRQADRVARQAAMAEVLTLATEPDNTSHITAGKRTADGSEFEKRTADGSEFESPKKKAKVE

SEQ ID NO: 2038 - protein, 2100 aa, synthetic construct
  source 1..2100: note = Description of Artificial Sequence: Synthetic polypeptide
MPAAKRVKLDGGDKKYSIGLDIGTNSVGWAVITDEYKVPSKKFKVLGNTDRHSIKKNLIGALLFDSGETAEATRLKRTARRRYTRRKNRICYLQEIFSNEMAKVDDSFFHRLEESFLVEEDKKHERHPIFGNIVDEVAYHEKYPTIYHLRKKLVDSTDKADLRLIYLALAHMIKFRGHFLIEGDLNPDNSDVDKLFIQLVQTYNQLFEENPINASGVDAKAILSARLSKSRRLENLIAQLPGEKKNGLFGNLIALSLGLTPNFKSNFDLAEDAKLQLSKDTYDDDLDNLLAQIGDQYADLFLAAKNLSDAILLSDILRVNTEITKAPLSASMIKRYDEHHQDLTLLKALVRQQLPEKYKEIFFDQSKNGYAGYIDGGASQEEFYKFIKPILEKMDGTEELLVKLNREDLLRKQRTFDNGSIPHQIHLGELHAILRRQEDFYPFLKDNREKIEKILTFRIPYYVGPLARGNSRFAWMTRKSEETITPWNFEEVVDKGASAQSFIERMTNFDKNLPNEKVLPKHSLLYEYFTVYNELTKVKYVTEGMRKPAFLSGEQKKAIVDLLFKTNRKVTVKQLKEDYFKKIECFDSVEISGVEDRFNASLGTYHDLLKIIKDKDFLDNEENEDILEDIVLTLTLFEDREMIEERLKTYAHLFDDKVMKQLKRRRYTGWGRLSRKLINGIRDKQSGKTILDFLKSDGFANRNFMQLIHDDSLTFKEDIQKAQVSGQGDSLHEHIANLAGSPAIKKGILQTVKVVDELVKVMGRHKPENIVIEMARENQTTQKGQKNSRERMKRIEEGIKELGSQILKEHPVENTQLQNEKLYLYYLQNGRDMYVDQELDINRLSDYDVDHIVPQSFLKDDSIDNKVLTRSDKARGKSDNVPSEEVVKKMKNYWRQLLNAKLITQRKFDNLTKAERGGLSELDKAGFIKRQLVETRQITKHVAQILDSRMNTKYDENDKLIREVKVITLKSKLVSDFRKDFQFYKVREINNYHHAHDAYLNAVVGTALIKKYPKLESEFVYGDYKVYDVRKMIAKSEQEIGKATAKYFFYSNIMNFFKTEITLANGEIRKRPLIETNGETGEIVWDKGRDFATVRKVLSMPQVNIVKKTEVQTGGFSKESILPKRNSDKLIARKKDWDPKKYGGFDSPTVAYSVLVVAKVEKGKSKKLKSVKELLGITIMERSSFEKNPIDFLEAKGYKEVKKDLIIKLPKYSLFELENGRKRMLASAGELQKGNELALPSKYVNFLYLASHYEKLKGSPEDNEQKQLFVEQHKHYLDEIIEQISEFSKRVILADANLDKVLSAYNKHRDKPIREQAENIIHLFTLTNLGAPAAFKYFDTTIDRKRYTSTKEVLDATLIHQSITGLYETRIDLSQLGGDGGGGSGGGGSSGGTVSLQDEHRLFDIPVTTSLPDVWLQDFPQAWAETGGLGRAKCQAPIIIDLKPTAVPVSIKQYPMSLEAHMGIRQHIIKFLELGVLRPCRSPWNTPLLPVKKPGTQDYRPVQDLREINKRTVDIHPTVPNPYNLLSTLKPDYSWYTVLDLKDAFFCLPLAPQSQELFAFEWKDPERGISGQLTWTRLPQGFKNSPTLFNEALHRDLTDFRTQHPEVTLLQYVDDLLLAAPTKKACTQGTRHLLQELGEKGYRASAKKAQICQTKVTYLGYILSEGKRWLTPGRIETVARIPPPRNPREVREFLGKAGFCRLFIPGFAELAAPLYALTKPSTPFTWQTEHQLAFEALKKALLSAPALGLPDTSKPFTLFLDERQGIAKGVLTQKLGPWKRPVAYLSKKLDPVAAGWPPCLRIMAATAMLVKDSAKLTLGQPLTVITPHTLEAIVRQPPDRWITNARLTHYQALLLDTDRVQFGPPVTLNPATLLPVPENQPSPHDCRQVLAETHGTREDLKDQELPDADHTWYTDGSSYLDSGTRRAGAAVVDGHNTIWAQSLPPGTSAQKAELIALTKALELSKGKKANIYTDSRYAFATAHTHGSIYERRGWLTSEGKEIKNKAEIIALLKALFLPQEVAIIHCPGHQKGQDPVAVGNRQADRVARQAAMAEVLTLATEPDNTSHITAGKRTADGSEFEKRTADGSEFESPKKKAKVE

SEQ ID NO: 2039 - protein, 2102 aa, synthetic construct
  source 1..2102: note = Description of Artificial Sequence: Synthetic polypeptide
MPAAKRVKLDGGDKKYSIGLDIGTNSVGWAVITDEYKVPSKKFKVLGNTDRHSIKKNLIGALLFDSGETAEATRLKRTARRRYTRRKNRICYLQEIFSNEMAKVDDSFFHRLEESFLVEEDKKHERHPIFGNIVDEVAYHEKYPTIYHLRKKLVDSTDKADLRLIYLALAHMIKFRGHFLIEGDLNPDNSDVDKLFIQLVQTYNQLFEENPINASGVDAKAILSARLSKSRRLENLIAQLPGEKKNGLFGNLIALSLGLTPNFKSNFDLAEDAKLQLSKDTYDDDLDNLLAQIGDQYADLFLAAKNLSDAILLSDILRVNTEITKAPLSASMIKRYDEHHQDLTLLKALVRQQLPEKYKEIFFDQSKNGYAGYIDGGASQEEFYKFIKPILEKMDGTEELLVKLNREDLLRKQRTFDNGSIPHQIHLGELHAILRRQEDFYPFLKDNREKIEKILTFRIPYYVGPLARGNSRFAWMTRKSEETITPWNFEEVVDKGASAQSFIERMTNFDKNLPNEKVLPKHSLLYEYFTVYNELTKVKYVTEGMRKPAFLSGEQKKAIVDLLFKTNRKVTVKQLKEDYFKKIECFDSVEISGVEDRFNASLGTYHDLLKIIKDKDFLDNEENEDILEDIVLTLTLFEDREMIEERLKTYAHLFDDKVMKQLKRRRYTGWGRLSRKLINGIRDKQSGKTILDFLKSDGFANRNFMQLIHDDSLTFKEDIQKAQVSGQGDSLHEHIANLAGSPAIKKGILQTVKVVDELVKVMGRHKPENIVIEMARENQTTQKGQKNSRERMKRIEEGIKELGSQILKEHPVENTQLQNEKLYLYYLQNGRDMYVDQELDINRLSDYDVDHIVPQSFLKDDSIDNKVLTRSDKARGKSDNVPSEEVVKKMKNYWRQLLNAKLITQRKFDNLTKAERGGLSELDKAGFIKRQLVETRQITKHVAQILDSRMNTKYDENDKLIREVKVITLKSKLVSDFRKDFQFYKVREINNYHHAHDAYLNAVVGTALIKKYPKLESEFVYGDYKVYDVRKMIAKSEQEIGKATAKYFFYSNIMNFFKTEITLANGEIRKRPLIETNGETGEIVWDKGRDFATVRKVLSMPQVNIVKKTEVQTGGFSKESILPKRNSDKLIARKKDWDPKKYGGFDSPTVAYSVLVVAKVEKGKSKKLKSVKELLGITIMERSSFEKNPIDFLEAKGYKEVKKDLIIKLPKYSLFELENGRKRMLASAGELQKGNELALPSKYVNFLYLASHYEKLKGSPEDNEQKQLFVEQHKHYLDEIIEQISEFSKRVILADANLDKVLSAYNKHRDKPIREQAENIIHLFTLTNLGAPAAFKYFDTTIDRKRYTSTKEVLDATLIHQSITGLYETRIDLSQLGGDGGEAAAKGSSPAPGGTVSLQDEHRLFDIPVTTSLPDVWLQDFPQAWAETGGLGRAKCQAPIIIDLKPTAVPVSIKQYPMSLEAHMGIRQHIIKFLELGVLRPCRSPWNTPLLPVKKPGTQDYRPVQDLREINKRTVDIHPTVPNPYNLLSTLKPDYSWYTVLDLKDAFFCLPLAPQSQELFAFEWKDPERGISGQLTWTRLPQGFKNSPTLFNEALHRDLTDFRTQHPEVTLLQYVDDLLLAAPTKKACTQGTRHLLQELGEKGYRASAKKAQICQTKVTYLGYILSEGKRWLTPGRIETVARIPPPRNPREVREFLGKAGFCRLFIPGFAELAAPLYALTKPSTPFTWQTEHQLAFEALKKALLSAPALGLPDTSKPFTLFLDERQGIAKGVLTQKLGPWKRPVAYLSKKLDPVAAGWPPCLRIMAATAMLVKDSAKLTLGQPLTVITPHTLEAIVRQPPDRWITNARLTHYQALLLDTDRVQFGPPVTLNPATLLPVPENQPSPHDCRQVLAETHGTREDLKDQELPDADHTWYTDGSSYLDSGTRRAGAAVVDGHNTIWAQSLPPGTSAQKAELIALTKALELSKGKKANIYTDSRYAFATAHTHGSIYERRGWLTSEGKEIKNKAEIIALLKALFLPQEVAIIHCPGHQKGQDPVAVGNRQADRVARQAAMAEVLTLATEPDNTSHITAGKRTADGSEFEKRTADGSEFESPKKKAKVE

SEQ ID NO: 2040 - protein, 2102 aa, synthetic construct
  source 1..2102: note = Description of Artificial Sequence: Synthetic polypeptide
MPAAKRVKLDGGDKKYSIGLDIGTNSVGWAVITDEYKVPSKKFKVLGNTDRHSIKKNLIGALLFDSGETAEATRLKRTARRRYTRRKNRICYLQEIFSNEMAKVDDSFFHRLEESFLVEEDKKHERHPIFGNIVDEVAYHEKYPTIYHLRKKLVDSTDKADLRLIYLALAHMIKFRGHFLIEGDLNPDNSDVDKLFIQLVQTYNQLFEENPINASGVDAKAILSARLSKSRRLENLIAQLPGEKKNGLFGNLIALSLGLTPNFKSNFDLAEDAKLQLSKDTYDDDLDNLLAQIGDQYADLFLAAKNLSDAILLSDILRVNTEITKAPLSASMIKRYDEHHQDLTLLKALVRQQLPEKYKEIFFDQSKNGYAGYIDGGASQEEFYKFIKPILEKMDGTEELLVKLNREDLLRKQRTFDNGSIPHQIHLGELHAILRRQEDFYPFLKDNREKIEKILTFRIPYYVGPLARGNSRFAWMTRKSEETITPWNFEEVVDKGASAQSFIERMTNFDKNLPNEKVLPKHSLLYEYFTVYNELTKVKYVTEGMRKPAFLSGEQKKAIVDLLFKTNRKVTVKQLKEDYFKKIECFDSVEISGVEDRFNASLGTYHDLLKIIKDKDFLDNEENEDILEDIVLTLTLFEDREMIEERLKTYAHLFDDKVMKQLKRRRYTGWGRLSRKLINGIRDKQSGKTILDFLKSDGFANRNFMQLIHDDSLTFKEDIQKAQVSGQGDSLHEHIANLAGSPAIKKGILQTVKVVDELVKVMGRHKPENIVIEMARENQTTQKGQKNSRERMKRIEEGIKELGSQILKEHPVENTQLQNEKLYLYYLQNGRDMYVDQELDINRLSDYDVDHIVPQSFLKDDSIDNKVLTRSDKARGKSDNVPSEEVVKKMKNYWRQLLNAKLITQRKFDNLTKAERGGLSELDKAGFIKRQLVETRQITKHVAQILDSRMNTKYDENDKLIREVKVITLKSKLVSDFRKDFQFYKVREINNYHHAHDAYLNAVVGTALIKKYPKLESEFVYGDYKVYDVRKMIAKSEQEIGKATAKYFFYSNIMNFFKTEITLANGEIRKRPLIETNGETGEIVWDKGRDFATVRKVLSMPQVNIVKKTEVQTGGFSKESILPKRNSDKLIARKKDWDPKKYGGFDSPTVAYSVLVVAKVEKGKSKKLKSVKELLGITIMERSSFEKNPIDFLEAKGYKEVKKDLIIKLPKYSLFELENGRKRMLASAGELQKGNELALPSKYVNFLYLASHYEKLKGSPEDNEQKQLFVEQHKHYLDEIIEQISEFSKRVILADANLDKVLSAYNKHRDKPIREQAENIIHLFTLTNLGAPAAFKYFDTTIDRKRYTSTKEVLDATLIHQSITGLYETRIDLSQLGGDGGPAPEAAAKGSSGGTVSLQDEHRLFDIPVTTSLPDVWLQDFPQAWAETGGLGRAKCQAPIIIDLKPTAVPVSIKQYPMSLEAHMGIRQHIIKFLELGVLRPCRSPWNTPLLPVKKPGTQDYRPVQDLREINKRTVDIHPTVPNPYNLLSTLKPDYSWYTVLDLKDAFFCLPLAPQSQELFAFEWKDPERGISGQLTWTRLPQGFKNSPTLFNEALHRDLTDFRTQHPEVTLLQYVDDLLLAAPTKKACTQGTRHLLQELGEKGYRASAKKAQICQTKVTYLGYILSEGKRWLTPGRIETVARIPPPRNPREVREFLGKAGFCRLFIPGFAELAAPLYALTKPSTPFTWQTEHQLAFEALKKALLSAPALGLPDTSKPFTLFLDERQGIAKGVLTQKLGPWKRPVAYLSKKLDPVAAGWPPCLRIMAATAMLVKDSAKLTLGQPLTVITPHTLEAIVRQPPDRWITNARLTHYQALLLDTDRVQFGPPVTLNPATLLPVPENQPSPHDCRQVLAETHGTREDLKDQELPDADHTWYTDGSSYLDSGTRRAGAAVVDGHNTIWAQSLPPGTSAQKAELIALTKALELSKGKKANIYTDSRYAFATAHTHGSIYERRGWLTSEGKEIKNKAEIIALLKALFLPQEVAIIHCPGHQKGQDPVAVGNRQADRVARQAAMAEVLTLATEPDNTSHITAGKRTADGSEFEKRTADGSEFESPKKKAKVE

SEQ ID NO: 2041 - protein, 2102 aa, synthetic construct
  source 1..2102: note = Description of Artificial Sequence: Synthetic polypeptide
MPAAKRVKLDGGDKKYSIGLDIGTNSVGWAVITDEYKVPSKKFKVLGNTDRHSIKKNLIGALLFDSGETAEATRLKRTARRRYTRRKNRICYLQEIFSNEMAKVDDSFFHRLEESFLVEEDKKHERHPIFGNIVDEVAYHEKYPTIYHLRKKLVDSTDKADLRLIYLALAHMIKFRGHFLIEGDLNPDNSDVDKLFIQLVQTYNQLFEENPINASGVDAKAILSARLSKSRRLENLIAQLPGEKKNGLFGNLIALSLGLTPNFKSNFDLAEDAKLQLSKDTYDDDLDNLLAQIGDQYADLFLAAKNLSDAILLSDILRVNTEITKAPLSASMIKRYDEHHQDLTLLKALVRQQLPEKYKEIFFDQSKNGYAGYIDGGASQEEFYKFIKPILEKMDGTEELLVKLNREDLLRKQRTFDNGSIPHQIHLGELHAILRRQEDFYPFLKDNREKIEKILTFRIPYYVGPLARGNSRFAWMTRKSEETITPWNFEEVVDKGASAQSFIERMTNFDKNLPNEKVLPKHSLLYEYFTVYNELTKVKYVTEGMRKPAFLSGEQKKAIVDLLFKTNRKVTVKQLKEDYFKKIECFDSVEISGVEDRFNASLGTYHDLLKIIKDKDFLDNEENEDILEDIVLTLTLFEDREMIEERLKTYAHLFDDKVMKQLKRRRYTGWGRLSRKLINGIRDKQSGKTILDFLKSDGFANRNFMQLIHDDSLTFKEDIQKAQVSGQGDSLHEHIANLAGSPAIKKGILQTVKVVDELVKVMGRHKPENIVIEMARENQTTQKGQKNSRERMKRIEEGIKELGSQILKEHPVENTQLQNEKLYLYYLQNGRDMYVDQELDINRLSDYDVDHIVPQSFLKDDSIDNKVLTRSDKARGKSDNVPSEEVVKKMKNYWRQLLNAKLITQRKFDNLTKAERGGLSELDKAGFIKRQLVETRQITKHVAQILDSRMNTKYDENDKLIREVKVITLKSKLVSDFRKDFQFYKVREINNYHHAHDAYLNAVVGTALIKKYPKLESEFVYGDYKVYDVRKMIAKSEQEIGKATAKYFFYSNIMNFFKTEITLANGEIRKRPLIETNGETGEIVWDKGRDFATVRKVLSMPQVNIVKKTEVQTGGFSKESILPKRNSDKLIARKKDWDPKKYGGFDSPTVAYSVLVVAKVEKGKSKKLKSVKELLGITIMERSSFEKNPIDFLEAKGYKEVKKDLIIKLPKYSLFELENGRKRMLASAGELQKGNELALPSKYVNFLYLASHYEKLKGSPEDNEQKQLFVEQHKHYLDEIIEQISEFSKRVILADANLDKVLSAYNKHRDKPIREQAENIIHLFTLTNLGAPAAFKYFDTTIDRKRYTSTKEVLDATLIHQSITGLYETRIDLSQLGGDGGEAAAKGGGPAPGGTVSLQDEHRLFDIPVTTSLPDVWLQDFPQAWAETGGLGRAKCQAPIIIDLKPTAVPVSIKQYPMSLEAHMGIRQHIIKFLELGVLRPCRSPWNTPLLPVKKPGTQDYRPVQDLREINKRTVDIHPTVPNPYNLLSTLKPDYSWYTVLDLKDAFFCLPLAPQSQELFAFEWKDPERGISGQLTWTRLPQGFKNSPTLFNEALHRDLTDFRTQHPEVTLLQYVDDLLLAAPTKKACTQGTRHLLQELGEKGYRASAKKAQICQTKVTYLGYILSEGKRWLTPGRIETVARIPPPRNPREVREFLGKAGFCRLFIPGFAELAAPLYALTKPSTPFTWQTEHQLAFEALKKALLSAPALGLPDTSKPFTLFLDERQGIAKGVLTQKLGPWKRPVAYLSKKLDPVAAGWPPCLRIMAATAMLVKDSAKLTLGQPLTVITPHTLEAIVRQPPDRWITNARLTHYQALLLDTDRVQFGPPVTLNPATLLPVPENQPSPHDCRQVLAETHGTREDLKDQELPDADHTWYTDGSSYLDSGTRRAGAAVVDGHNTIWAQSLPPGTSAQKAELIALTKALELSKGKKANIYTDSRYAFATAHTHGSIYERRGWLTSEGKEIKNKAEIIALLKALFLPQEVAIIHCPGHQKGQDPVAVGNRQADRVARQAAMAEVLTLATEPDNTSHITAGKRTADGSEFEKRTADGSEFESPKKKAKVE

SEQ ID NO: 2042 - protein, 2100 aa, synthetic construct
  source 1..2100: note = Description of Artificial Sequence: Synthetic polypeptide
MPAAKRVKLDGGDKKYSIGLDIGTNSVGWAVITDEYKVPSKKFKVLGNTDRHSIKKNLIGALLFDSGETAEATRLKRTARRRYTRRKNRICYLQEIFSNEMAKVDDSFFHRLEESFLVEEDKKHERHPIFGNIVDEVAYHEKYPTIYHLRKKLVDSTDKADLRLIYLALAHMIKFRGHFLIEGDLNPDNSDVDKLFIQLVQTYNQLFEENPINASGVDAKAILSARLSKSRRLENLIAQLPGEKKNGLFGNLIALSLGLTPNFKSNFDLAEDAKLQLSKDTYDDDLDNLLAQIGDQYADLFLAAKNLSDAILLSDILRVNTEITKAPLSASMIKRYDEHHQDLTLLKALVRQQLPEKYKEIFFDQSKNGYAGYIDGGASQEEFYKFIKPILEKMDGTEELLVKLNREDLLRKQRTFDNGSIPHQIHLGELHAILRRQEDFYPFLKDNREKIEKILTFRIPYYVGPLARGNSRFAWMTRKSEETITPWNFEEVVDKGASAQSFIERMTNFDKNLPNEKVLPKHSLLYEYFTVYNELTKVKYVTEGMRKPAFLSGEQKKAIVDLLFKTNRKVTVKQLKEDYFKKIECFDSVEISGVEDRFNASLGTYHDLLKIIKDKDFLDNEENEDILEDIVLTLTLFEDREMIEERLKTYAHLFDDKVMKQLKRRRYTGWGRLSRKLINGIRDKQSGKTILDFLKSDGFANRNFMQLIHDDSLTFKEDIQKAQVSGQGDSLHEHIANLAGSPAIKKGILQTVKVVDELVKVMGRHKPENIVIEMARENQTTQKGQKNSRERMKRIEEGIKELGSQILKEHPVENTQLQNEKLYLYYLQNGRDMYVDQELDINRLSDYDVDHIVPQSFLKDDSIDNKVLTRSDKARGKSDNVPSEEVVKKMKNYWRQLLNAKLITQRKFDNLTKAERGGLSELDKAGFIKRQLVETRQITKHVAQILDSRMNTKYDENDKLIREVKVITLKSKLVSDFRKDFQFYKVREINNYHHAHDAYLNAVVGTALIKKYPKLESEFVYGDYKVYDVRKMIAKSEQEIGKATAKYFFYSNIMNFFKTEITLANGEIRKRPLIETNGETGEIVWDKGRDFATVRKVLSMPQVNIVKKTEVQTGGFSKESILPKRNSDKLIARKKDWDPKKYGGFDSPTVAYSVLVVAKVEKGKSKKLKSVKELLGITIMERSSFEKNPIDFLEAKGYKEVKKDLIIKLPKYSLFELENGRKRMLASAGELQKGNELALPSKYVNFLYLASHYEKLKGSPEDNEQKQLFVEQHKHYLDEIIEQISEFSKRVILADANLDKVLSAYNKHRDKPIREQAENIIHLFTLTNLGAPAAFKYFDTTIDRKRYTSTKEVLDATLIHQSITGLYETRIDLSQLGGDGGGSSGSSGSSGGTVSLQDEHRLFDIPVTTSLPDVWLQDFPQAWAETGGLGRAKCQAPIIIDLKPTAVPVSIKQYPMSLEAHMGIRQHIIKFLELGVLRPCRSPWNTPLLPVKKPGTQDYRPVQDLREINKRTVDIHPTVPNPYNLLSTLKPDYSWYTVLDLKDAFFCLPLAPQSQELFAFEWKDPERGISGQLTWTRLPQGFKNSPTLFNEALHRDLTDFRTQHPEVTLLQYVDDLLLAAPTKKACTQGTRHLLQELGEKGYRASAKKAQICQTKVTYLGYILSEGKRWLTPGRIETVARIPPPRNPREVREFLGKAGFCRLFIPGFAELAAPLYALTKPSTPFTWQTEHQLAFEALKKALLSAPALGLPDTSKPFTLFLDERQGIAKGVLTQKLGPWKRPVAYLSKKLDPVAAGWPPCLRIMAATAMLVKDSAKLTLGQPLTVITPHTLEAIVRQPPDRWITNARLTHYQALLLDTDRVQFGPPVTLNPATLLPVPENQPSPHDCRQVLAETHGTREDLKDQELPDADHTWYTDGSSYLDSGTRRAGAAVVDGHNTIWAQSLPPGTSAQKAELIALTKALELSKGKKANIYTDSRYAFATAHTHGSIYERRGWLTSEGKEIKNKAEIIALLKALFLPQEVAIIHCPGHQKGQDPVAVGNRQADRVARQAAMAEVLTLATEPDNTSHITAGKRTADGSEFEKRTADGSEFESPKKKAKVE

SEQ ID NO: 2043 - protein, 2106 aa, synthetic construct
  source 1..2106: note = Description of Artificial Sequence: Synthetic polypeptide
MPAAKRVKLDGGDKKYSIGLDIGTNSVGWAVITDEYKVPSKKFKVLGNTDRHSIKKNLIGALLFDSGETAEATRLKRTARRRYTRRKNRICYLQEIFSNEMAKVDDSFFHRLEESFLVEEDKKHERHPIFGNIVDEVAYHEKYPTIYHLRKKLVDSTDKADLRLIYLALAHMIKFRGHFLIEGDLNPDNSDVDKLFIQLVQTYNQLFEENPINASGVDAKAILSARLSKSRRLENLIAQLPGEKKNGLFGNLIALSLGLTPNFKSNFDLAEDAKLQLSKDTYDDDLDNLLAQIGDQYADLFLAAKNLSDAILLSDILRVNTEITKAPLSASMIKRYDEHHQDLTLLKALVRQQLPEKYKEIFFDQSKNGYAGYIDGGASQEEFYKFIKPILEKMDGTEELLVKLNREDLLRKQRTFDNGSIPHQIHLGELHAILRRQEDFYPFLKDNREKIEKILTFRIPYYVGPLARGNSRFAWMTRKSEETITPWNFEEVVDKGASAQSFIERMTNFDKNLPNEKVLPKHSLLYEYFTVYNELTKVKYVTEGMRKPAFLSGEQKKAIVDLLFKTNRKVTVKQLKEDYFKKIECFDSVEISGVEDRFNASLGTYHDLLKIIKDKDFLDNEENEDILEDIVLTLTLFEDREMIEERLKTYAHLFDDKVMKQLKRRRYTGWGRLSRKLINGIRDKQSGKTILDFLKSDGFANRNFMQLIHDDSLTFKEDIQKAQVSGQGDSLHEHIANLAGSPAIKKGILQTVKVVDELVKVMGRHKPENIVIEMARENQTTQKGQKNSRERMKRIEEGIKELGSQILKEHPVENTQLQNEKLYLYYLQNGRDMYVDQELDINRLSDYDVDHIVPQSFLKDDSIDNKVLTRSDKARGKSDNVPSEEVVKKMKNYWRQLLNAKLITQRKFDNLTKAERGGLSELDKAGFIKRQLVETRQITKHVAQILDSRMNTKYDENDKLIREVKVITLKSKLVSDFRKDFQFYKVREINNYHHAHDAYLNAVVGTALIKKYPKLESEFVYGDYKVYDVRKMIAKSEQEIGKATAKYFFYSNIMNFFKTEITLANGEIRKRPLIETNGETGEIVWDKGRDFATVRKVLSMPQVNIVKKTEVQTGGFSKESILPKRNSDKLIARKKDWDPKKYGGFDSPTVAYSVLVVAKVEKGKSKKLKSVKELLGITIMERSSFEKNPIDFLEAKGYKEVKKDLIIKLPKYSLFELENGRKRMLASAGELQKGNELALPSKYVNFLYLASHYEKLKGSPEDNEQKQLFVEQHKHYLDEIIEQISEFSKRVILADANLDKVLSAYNKHRDKPIREQAENIIHLFTLTNLGAPAAFKYFDTTIDRKRYTSTKEVLDATLIHQSITGLYETRIDLSQLGGDGGEAAAKEAAAKEAAAKGGTVSLQDEHRLFDIPVTTSLPDVWLQDFPQAWAETGGLGRAKCQAPIIIDLKPTAVPVSIKQYPMSLEAHMGIRQHIIKFLELGVLRPCRSPWNTPLLPVKKPGTQDYRPVQDLREINKRTVDIHPTVPNPYNLLSTLKPDYSWYTVLDLKDAFFCLPLAPQSQELFAFEWKDPERGISGQLTWTRLPQGFKNSPTLFNEALHRDLTDFRTQHPEVTLLQYVDDLLLAAPTKKACTQGTRHLLQELGEKGYRASAKKAQICQTKVTYLGYILSEGKRWLTPGRIETVARIPPPRNPREVREFLGKAGFCRLFIPGFAELAAPLYALTKPSTPFTWQTEHQLAFEALKKALLSAPALGLPDTSKPFTLFLDERQGIAKGVLTQKLGPWKRPVAYLSKKLDPVAAGWPPCLRIMAATAMLVKDSAKLTLGQPLTVITPHTLEAIVRQPPDRWITNARLTHYQALLLDTDRVQFGPPVTLNPATLLPVPENQPSPHDCRQVLAETHGTREDLKDQELPDADHTWYTDGSSYLDSGTRRAGAAVVDGHNTIWAQSLPPGTSAQKAELIALTKALELSKGKKANIYTDSRYAFATAHTHGSIYERRGWLTSEGKEIKNKAEIIALLKALFLPQEVAIIHCPGHQKGQDPVAVGNRQADRVARQAAMAEVLTLATEPDNTSHITAGKRTADGSEFEKRTADGSEFESPKKKAKVE

SEQ ID NO: 2044 - protein, 2102 aa, synthetic construct
  source 1..2102: note = Description of Artificial Sequence: Synthetic polypeptide
MPAAKRVKLDGGDKKYSIGLDIGTNSVGWAVITDEYKVPSKKFKVLGNTDRHSIKKNLIGALLFDSGETAEATRLKRTARRRYTRRKNRICYLQEIFSNEMAKVDDSFFHRLEESFLVEEDKKHERHPIFGNIVDEVAYHEKYPTIYHLRKKLVDSTDKADLRLIYLALAHMIKFRGHFLIEGDLNPDNSDVDKLFIQLVQTYNQLFEENPINASGVDAKAILSARLSKSRRLENLIAQLPGEKKNGLFGNLIALSLGLTPNFKSNFDLAEDAKLQLSKDTYDDDLDNLLAQIGDQYADLFLAAKNLSDAILLSDILRVNTEITKAPLSASMIKRYDEHHQDLTLLKALVRQQLPEKYKEIFFDQSKNGYAGYIDGGASQEEFYKFIKPILEKMDGTEELLVKLNREDLLRKQRTFDNGSIPHQIHLGELHAILRRQEDFYPFLKDNREKIEKILTFRIPYYVGPLARGNSRFAWMTRKSEETITPWNFEEVVDKGASAQSFIERMTNFDKNLPNEKVLPKHSLLYEYFTVYNELTKVKYVTEGMRKPAFLSGEQKKAIVDLLFKTNRKVTVKQLKEDYFKKIECFDSVEISGVEDRFNASLGTYHDLLKIIKDKDFLDNEENEDILEDIVLTLTLFEDREMIEERLKTYAHLFDDKVMKQLKRRRYTGWGRLSRKLINGIRDKQSGKTILDFLKSDGFANRNFMQLIHDDSLTFKEDIQKAQVSGQGDSLHEHIANLAGSPAIKKGILQTVKVVDELVKVMGRHKPENIVIEMARENQTTQKGQKNSRERMKRIEEGIKELGSQILKEHPVENTQLQNEKLYLYYLQNGRDMYVDQELDINRLSDYDVDHIVPQSFLKDDSIDNKVLTRSDKARGKSDNVPSEEVVKKMKNYWRQLLNAKLITQRKFDNLTKAERGGLSELDKAGFIKRQLVETRQITKHVAQILDSRMNTKYDENDKLIREVKVITLKSKLVSDFRKDFQFYKVREINNYHHAHDAYLNAVVGTALIKKYPKLESEFVYGDYKVYDVRKMIAKSEQEIGKATAKYFFYSNIMNFFKTEITLANGEIRKRPLIETNGETGEIVWDKGRDFATVRKVLSMPQVNIVKKTEVQTGGFSKESILPKRNSDKLIARKKDWDPKKYGGFDSPTVAYSVLVVAKVEKGKSKKLKSVKELLGITIMERSSFEKNPIDFLEAKGYKEVKKDLIIKLPKYSLFELENGRKRMLASAGELQKGNELALPSKYVNFLYLASHYEKLKGSPEDNEQKQLFVEQHKHYLDEIIEQISEFSKRVILADANLDKVLSAYNKHRDKPIREQAENIIHLFTLTNLGAPAAFKYFDTTIDRKRYTSTKEVLDATLIHQSITGLYETRIDLSQLGGDGGPAPEAAAKGGSGGTVSLQDEHRLFDIPVTTSLPDVWLQDFPQAWAETGGLGRAKCQAPIIIDLKPTAVPVSIKQYPMSLEAHMGIRQHIIKFLELGVLRPCRSPWNTPLLPVKKPGTQDYRPVQDLREINKRTVDIHPTVPNPYNLLSTLKPDYSWYTVLDLKDAFFCLPLAPQSQELFAFEWKDPERGISGQLTWTRLPQGFKNSPTLFNEALHRDLTDFRTQHPEVTLLQYVDDLLLAAPTKKACTQGTRHLLQELGEKGYRASAKKAQICQTKVTYLGYILSEGKRWLTPGRIETVARIPPPRNPREVREFLGKAGFCRLFIPGFAELAAPLYALTKPSTPFTWQTEHQLAFEALKKALLSAPALGLPDTSKPFTLFLDERQGIAKGVLTQKLGPWKRPVAYLSKKLDPVAAGWPPCLRIMAATAMLVKDSAKLTLGQPLTVITPHTLEAIVRQPPDRWITNARLTHYQALLLDTDRVQFGPPVTLNPATLLPVPENQPSPHDCRQVLAETHGTREDLKDQELPDADHTWYTDGSSYLDSGTRRAGAAVVDGHNTIWAQSLPPGTSAQKAELIALTKALELSKGKKANIYTDSRYAFATAHTHGSIYERRGWLTSEGKEIKNKAEIIALLKALFLPQEVAIIHCPGHQKGQDPVAVGNRQADRVARQAAMAEVLTLATEPDNTSHITAGKRTADGSEFEKRTADGSEFESPKKKAKVE

SEQ ID NO: 2045 - protein, 2124 aa, synthetic construct
  source 1..2124: note = Description of Artificial Sequence: Synthetic polypeptide
MPAAKRVKLDGGDKKYSIGLDIGTNSVGWAVITDEYKVPSKKFKVLGNTDRHSIKKNLIGALLFDSGETAEATRLKRTARRRYTRRKNRICYLQEIFSNEMAKVDDSFFHRLEESFLVEEDKKHERHPIFGNIVDEVAYHEKYPTIYHLRKKLVDSTDKADLRLIYLALAHMIKFRGHFLIEGDLNPDNSDVDKLFIQLVQTYNQLFEENPINASGVDAKAILSARLSKSRRLENLIAQLPGEKKNGLFGNLIALSLGLTPNFKSNFDLAEDAKLQLSKDTYDDDLDNLLAQIGDQYADLFLAAKNLSDAILLSDILRVNTEITKAPLSASMIKRYDEHHQDLTLLKALVRQQLPEKYKEIFFDQSKNGYAGYIDGGASQEEFYKFIKPILEKMDGTEELLVKLNREDLLRKQRTFDNGSIPHQIHLGELHAILRRQEDFYPFLKDNREKIEKILTFRIPYYVGPLARGNSRFAWMTRKSEETITPWNFEEVVDKGASAQSFIERMTNFDKNLPNEKVLPKHSLLYEYFTVYNELTKVKYVTEGMRKPAFLSGEQKKAIVDLLFKTNRKVTVKQLKEDYFKKIECFDSVEISGVEDRFNASLGTYHDLLKIIKDKDFLDNEENEDILEDIVLTLTLFEDREMIEERLKTYAHLFDDKVMKQLKRRRYTGWGRLSRKLINGIRDKQSGKTILDFLKSDGFANRNFMQLIHDDSLTFKEDIQKAQVSGQGDSLHEHIANLAGSPAIKKGILQTVKVVDELVKVMGRHKPENIVIEMARENQTTQKGQKNSRERMKRIEEGIKELGSQILKEHPVENTQLQNEKLYLYYLQNGRDMYVDQELDINRLSDYDVDHIVPQSFLKDDSIDNKVLTRSDKARGKSDNVPSEEVVKKMKNYWRQLLNAKLITQRKFDNLTKAERGGLSELDKAGFIKRQLVETRQITKHVAQILDSRMNTKYDENDKLIREVKVITLKSKLVSDFRKDFQFYKVREINNYHHAHDAYLNAVVGTALIKKYPKLESEFVYGDYKVYDVRKMIAKSEQEIGKATAKYFFYSNIMNFFKTEITLANGEIRKRPLIETNGETGEIVWDKGRDFATVRKVLSMPQVNIVKKTEVQTGGFSKESILPKRNSDKLIARKKDWDPKKYGGFDSPTVAYSVLVVAKVEKGKSKKLKSVKELLGITIMERSSFEKNPIDFLEAKGYKEVKKDLIIKLPKYSLFELENGRKRMLASAGELQKGNELALPSKYVNFLYLASHYEKLKGSPEDNEQKQLFVEQHKHYLDEIIEQISEFSKRVILADANLDKVLSAYNKHRDKPIREQAENIIHLFTLTNLGAPAAFKYFDTTIDRKRYTSTKEVLDATLIHQSITGLYETRIDLSQLGGDGGSGGSSGGSSGSETPGTSESATPESSGGSSGGSSGGTVSLQDEHRLFDIPVTTSLPDVWLQDFPQAWAETGGLGRAKCQAPIIIDLKPTAVPVSIKQYPMSLEAHMGIRQHIIKFLELGVLRPCRSPWNTPLLPVKKPGTQDYRPVQDLREINKRTVDIHPTVPNPYNLLSTLKPDYSWYTVLDLKDAFFCLPLAPQSQELFAFEWKDPERGISGQLTWTRLPQGFKNSPTLFNEALHRDLTDFRTQHPEVTLLQYVDDLLLAAPTKKACTQGTRHLLQELGEKGYRASAKKAQICQTKVTYLGYILSEGKRWLTPGRIETVARIPPPRNPREVREFLGKAGFCRLFIPGFAELAAPLYALTKPSTPFTWQTEHQLAFEALKKALLSAPALGLPDTSKPFTLFLDERQGIAKGVLTQKLGPWKRPVAYLSKKLDPVAAGWPPCLRIMAATAMLVKDSAKLTLGQPLTVITPHTLEAIVRQPPDRWITNARLTHYQALLLDTDRVQFGPPVTLNPATLLPVPENQPSPHDCRQVLAETHGTREDLKDQELPDADHTWYTDGSSYLDSGTRRAGAAVVDGHNTIWAQSLPPGTSAQKAELIALTKALELSKGKKANIYTDSRYAFATAHTHGSIYERRGWLTSEGKEIKNKAEIIALLKALFLPQEVAIIHCPGHQKGQDPVAVGNRQADRVARQAAMAEVLTLATEPDNTSHITAGKRTADGSEFEKRTADGSEFESPKKKAKVE

SEQ ID NO: 2046 - protein, 2102 aa, synthetic construct
  source 1..2102: note = Description of Artificial Sequence: Synthetic polypeptide
MPAAKRVKLDGGDKKYSIGLDIGTNSVGWAVITDEYKVPSKKFKVLGNTDRHSIKKNLIGALLFDSGETAEATRLKRTARRRYTRRKNRICYLQEIFSNEMAKVDDSFFHRLEESFLVEEDKKHERHPIFGNIVDEVAYHEKYPTIYHLRKKLVDSTDKADLRLIYLALAHMIKFRGHFLIEGDLNPDNSDVDKLFIQLVQTYNQLFEENPINASGVDAKAILSARLSKSRRLENLIAQLPGEKKNGLFGNLIALSLGLTPNFKSNFDLAEDAKLQLSKDTYDDDLDNLLAQIGDQYADLFLAAKNLSDAILLSDILRVNTEITKAPLSASMIKRYDEHHQDLTLLKALVRQQLPEKYKEIFFDQSKNGYAGYIDGGASQEEFYKFIKPILEKMDGTEELLVKLNREDLLRKQRTFDNGSIPHQIHLGELHAILRRQEDFYPFLKDNREKIEKILTFRIPYYVGPLARGNSRFAWMTRKSEETITPWNFEEVVDKGASAQSFIERMTNFDKNLPNEKVLPKHSLLYEYFTVYNELTKVKYVTEGMRKPAFLSGEQKKAIVDLLFKTNRKVTVKQLKEDYFKKIECFDSVEISGVEDRFNASLGTYHDLLKIIKDKDFLDNEENEDILEDIVLTLTLFEDREMIEERLKTYAHLFDDKVMKQLKRRRYTGWGRLSRKLINGIRDKQSGKTILDFLKSDGFANRNFMQLIHDDSLTFKEDIQKAQVSGQGDSLHEHIANLAGSPAIKKGILQTVKVVDELVKVMGRHKPENIVIEMARENQTTQKGQKNSRERMKRIEEGIKELGSQILKEHPVENTQLQNEKLYLYYLQNGRDMYVDQELDINRLSDYDVDHIVPQSFLKDDSIDNKVLTRSDKARGKSDNVPSEEVVKKMKNYWRQLLNAKLITQRKFDNLTKAERGGLSELDKAGFIKRQLVETRQITKHVAQILDSRMNTKYDENDKLIREVKVITLKSKLVSDFRKDFQFYKVREINNYHHAHDAYLNAVVGTALIKKYPKLESEFVYGDYKVYDVRKMIAKSEQEIGKATAKYFFYSNIMNFFKTEITLANGEIRKRPLIETNGETGEIVWDKGRDFATVRKVLSMPQVNIVKKTEVQTGGFSKESILPKRNSDKLIARKKDWDPKKYGGFDSPTVAYSVLVVAKVEKGKSKKLKSVKELLGITIMERSSFEKNPIDFLEAKGYKEVKKDLIIKLPKYSLFELENGRKRMLASAGELQKGNELALPSKYVNFLYLASHYEKLKGSPEDNEQKQLFVEQHKHYLDEIIEQISEFSKRVILADANLDKVLSAYNKHRDKPIREQAENIIHLFTLTNLGAPAAFKYFDTTIDRKRYTSTKEVLDATLIHQSITGLYETRIDLSQLGGDGGGGSEAAAKGSSGGTVSLQDEHRLFDIPVTTSLPDVWLQDFPQAWAETGGLGRAKCQAPIIIDLKPTAVPVSIKQYPMSLEAHMGIRQHIIKFLELGVLRPCRSPWNTPLLPVKKPGTQDYRPVQDLREINKRTVDIHPTVPNPYNLLSTLKPDYSWYTVLDLKDAFFCLPLAPQSQELFAFEWKDPERGISGQLTWTRLPQGFKNSPTLFNEALHRDLTDFRTQHPEVTLLQYVDDLLLAAPTKKACTQGTRHLLQELGEKGYRASAKKAQICQTKVTYLGYILSEGKRWLTPGRIETVARIPPPRNPREVREFLGKAGFCRLFIPGFAELAAPLYALTKPSTPFTWQTEHQLAFEALKKALLSAPALGLPDTSKPFTLFLDERQGIAKGVLTQKLGPWKRPVAYLSKKLDPVAAGWPPCLRIMAATAMLVKDSAKLTLGQPLTVITPHTLEAIVRQPPDRWITNARLTHYQALLLDTDRVQFGPPVTLNPATLLPVPENQPSPHDCRQVLAETHGTREDLKDQELPDADHTWYTDGSSYLDSGTRRAGAAVVDGHNTIWAQSLPPGTSAQKAELIALTKALELSKGKKANIYTDSRYAFATAHTHGSIYERRGWLTSEGKEIKNKAEIIALLKALFLPQEVAIIHCPGHQKGQDPVAVGNRQADRVARQAAMAEVLTLATEPDNTSHITAGKRTADGSEFEKRTADGSEFESPKKKAKVE

SEQ ID NO: 2047 - protein, 2097 aa, synthetic construct
  source 1..2097: note = Description of Artificial Sequence: Synthetic polypeptide
MPAAKRVKLDGGDKKYSIGLDIGTNSVGWAVITDEYKVPSKKFKVLGNTDRHSIKKNLIGALLFDSGETAEATRLKRTARRRYTRRKNRICYLQEIFSNEMAKVDDSFFHRLEESFLVEEDKKHERHPIFGNIVDEVAYHEKYPTIYHLRKKLVDSTDKADLRLIYLALAHMIKFRGHFLIEGDLNPDNSDVDKLFIQLVQTYNQLFEENPINASGVDAKAILSARLSKSRRLENLIAQLPGEKKNGLFGNLIALSLGLTPNFKSNFDLAEDAKLQLSKDTYDDDLDNLLAQIGDQYADLFLAAKNLSDAILLSDILRVNTEITKAPLSASMIKRYDEHHQDLTLLKALVRQQLPEKYKEIFFDQSKNGYAGYIDGGASQEEFYKFIKPILEKMDGTEELLVKLNREDLLRKQRTFDNGSIPHQIHLGELHAILRRQEDFYPFLKDNREKIEKILTFRIPYYVGPLARGNSRFAWMTRKSEETITPWNFEEVVDKGASAQSFIERMTNFDKNLPNEKVLPKHSLLYEYFTVYNELTKVKYVTEGMRKPAFLSGEQKKAIVDLLFKTNRKVTVKQLKEDYFKKIECFDSVEISGVEDRFNASLGTYHDLLKIIKDKDFLDNEENEDILEDIVLTLTLFEDREMIEERLKTYAHLFDDKVMKQLKRRRYTGWGRLSRKLINGIRDKQSGKTILDFLKSDGFANRNFMQLIHDDSLTFKEDIQKAQVSGQGDSLHEHIANLAGSPAIKKGILQTVKVVDELVKVMGRHKPENIVIEMARENQTTQKGQKNSRERMKRIEEGIKELGSQILKEHPVENTQLQNEKLYLYYLQNGRDMYVDQELDINRLSDYDVDHIVPQSFLKDDSIDNKVLTRSDKARGKSDNVPSEEVVKKMKNYWRQLLNAKLITQRKFDNLTKAERGGLSELDKAGFIKRQLVETRQITKHVAQILDSRMNTKYDENDKLIREVKVITLKSKLVSDFRKDFQFYKVREINNYHHAHDAYLNAVVGTALIKKYPKLESEFVYGDYKVYDVRKMIAKSEQEIGKATAKYFFYSNIMNFFKTEITLANGEIRKRPLIETNGETGEIVWDKGRDFATVRKVLSMPQVNIVKKTEVQTGGFSKESILPKRNSDKLIARKKDWDPKKYGGFDSPTVAYSVLVVAKVEKGKSKKLKSVKELLGITIMERSSFEKNPIDFLEAKGYKEVKKDLIIKLPKYSLFELENGRKRMLASAGELQKGNELALPSKYVNFLYLASHYEKLKGSPEDNEQKQLFVEQHKHYLDEIIEQISEFSKRVILADANLDKVLSAYNKHRDKPIREQAENIIHLFTLTNLGAPAAFKYFDTTIDRKRYTSTKEVLDATLIHQSITGLYETRIDLSQLGGDGGGSSGGSGGTVSLQDEHRLFDIPVTTSLPDVWLQDFPQAWAETGGLGRAKCQAPIIIDLKPTAVPVSIKQYPMSLEAHMGIRQHIIKFLELGVLRPCRSPWNTPLLPVKKPGTQDYRPVQDLREINKRTVDIHPTVPNPYNLLSTLKPDYSWYTVLDLKDAFFCLPLAPQSQELFAFEWKDPERGISGQLTWTRLPQGFKNSPTLFNEALHRDLTDFRTQHPEVTLLQYVDDLLLAAPTKKACTQGTRHLLQELGEKGYRASAKKAQICQTKVTYLGYILSEGKRWLTPGRIETVARIPPPRNPREVREFLGKAGFCRLFIPGFAELAAPLYALTKPSTPFTWQTEHQLAFEALKKALLSAPALGLPDTSKPFTLFLDERQGIAKGVLTQKLGPWKRPVAYLSKKLDPVAAGWPPCLRIMAATAMLVKDSAKLTLGQPLTVITPHTLEAIVRQPPDRWITNARLTHYQALLLDTDRVQFGPPVTLNPATLLPVPENQPSPHDCRQVLAETHGTREDLKDQELPDADHTWYTDGSSYLDSGTRRAGAAVVDGHNTIWAQSLPPGTSAQKAELIALTKALELSKGKKANIYTDSRYAFATAHTHGSIYERRGWLTSEGKEIKNKAEIIALLKALFLPQEVAIIHCPGHQKGQDPVAVGNRQADRVARQAAMAEVLTLATEPDNTSHITAGKRTADGSEFEKRTADGSEFESPKKKAKVE

SEQ ID NO: 2048 - protein, 2096 aa, synthetic construct
  source 1..2096: note = Description of Artificial Sequence: Synthetic polypeptide
MPAAKRVKLDGGDKKYSIGLDIGTNSVGWAVITDEYKVPSKKFKVLGNTDRHSIKKNLIGALLFDSGETAEATRLKRTARRRYTRRKNRICYLQEIFSNEMAKVDDSFFHRLEESFLVEEDKKHERHPIFGNIVDEVAYHEKYPTIYHLRKKLVDSTDKADLRLIYLALAHMIKFRGHFLIEGDLNPDNSDVDKLFIQLVQTYNQLFEENPINASGVDAKAILSARLSKSRRLENLIAQLPGEKKNGLFGNLIALSLGLTPNFKSNFDLAEDAKLQLSKDTYDDDLDNLLAQIGDQYADLFLAAKNLSDAILLSDILRVNTEITKAPLSASMIKRYDEHHQDLTLLKALVRQQLPEKYKEIFFDQSKNGYAGYIDGGASQEEFYKFIKPILEKMDGTEELLVKLNREDLLRKQRTFDNGSIPHQIHLGELHAILRRQEDFYPFLKDNREKIEKILTFRIPYYVGPLARGNSRFAWMTRKSEETITPWNFEEVVDKGASAQSFIERMTNFDKNLPNEKVLPKHSLLYEYFTVYNELTKVKYVTEGMRKPAFLSGEQKKAIVDLLFKTNRKVTVKQLKEDYFKKIECFDSVEISGVEDRFNASLGTYHDLLKIIKDKDFLDNEENEDILEDIVLTLTLFEDREMIEERLKTYAHLFDDKVMKQLKRRRYTGWGRLSRKLINGIRDKQSGKTILDFLKSDGFANRNFMQLIHDDSLTFKEDIQKAQVSGQGDSLHEHIANLAGSPAIKKGILQTVKVVDELVKVMGRHKPENIVIEMARENQTTQKGQKNSRERMKRIEEGIKELGSQILKEHPVENTQLQNEKLYLYYLQNGRDMYVDQELDINRLSDYDVDHIVPQSFLKDDSIDNKVLTRSDKARGKSDNVPSEEVVKKMKNYWRQLLNAKLITQRKFDNLTKAERGGLSELDKAGFIKRQLVETRQITKHVAQILDSRMNTKYDENDKLIREVKVITLKSKLVSDFRKDFQFYKVREINNYHHAHDAYLNAVVGTALIKKYPKLESEFVYGDYKVYDVRKMIAKSEQEIGKATAKYFFYSNIMNFFKTEITLANGEIRKRPLIETNGETGEIVWDKGRDFATVRKVLSMPQVNIVKKTEVQTGGFSKESILPKRNSDKLIARKKDWDPKKYGGFDSPTVAYSVLVVAKVEKGKSKKLKSVKELLGITIMERSSFEKNPIDFLEAKGYKEVKKDLIIKLPKYSLFELENGRKRMLASAGELQKGNELALPSKYVNFLYLASHYEKLKGSPEDNEQKQLFVEQHKHYLDEIIEQISEFSKRVILADANLDKVLSAYNKHRDKPIREQAENIIHLFTLTNLGAPAAFKYFDTTIDRKRYTSTKEVLDATLIHQSITGLYETRIDLSQLGGDGGPAPGGSEAAAKGGLGIEDEYRLHETSTEPDVSLGSTWLSDFPQAWAETGGMGLAVRQAPLIIPLKATSTPVSIQQYPMSHEARLGIKPHIQRLLDQGILVPCQSPWNTPLLPVKKPGTNDYRPVQDLREVNKRVEDIHPTVPNPYNLLSGLPPSHQWYTVLDLKDAFFCLRLHPTSQPLFAFEWRDPGMGISGQLTWTRLPQGFKNSPTLFNEALHRDLADFRIQHPDLILLQYVDDILLAATSELDCQQGTRALLQTLGDLGYRASAKKAQICQKQVKYLGYLLREGQRWLTEARKETVMGQPVPKTPRQLREFLGKAGFCRLFIPGFAEMAAPLYPLTKPGTLFSWGPDQQKAYQEIKQALLTAPALGLPDLTKPFELFVDEKQGYAKGVLTQKLGPWRRPVAYLSKKLDPVAAGWPPCLRMVAAIAVLTKDAGKLTMGQPLVILAPHAVEALVKQPPDRWLSNARMTHYQAMLLDTDRVQFGPVVALNPATLLPLPEEGAPHDCLEILAETHGTRPDLTDQPIPDADHTWYTDGSSFLQEGQRKAGAAVTTETEVIWAGALPAGTSAQRAELIALTQALKMAEGKRLNVYTDSRYAFATAHIHGEIYRRRGWLTSEGREIKNKSEILALLKALFLPKRLSIIHCLGHQKGDSAEARGNRLADQAAREAAIKTPPDTSTLLIAGKRTADGSEFEKRTADGSEFESPKKKAKVE

SEQ ID NO: 2049 - protein, 2100 aa, synthetic construct
  source 1..2100: note = Description of Artificial Sequence: Synthetic polypeptide
MPAAKRVKLDGGDKKYSIGLDIGTNSVGWAVITDEYKVPSKKFKVLGNTDRHSIKKNLIGALLFDSGETAEATRLKRTARRRYTRRKNRICYLQEIFSNEMAKVDDSFFHRLEESFLVEEDKKHERHPIFGNIVDEVAYHEKYPTIYHLRKKLVDSTDKADLRLIYLALAHMIKFRGHFLIEGDLNPDNSDVDKLFIQLVQTYNQLFEENPINASGVDAKAILSARLSKSRRLENLIAQLPGEKKNGLFGNLIALSLGLTPNFKSNFDLAEDAKLQLSKDTYDDDLDNLLAQIGDQYADLFLAAKNLSDAILLSDILRVNTEITKAPLSASMIKRYDEHHQDLTLLKALVRQQLPEKYKEIFFDQSKNGYAGYIDGGASQEEFYKFIKPILEKMDGTEELLVKLNREDLLRKQRTFDNGSIPHQIHLGELHAILRRQEDFYPFLKDNREKIEKILTFRIPYYVGPLARGNSRFAWMTRKSEETITPWNFEEVVDKGASAQSFIERMTNFDKNLPNEKVLPKHSLLYEYFTVYNELTKVKYVTEGMRKPAFLSGEQKKAIVDLLFKTNRKVTVKQLKEDYFKKIECFDSVEISGVEDRFNASLGTYHDLLKIIKDKDFLDNEENEDILEDIVLTLTLFEDREMIEERLKTYAHLFDDKVMKQLKRRRYTGWGRLSRKLINGIRDKQSGKTILDFLKSDGFANRNFMQLIHDDSLTFKEDIQKAQVSGQGDSLHEHIANLAGSPAIKKGILQTVKVVDELVKVMGRHKPENIVIEMARENQTTQKGQKNSRERMKRIEEGIKELGSQILKEHPVENTQLQNEKLYLYYLQNGRDMYVDQELDINRLSDYDVDHIVPQSFLKDDSIDNKVLTRSDKARGKSDNVPSEEVVKKMKNYWRQLLNAKLITQRKFDNLTKAERGGLSELDKAGFIKRQLVETRQITKHVAQILDSRMNTKYDENDKLIREVKVITLKSKLVSDFRKDFQFYKVREINNYHHAHDAYLNAVVGTALIKKYPKLESEFVYGDYKVYDVRKMIAKSEQEIGKATAKYFFYSNIMNFFKTEITLANGEIRKRPLIETNGETGEIVWDKGRDFATVRKVLSMPQVNIVKKTEVQTGGFSKESILPKRNSDKLIARKKDWDPKKYGGFDSPTVAYSVLVVAKVEKGKSKKLKSVKELLGITIMERSSFEKNPIDFLEAKGYKEVKKDLIIKLPKYSLFELENGRKRMLASAGELQKGNELALPSKYVNFLYLASHYEKLKGSPEDNEQKQLFVEQHKHYLDEIIEQISEFSKRVILADANLDKVLSAYNKHRDKPIREQAENIIHLFTLTNLGAPAAFKYFDTTIDRKRYTSTKEVLDATLIHQSITGLYETRIDLSQLGGDGGEAAAKGGGGSEAAAKGGLGIEDEYRLHETSTEPDVSLGSTWLSDFPQAWAETGGMGLAVRQAPLIIPLKATSTPVSIQQYPMSHEARLGIKPHIQRLLDQGILVPCQSPWNTPLLPVKKPGTNDYRPVQDLREVNKRVEDIHPTVPNPYNLLSGLPPSHQWYTVLDLKDAFFCLRLHPTSQPLFAFEWRDPGMGISGQLTWTRLPQGFKNSPTLFNEALHRDLADFRIQHPDLILLQYVDDILLAATSELDCQQGTRALLQTLGDLGYRASAKKAQICQKQVKYLGYLLREGQRWLTEARKETVMGQPVPKTPRQLREFLGKAGFCRLFIPGFAEMAAPLYPLTKPGTLFSWGPDQQKAYQEIKQALLTAPALGLPDLTKPFELFVDEKQGYAKGVLTQKLGPWRRPVAYLSKKLDPVAAGWPPCLRMVAAIAVLTKDAGKLTMGQPLVILAPHAVEALVKQPPDRWLSNARMTHYQAMLLDTDRVQFGPVVALNPATLLPLPEEGAPHDCLEILAETHGTRPDLTDQPIPDADHTWYTDGSSFLQEGQRKAGAAVTTETEVIWAGALPAGTSAQRAELIALTQALKMAEGKRLNVYTDSRYAFATAHIHGEIYRRRGWLTSEGREIKNKSEILALLKALFLPKRLSIIHCLGHQKGDSAEARGNRLADQAAREAAIKTPPDTSTLLIAGKRTADGSEFEKRTADGSEFESPKKKAKVE

SEQ ID NO: 2050 - protein, 2096 aa, synthetic construct
  source 1..2096: note = Description of Artificial Sequence: Synthetic polypeptide
MPAAKRVKLDGGDKKYSIGLDIGTNSVGWAVITDEYKVPSKKFKVLGNTDRHSIKKNLIGALLFDSGETAEATRLKRTARRRYTRRKNRICYLQEIFSNEMAKVDDSFFHRLEESFLVEEDKKHERHPIFGNIVDEVAYHEKYPTIYHLRKKLVDSTDKADLRLIYLALAHMIKFRGHFLIEGDLNPDNSDVDKLFIQLVQTYNQLFEENPINASGVDAKAILSARLSKSRRLENLIAQLPGEKKNGLFGNLIALSLGLTPNFKSNFDLAEDAKLQLSKDTYDDDLDNLLAQIGDQYADLFLAAKNLSDAILLSDILRVNTEITKAPLSASMIKRYDEHHQDLTLLKALVRQQLPEKYKEIFFDQSKNGYAGYIDGGASQEEFYKFIKPILEKMDGTEELLVKLNREDLLRKQRTFDNGSIPHQIHLGELHAILRRQEDFYPFLKDNREKIEKILTFRIPYYVGPLARGNSRFAWMTRKSEETITPWNFEEVVDKGASAQSFIERMTNFDKNLPNEKVLPKHSLLYEYFTVYNELTKVKYVTEGMRKPAFLSGEQKKAIVDLLFKTNRKVTVKQLKEDYFKKIECFDSVEISGVEDRFNASLGTYHDLLKIIKDKDFLDNEENEDILEDIVLTLTLFEDREMIEERLKTYAHLFDDKVMKQLKRRRYTGWGRLSRKLINGIRDKQSGKTILDFLKSDGFANRNFMQLIHDDSLTFKEDIQKAQVSGQGDSLHEHIANLAGSPAIKKGILQTVKVVDELVKVMGRHKPENIVIEMARENQTTQKGQKNSRERMKRIEEGIKELGSQILKEHPVENTQLQNEKLYLYYLQNGRDMYVDQELDINRLSDYDVDHIVPQSFLKDDSIDNKVLTRSDKARGKSDNVPSEEVVKKMKNYWRQLLNAKLITQRKFDNLTKAERGGLSELDKAGFIKRQLVETRQITKHVAQILDSRMNTKYDENDKLIREVKVITLKSKLVSDFRKDFQFYKVREINNYHHAHDAYLNAVVGTALIKKYPKLESEFVYGDYKVYDVRKMIAKSEQEIGKATAKYFFYSNIMNFFKTEITLANGEIRKRPLIETNGETGEIVWDKGRDFATVRKVLSMPQVNIVKKTEVQTGGFSKESILPKRNSDKLIARKKDWDPKKYGGFDSPTVAYSVLVVAKVEKGKSKKLKSVKELLGITIMERSSFEKNPIDFLEAKGYKEVKKDLIIKLPKYSLFELENGRKRMLASAGELQKGNELALPSKYVNFLYLASHYEKLKGSPEDNEQKQLFVEQHKHYLDEIIEQISEFSKRVILADANLDKVLSAYNKHRDKPIREQAENIIHLFTLTNLGAPAAFKYFDTTIDRKRYTSTKEVLDATLIHQSITGLYETRIDLSQLGGDGGPAPGSSEAAAKGGLGIEDEYRLHETSTEPDVSLGSTWLSDFPQAWAETGGMGLAVRQAPLIIPLKATSTPVSIQQYPMSHEARLGIKPHIQRLLDQGILVPCQSPWNTPLLPVKKPGTNDYRPVQDLREVNKRVEDIHPTVPNPYNLLSGLPPSHQWYTVLDLKDAFFCLRLHPTSQPLFAFEWRDPGMGISGQLTWTRLPQGFKNSPTLFNEALHRDLADFRIQHPDLILLQYVDDILLAATSELDCQQGTRALLQTLGDLGYRASAKKAQICQKQVKYLGYLLREGQRWLTEARKETVMGQPVPKTPRQLREFLGKAGFCRLFIPGFAEMAAPLYPLTKPGTLFSWGPDQQKAYQEIKQALLTAPALGLPDLTKPFELFVDEKQGYAKGVLTQKLGPWRRPVAYLSKKLDPVAAGWPPCLRMVAAIAVLTKDAGKLTMGQPLVILAPHAVEALVKQPPDRWLSNARMTHYQAMLLDTDRVQFGPVVALNPATLLPLPEEGAPHDCLEILAETHGTRPDLTDQPIPDADHTWYTDGSSFLQEGQRKAGAAVTTETEVIWAGALPAGTSAQRAELIALTQALKMAEGKRLNVYTDSRYAFATAHIHGEIYRRRGWLTSEGREIKNKSEILALLKALFLPKRLSIIHCLGHQKGDSAEARGNRLADQAAREAAIKTPPDTSTLLIAGKRTADGSEFEKRTADGSEFESPKKKAKVE

SEQ ID NO: 2051 - protein, 2094 aa, synthetic construct
  source 1..2094: note = Description of Artificial Sequence: Synthetic polypeptide
MPAAKRVKLDGGDKKYSIGLDIGTNSVGWAVITDEYKVPSKKFKVLGNTDRHSIKKNLIGALLFDSGETAEATRLKRTARRRYTRRKNRICYLQEIFSNEMAKVDDSFFHRLEESFLVEEDKKHERHPIFGNIVDEVAYHEKYPTIYHLRKKLVDSTDKADLRLIYLALAHMIKFRGHFLIEGDLNPDNSDVDKLFIQLVQTYNQLFEENPINASGVDAKAILSARLSKSRRLENLIAQLPGEKKNGLFGNLIALSLGLTPNFKSNFDLAEDAKLQLSKDTYDDDLDNLLAQIGDQYADLFLAAKNLSDAILLSDILRVNTEITKAPLSASMIKRYDEHHQDLTLLKALVRQQLPEKYKEIFFDQSKNGYAGYIDGGASQEEFYKFIKPILEKMDGTEELLVKLNREDLLRKQRTFDNGSIPHQIHLGELHAILRRQEDFYPFLKDNREKIEKILTFRIPYYVGPLARGNSRFAWMTRKSEETITPWNFEEVVDKGASAQSFIERMTNFDKNLPNEKVLPKHSLLYEYFTVYNELTKVKYVTEGMRKPAFLSGEQKKAIVDLLFKTNRKVTVKQLKEDYFKKIECFDSVEISGVEDRFNASLGTYHDLLKIIKDKDFLDNEENEDILEDIVLTLTLFEDREMIEERLKTYAHLFDDKVMKQLKRRRYTGWGRLSRKLINGIRDKQSGKTILDFLKSDGFANRNFMQLIHDDSLTFKEDIQKAQVSGQGDSLHEHIANLAGSPAIKKGILQTVKVVDELVKVMGRHKPENIVIEMARENQTTQKGQKNSRERMKRIEEGIKELGSQILKEHPVENTQLQNEKLYLYYLQNGRDMYVDQELDINRLSDYDVDHIVPQSFLKDDSIDNKVLTRSDKARGKSDNVPSEEVVKKMKNYWRQLLNAKLITQRKFDNLTKAERGGLSELDKAGFIKRQLVETRQITKHVAQILDSRMNTKYDENDKLIREVKVITLKSKLVSDFRKDFQFYKVREINNYHHAHDAYLNAVVGTALIKKYPKLESEFVYGDYKVYDVRKMIAKSEQEIGKATAKYFFYSNIMNFFKTEITLANGEIRKRPLIETNGETGEIVWDKGRDFATVRKVLSMPQVNIVKKTEVQTGGFSKESILPKRNSDKLIARKKDWDPKKYGGFDSPTVAYSVLVVAKVEKGKSKKLKSVKELLGITIMERSSFEKNPIDFLEAKGYKEVKKDLIIKLPKYSLFELENGRKRMLASAGELQKGNELALPSKYVNFLYLASHYEKLKGSPEDNEQKQLFVEQHKHYLDEIIEQISEFSKRVILADANLDKVLSAYNKHRDKPIREQAENIIHLFTLTNLGAPAAFKYFDTTIDRKRYTSTKEVLDATLIHQSITGLYETRIDLSQLGGDGGGGSPAPGSSGGLGIEDEYRLHETSTEPDVSLGSTWLSDFPQAWAETGGMGLAVRQAPLIIPLKATSTPVSIQQYPMSHEARLGIKPHIQRLLDQGILVPCQSPWNTPLLPVKKPGTNDYRPVQDLREVNKRVEDIHPTVPNPYNLLSGLPPSHQWYTVLDLKDAFFCLRLHPTSQPLFAFEWRDPGMGISGQLTWTRLPQGFKNSPTLFNEALHRDLADFRIQHPDLILLQYVDDILLAATSELDCQQGTRALLQTLGDLGYRASAKKAQICQKQVKYLGYLLREGQRWLTEARKETVMGQPVPKTPRQLREFLGKAGFCRLFIPGFAEMAAPLYPLTKPGTLFSWGPDQQKAYQEIKQALLTAPALGLPDLTKPFELFVDEKQGYAKGVLTQKLGPWRRPVAYLSKKLDPVAAGWPPCLRMVAAIAVLTKDAGKLTMGQPLVILAPHAVEALVKQPPDRWLSNARMTHYQAMLLDTDRVQFGPVVALNPATLLPLPEEGAPHDCLEILAETHGTRPDLTDQPIPDADHTWYTDGSSFLQEGQRKAGAAVTTETEVIWAGALPAGTSAQRAELIALTQALKMAEGKRLNVYTDSRYAFATAHIHGEIYRRRGWLTSEGREIKNKSEILALLKALFLPKRLSIIHCLGHQKGDSAEARGNRLADQAAREAAIKTPPDTSTLLIAGKRTADGSEFEKRTADGSEFESPKKKAKVE

SEQ ID NO: 2052 - protein, 2096 aa, synthetic construct
  source 1..2096: note = Description of Artificial Sequence: Synthetic polypeptide
MPAAKRVKLDGGDKKYSIGLDIGTNSVGWAVITDEYKVPSKKFKVLGNTDRHSIKKNLIGALLFDSGETAEATRLKRTARRRYTRRKNRICYLQEIFSNEMAKVDDSFFHRLEESFLVEEDKKHERHPIFGNIVDEVAYHEKYPTIYHLRKKLVDSTDKADLRLIYLALAHMIKFRGHFLIEGDLNPDNSDVDKLFIQLVQTYNQLFEENPINASGVDAKAILSARLSKSRRLENLIAQLPGEKKNGLFGNLIALSLGLTPNFKSNFDLAEDAKLQLSKDTYDDDLDNLLAQIGDQYADLFLAAKNLSDAILLSDILRVNTEITKAPLSASMIKRYDEHHQDLTLLKALVRQQLPEKYKEIFFDQSKNGYAGYIDGGASQEEFYKFIKPILEKMDGTEELLVKLNREDLLRKQRTFDNGSIPHQIHLGELHAILRRQEDFYPFLKDNREKIEKILTFRIPYYVGPLARGNSRFAWMTRKSEETITPWNFEEVVDKGASAQSFIERMTNFDKNLPNEKVLPKHSLLYEYFTVYNELTKVKYVTEGMRKPAFLSGEQKKAIVDLLFKTNRKVTVKQLKEDYFKKIECFDSVEISGVEDRFNASLGTYHDLLKIIKDKDFLDNEENEDILEDIVLTLTLFEDREMIEERLKTYAHLFDDKVMKQLKRRRYTGWGRLSRKLINGIRDKQSGKTILDFLKSDGFANRNFMQLIHDDSLTFKEDIQKAQVSGQGDSLHEHIANLAGSPAIKKGILQTVKVVDELVKVMGRHKPENIVIEMARENQTTQKGQKNSRERMKRIEEGIKELGSQILKEHPVENTQLQNEKLYLYYLQNGRDMYVDQELDINRLSDYDVDHIVPQSFLKDDSIDNKVLTRSDKARGKSDNVPSEEVVKKMKNYWRQLLNAKLITQRKFDNLTKAERGGLSELDKAGFIKRQLVETRQITKHVAQILDSRMNTKYDENDKLIREVKVITLKSKLVSDFRKDFQFYKVREINNYHHAHDAYLNAVVGTALIKKYPKLESEFVYGDYKVYDVRKMIAKSEQEIGKATAKYFFYSNIMNFFKTEITLANGEIRKRPLIETNGETGEIVWDKGRDFATVRKVLSMPQVNIVKKTEVQTGGFSKESILPKRNSDKLIARKKDWDPKKYGGFDSPTVAYSVLVVAKVEKGKSKKLKSVKELLGITIMERSSFEKNPIDFLEAKGYKEVKKDLIIKLPKYSLFELENGRKRMLASAGELQKGNELALPSKYVNFLYLASHYEKLKGSPEDNEQKQLFVEQHKHYLDEIIEQISEFSKRVILADANLDKVLSAYNKHRDKPIREQAENIIHLFTLTNLGAPAAFKYFDTTIDRKRYTSTKEVLDATLIHQSITGLYETRIDLSQLGGDGGEAAAKGSSPAPGGLGIEDEYRLHETSTEPDVSLGSTWLSDFPQAWAETGGMGLAVRQAPLIIPLKATSTPVSIQQYPMSHEARLGIKPHIQRLLDQGILVPCQSPWNTPLLPVKKPGTNDYRPVQDLREVNKRVEDIHPTVPNPYNLLSGLPPSHQWYTVLDLKDAFFCLRLHPTSQPLFAFEWRDPGMGISGQLTWTRLPQGFKNSPTLFNEALHRDLADFRIQHPDLILLQYVDDILLAATSELDCQQGTRALLQTLGDLGYRASAKKAQICQKQVKYLGYLLREGQRWLTEARKETVMGQPVPKTPRQLREFLGKAGFCRLFIPGFAEMAAPLYPLTKPGTLFSWGPDQQKAYQEIKQALLTAPALGLPDLTKPFELFVDEKQGYAKGVLTQKLGPWRRPVAYLSKKLDPVAAGWPPCLRMVAAIAVLTKDAGKLTMGQPLVILAPHAVEALVKQPPDRWLSNARMTHYQAMLLDTDRVQFGPVVALNPATLLPLPEEGAPHDCLEILAETHGTRPDLTDQPIPDADHTWYTDGSSFLQEGQRKAGAAVTTETEVIWAGALPAGTSAQRAELIALTQALKMAEGKRLNVYTDSRYAFATAHIHGEIYRRRGWLTSEGREIKNKSEILALLKALFLPKRLSIIHCLGHQKGDSAEARGNRLADQAAREAAIKTPPDTSTLLIAGKRTADGSEFEKRTADGSEFESPKKKAKVE

SEQ ID NO: 2053 - protein, 2088 aa, synthetic construct
  source 1..2088: note = Description of Artificial Sequence: Synthetic polypeptide
MPAAKRVKLDGGDKKYSIGLDIGTNSVGWAVITDEYKVPSKKFKVLGNTDRHSIKKNLIGALLFDSGETAEATRLKRTARRRYTRRKNRICYLQEIFSNEMAKVDDSFFHRLEESFLVEEDKKHERHPIFGNIVDEVAYHEKYPTIYHLRKKLVDSTDKADLRLIYLALAHMIKFRGHFLIEGDLNPDNSDVDKLFIQLVQTYNQLFEENPINASGVDAKAILSARLSKSRRLENLIAQLPGEKKNGLFGNLIALSLGLTPNFKSNFDLAEDAKLQLSKDTYDDDLDNLLAQIGDQYADLFLAAKNLSDAILLSDILRVNTEITKAPLSASMIKRYDEHHQDLTLLKALVRQQLPEKYKEIFFDQSKNGYAGYIDGGASQEEFYKFIKPILEKMDGTEELLVKLNREDLLRKQRTFDNGSIPHQIHLGELHAILRRQEDFYPFLKDNREKIEKILTFRIPYYVGPLARGNSRFAWMTRKSEETITPWNFEEVVDKGASAQSFIERMTNFDKNLPNEKVLPKHSLLYEYFTVYNELTKVKYVTEGMRKPAFLSGEQKKAIVDLLFKTNRKVTVKQLKEDYFKKIECFDSVEISGVEDRFNASLGTYHDLLKIIKDKDFLDNEENEDILEDIVLTLTLFEDREMIEERLKTYAHLFDDKVMKQLKRRRYTGWGRLSRKLINGIRDKQSGKTILDFLKSDGFANRNFMQLIHDDSLTFKEDIQKAQVSGQGDSLHEHIANLAGSPAIKKGILQTVKVVDELVKVMGRHKPENIVIEMARENQTTQKGQKNSRERMKRIEEGIKELGSQILKEHPVENTQLQNEKLYLYYLQNGRDMYVDQELDINRLSDYDVDHIVPQSFLKDDSIDNKVLTRSDKARGKSDNVPSEEVVKKMKNYWRQLLNAKLITQRKFDNLTKAERGGLSELDKAGFIKRQLVETRQITKHVAQILDSRMNTKYDENDKLIREVKVITLKSKLVSDFRKDFQFYKVREINNYHHAHDAYLNAVVGTALIKKYPKLESEFVYGDYKVYDVRKMIAKSEQEIGKATAKYFFYSNIMNFFKTEITLANGEIRKRPLIETNGETGEIVWDKGRDFATVRKVLSMPQVNIVKKTEVQTGGFSKESILPKRNSDKLIARKKDWDPKKYGGFDSPTVAYSVLVVAKVEKGKSKKLKSVKELLGITIMERSSFEKNPIDFLEAKGYKEVKKDLIIKLPKYSLFELENGRKRMLASAGELQKGNELALPSKYVNFLYLASHYEKLKGSPEDNEQKQLFVEQHKHYLDEIIEQISEFSKRVILADANLDKVLSAYNKHRDKPIREQAENIIHLFTLTNLGAPAAFKYFDTTIDRKRYTSTKEVLDATLIHQSITGLYETRIDLSQLGGDGGGSSGGLGIEDEYRLHETSTEPDVSLGSTWLSDFPQAWAETGGMGLAVRQAPLIIPLKATSTPVSIQQYPMSHEARLGIKPHIQRLLDQGILVPCQSPWNTPLLPVKKPGTNDYRPVQDLREVNKRVEDIHPTVPNPYNLLSGLPPSHQWYTVLDLKDAFFCLRLHPTSQPLFAFEWRDPGMGISGQLTWTRLPQGFKNSPTLFNEALHRDLADFRIQHPDLILLQYVDDILLAATSELDCQQGTRALLQTLGDLGYRASAKKAQICQKQVKYLGYLLREGQRWLTEARKETVMGQPVPKTPRQLREFLGKAGFCRLFIPGFAEMAAPLYPLTKPGTLFSWGPDQQKAYQEIKQALLTAPALGLPDLTKPFELFVDEKQGYAKGVLTQKLGPWRRPVAYLSKKLDPVAAGWPPCLRMVAAIAVLTKDAGKLTMGQPLVILAPHAVEALVKQPPDRWLSNARMTHYQAMLLDTDRVQFGPVVALNPATLLPLPEEGAPHDCLEILAETHGTRPDLTDQPIPDADHTWYTDGSSFLQEGQRKAGAAVTTETEVIWAGALPAGTSAQRAELIALTQALKMAEGKRLNVYTDSRYAFATAHIHGEIYRRRGWLTSEGREIKNKSEILALLKALFLPKRLSIIHCLGHQKGDSAEARGNRLADQAAREAAIKTPPDTSTLLIAGKRTADGSEFEKRTADGSEFESPKKKAKVE

SEQ ID NO: 2054 - protein, 2096 aa, synthetic construct
  source 1..2096: note = Description of Artificial Sequence: Synthetic polypeptide
MPAAKRVKLDGGDKKYSIGLDIGTNSVGWAVITDEYKVPSKKFKVLGNTDRHSIKKNLIGALLFDSGETAEATRLKRTARRRYTRRKNRICYLQEIFSNEMAKVDDSFFHRLEESFLVEEDKKHERHPIFGNIVDEVAYHEKYPTIYHLRKKLVDSTDKADLRLIYLALAHMIKFRGHFLIEGDLNPDNSDVDKLFIQLVQTYNQLFEENPINASGVDAKAILSARLSKSRRLENLIAQLPGEKKNGLFGNLIALSLGLTPNFKSNFDLAEDAKLQLSKDTYDDDLDNLLAQIGDQYADLFLAAKNLSDAILLSDILRVNTEITKAPLSASMIKRYDEHHQDLTLLKALVRQQLPEKYKEIFFDQSKNGYAGYIDGGASQEEFYKFIKPILEKMDGTEELLVKLNREDLLRKQRTFDNGSIPHQIHLGELHAILRRQEDFYPFLKDNREKIEKILTFRIPYYVGPLARGNSRFAWMTRKSEETITPWNFEEVVDKGASAQSFIERMTNFDKNLPNEKVLPKHSLLYEYFTVYNELTKVKYVTEGMRKPAFLSGEQKKAIVDLLFKTNRKVTVKQLKEDYFKKIECFDSVEISGVEDRFNASLGTYHDLLKIIKDKDFLDNEENEDILEDIVLTLTLFEDREMIEERLKTYAHLFDDKVMKQLKRRRYTGWGRLSRKLINGIRDKQSGKTILDFLKSDGFANRNFMQLIHDDSLTFKEDIQKAQVSGQGDSLHEHIANLAGSPAIKKGILQTVKVVDELVKVMGRHKPENIVIEMARENQTTQKGQKNSRERMKRIEEGIKELGSQILKEHPVENTQLQNEKLYLYYLQNGRDMYVDQELDINRLSDYDVDHIVPQSFLKDDSIDNKVLTRSDKARGKSDNVPSEEVVKKMKNYWRQLLNAKLITQRKFDNLTKAERGGLSELDKAGFIKRQLVETRQITKHVAQILDSRMNTKYDENDKLIREVKVITLKSKLVSDFRKDFQFYKVREINNYHHAHDAYLNAVVGTALIKKYPKLESEFVYGDYKVYDVRKMIAKSEQEIGKATAKYFFYSNIMNFFKTEITLANGEIRKRPLIETNGETGEIVWDKGRDFATVRKVLSMPQVNIVKKTEVQTGGFSKESILPKRNSDKLIARKKDWDPKKYGGFDSPTVAYSVLVVAKVEKGKSKKLKSVKELLGITIMERSSFEKNPIDFLEAKGYKEVKKDLIIKLPKYSLFELENGRKRMLASAGELQKGNELALPSKYVNFLYLASHYEKLKGSPEDNEQKQLFVEQHKHYLDEIIEQISEFSKRVILADANLDKVLSAYNKHRDKPIREQAENIIHLFTLTNLGAPAAFKYFDTTIDRKRYTSTKEVLDATLIHQSITGLYETRIDLSQLGGDGGEAAAKGGGPAPGGLGIEDEYRLHETSTEPDVSLGSTWLSDFPQAWAETGGMGLAVRQAPLIIPLKATSTPVSIQQYPMSHEARLGIKPHIQRLLDQGILVPCQSPWNTPLLPVKKPGTNDYRPVQDLREVNKRVEDIHPTVPNPYNLLSGLPPSHQWYTVLDLKDAFFCLRLHPTSQPLFAFEWRDPGMGISGQLTWTRLPQGFKNSPTLFNEALHRDLADFRIQHPDLILLQYVDDILLAATSELDCQQGTRALLQTLGDLGYRASAKKAQICQKQVKYLGYLLREGQRWLTEARKETVMGQPVPKTPRQLREFLGKAGFCRLFIPGFAEMAAPLYPLTKPGTLFSWGPDQQKAYQEIKQALLTAPALGLPDLTKPFELFVDEKQGYAKGVLTQKLGPWRRPVAYLSKKLDPVAAGWPPCLRMVAAIAVLTKDAGKLTMGQPLVILAPHAVEALVKQPPDRWLSNARMTHYQAMLLDTDRVQFGPVVALNPATLLPLPEEGAPHDCLEILAETHGTRPDLTDQPIPDADHTWYTDGSSFLQEGQRKAGAAVTTETEVIWAGALPAGTSAQRAELIALTQALKMAEGKRLNVYTDSRYAFATAHIHGEIYRRRGWLTSEGREIKNKSEILALLKALFLPKRLSIIHCLGHQKGDSAEARGNRLADQAAREAAIKTPPDTSTLLIAGKRTADGSEFEKRTADGSEFESPKKKAKVE

SEQ ID NO: 2055 - protein, 2096 aa, synthetic construct
  source 1..2096: note = Description of Artificial Sequence: Synthetic polypeptide
MPAAKRVKLDGGDKKYSIGLDIGTNSVGWAVITDEYKVPSKKFKVLGNTDRHSIKKNLIGALLFDSGETAEATRLKRTARRRYTRRKNRICYLQEIFSNEMAKVDDSFFHRLEESFLVEEDKKHERHPIFGNIVDEVAYHEKYPTIYHLRKKLVDSTDKADLRLIYLALAHMIKFRGHFLIEGDLNPDNSDVDKLFIQLVQTYNQLFEENPINASGVDAKAILSARLSKSRRLENLIAQLPGEKKNGLFGNLIALSLGLTPNFKSNFDLAEDAKLQLSKDTYDDDLDNLLAQIGDQYADLFLAAKNLSDAILLSDILRVNTEITKAPLSASMIKRYDEHHQDLTLLKALVRQQLPEKYKEIFFDQSKNGYAGYIDGGASQEEFYKFIKPILEKMDGTEELLVKLNREDLLRKQRTFDNGSIPHQIHLGELHAILRRQEDFYPFLKDNREKIEKILTFRIPYYVGPLARGNSRFAWMTRKSEETITPWNFEEVVDKGASAQSFIERMTNFDKNLPNEKVLPKHSLLYEYFTVYNELTKVKYVTEGMRKPAFLSGEQKKAIVDLLFKTNRKVTVKQLKEDYFKKIECFDSVEISGVEDRFNASLGTYHDLLKIIKDKDFLDNEENEDILEDIVLTLTLFEDREMIEERLKTYAHLFDDKVMKQLKRRRYTGWGRLSRKLINGIRDKQSGKTILDFLKSDGFANRNFMQLIHDDSLTFKEDIQKAQVSGQGDSLHEHIANLAGSPAIKKGILQTVKVVDELVKVMGRHKPENIVIEMARENQTTQKGQKNSRERMKRIEEGIKELGSQILKEHPVENTQLQNEKLYLYYLQNGRDMYVDQELDINRLSDYDVDHIVPQSFLKDDSIDNKVLTRSDKARGKSDNVPSEEVVKKMKNYWRQLLNAKLITQRKFDNLTKAERGGLSELDKAGFIKRQLVETRQITKHVAQILDSRMNTKYDENDKLIREVKVITLKSKLVSDFRKDFQFYKVREINNYHHAHDAYLNAVVGTALIKKYPKLESEFVYGDYKVYDVRKMIAKSEQEIGKATAKYFFYSNIMNFFKTEITLANGEIRKRPLIETNGETGEIVWDKGRDFATVRKVLSMPQVNIVKKTEVQTGGFSKESILPKRNSDKLIARKKDWDPKKYGGFDSPTVAYSVLVVAKVEKGKSKKLKSVKELLGITIMERSSFEKNPIDFLEAKGYKEVKKDLIIKLPKYSLFELENGRKRMLASAGELQKGNELALPSKYVNFLYLASHYEKLKGSPEDNEQKQLFVEQHKHYLDEIIEQISEFSKRVILADANLDKVLSAYNKHRDKPIREQAENIIHLFTLTNLGAPAAFKYFDTTIDRKRYTSTKEVLDATLIHQSITGLYETRIDLSQLGGDGGEAAAKGGSGSSGGLGIEDEYRLHETSTEPDVSLGSTWLSDFPQAWAETGGMGLAVRQAPLIIPLKATSTPVSIQQYPMSHEARLGIKPHIQRLLDQGILVPCQSPWNTPLLPVKKPGTNDYRPVQDLREVNKRVEDIHPTVPNPYNLLSGLPPSHQWYTVLDLKDAFFCLRLHPTSQPLFAFEWRDPGMGISGQLTWTRLPQGFKNSPTLFNEALHRDLADFRIQHPDLILLQYVDDILLAATSELDCQQGTRALLQTLGDLGYRASAKKAQICQKQVKYLGYLLREGQRWLTEARKETVMGQPVPKTPRQLREFLGKAGFCRLFIPGFAEMAAPLYPLTKPGTLFSWGPDQQKAYQEIKQALLTAPALGLPDLTKPFELFVDEKQGYAKGVLTQKLGPWRRPVAYLSKKLDPVAAGWPPCLRMVAAIAVLTKDAGKLTMGQPLVILAPHAVEALVKQPPDRWLSNARMTHYQAMLLDTDRVQFGPVVALNPATLLPLPEEGAPHDCLEILAETHGTRPDLTDQPIPDADHTWYTDGSSFLQEGQRKAGAAVTTETEVIWAGALPAGTSAQRAELIALTQALKMAEGKRLNVYTDSRYAFATAHIHGEIYRRRGWLTSEGREIKNKSEILALLKALFLPKRLSIIHCLGHQKGDSAEARGNRLADQAAREAAIKTPPDTSTLLIAGKRTADGSEFEKRTADGSEFESPKKKAKVE

SEQ ID NO: 2056 - protein, 2097 aa, synthetic construct
  source 1..2097: note = Description of Artificial Sequence: Synthetic polypeptide
MPAAKRVKLDGGDKKYSIGLDIGTNSVGWAVITDEYKVPSKKFKVLGNTDRHSIKKNLIGALLFDSGETAEATRLKRTARRRYTRRKNRICYLQEIFSNEMAKVDDSFFHRLEESFLVEEDKKHERHPIFGNIVDEVAYHEKYPTIYHLRKKLVDSTDKADLRLIYLALAHMIKFRGHFLIEGDLNPDNSDVDKLFIQLVQTYNQLFEENPINASGVDAKAILSARLSKSRRLENLIAQLPGEKKNGLFGNLIALSLGLTPNFKSNFDLAEDAKLQLSKDTYDDDLDNLLAQIGDQYADLFLAAKNLSDAILLSDILRVNTEITKAPLSASMIKRYDEHHQDLTLLKALVRQQLPEKYKEIFFDQSKNGYAGYIDGGASQEEFYKFIKPILEKMDGTEELLVKLNREDLLRKQRTFDNGSIPHQIHLGELHAILRRQEDFYPFLKDNREKIEKILTFRIPYYVGPLARGNSRFAWMTRKSEETITPWNFEEVVDKGASAQSFIERMTNFDKNLPNEKVLPKHSLLYEYFTVYNELTKVKYVTEGMRKPAFLSGEQKKAIVDLLFKTNRKVTVKQLKEDYFKKIECFDSVEISGVEDRFNASLGTYHDLLKIIKDKDFLDNEENEDILEDIVLTLTLFEDREMIEERLKTYAHLFDDKVMKQLKRRRYTGWGRLSRKLINGIRDKQSGKTILDFLKSDGFANRNFMQLIHDDSLTFKEDIQKAQVSGQGDSLHEHIANLAGSPAIKKGILQTVKVVDELVKVMGRHKPENIVIEMARENQTTQKGQKNSRERMKRIEEGIKELGSQILKEHPVENTQLQNEKLYLYYLQNGRDMYVDQELDINRLSDYDVDHIVPQSFLKDDSIDNKVLTRSDKARGKSDNVPSEEVVKKMKNYWRQLLNAKLITQRKFDNLTKAERGGLSELDKAGFIKRQLVETRQITKHVAQILDSRMNTKYDENDKLIREVKVITLKSKLVSDFRKDFQFYKVREINNYHHAHDAYLNAVVGTALIKKYPKLESEFVYGDYKVYDVRKMIAKSEQEIGKATAKYFFYSNIMNFFKTEITLANGEIRKRPLIETNGETGEIVWDKGRDFATVRKVLSMPQVNIVKKTEVQTGGFSKESILPKRNSDKLIARKKDWDPKKYGGFDSPTVAYSVLVVAKVEKGKSKKLKSVKELLGITIMERSSFEKNPIDFLEAKGYKEVKKDLIIKLPKYSLFELENGRKRMLASAGELQKGNELALPSKYVNFLYLASHYEKLKGSPEDNEQKQLFVEQHKHYLDEIIEQISEFSKRVILADANLDKVLSAYNKHRDKPIREQAENIIHLFTLTNLGAPAAFKYFDTTIDRKRYTSTKEVLDATLIHQSITGLYETRIDLSQLGGDGGGSAGSAAGSGEFGGLGIEDEYRLHETSTEPDVSLGSTWLSDFPQAWAETGGMGLAVRQAPLIIPLKATSTPVSIQQYPMSHEARLGIKPHIQRLLDQGILVPCQSPWNTPLLPVKKPGTNDYRPVQDLREVNKRVEDIHPTVPNPYNLLSGLPPSHQWYTVLDLKDAFFCLRLHPTSQPLFAFEWRDPGMGISGQLTWTRLPQGFKNSPTLFNEALHRDLADFRIQHPDLILLQYVDDILLAATSELDCQQGTRALLQTLGDLGYRASAKKAQICQKQVKYLGYLLREGQRWLTEARKETVMGQPVPKTPRQLREFLGKAGFCRLFIPGFAEMAAPLYPLTKPGTLFSWGPDQQKAYQEIKQALLTAPALGLPDLTKPFELFVDEKQGYAKGVLTQKLGPWRRPVAYLSKKLDPVAAGWPPCLRMVAAIAVLTKDAGKLTMGQPLVILAPHAVEALVKQPPDRWLSNARMTHYQAMLLDTDRVQFGPVVALNPATLLPLPEEGAPHDCLEILAETHGTRPDLTDQPIPDADHTWYTDGSSFLQEGQRKAGAAVTTETEVIWAGALPAGTSAQRAELIALTQALKMAEGKRLNVYTDSRYAFATAHIHGEIYRRRGWLTSEGREIKNKSEILALLKALFLPKRLSIIHCLGHQKGDSAEARGNRLADQAAREAAIKTPPDTSTLLIAGKRTADGSEFEKRTADGSEFESPKKKAKVE

SEQ ID NO: 2057 - protein, 2091 aa, synthetic construct
  source 1..2091: note = Description of Artificial Sequence: Synthetic polypeptide
MPAAKRVKLDGGDKKYSIGLDIGTNSVGWAVITDEYKVPSKKFKVLGNTDRHSIKKNLIGALLFDSGETAEATRLKRTARRRYTRRKNRICYLQEIFSNEMAKVDDSFFHRLEESFLVEEDKKHERHPIFGNIVDEVAYHEKYPTIYHLRKKLVDSTDKADLRLIYLALAHMIKFRGHFLIEGDLNPDNSDVDKLFIQLVQTYNQLFEENPINASGVDAKAILSARLSKSRRLENLIAQLPGEKKNGLFGNLIALSLGLTPNFKSNFDLAEDAKLQLSKDTYDDDLDNLLAQIGDQYADLFLAAKNLSDAILLSDILRVNTEITKAPLSASMIKRYDEHHQDLTLLKALVRQQLPEKYKEIFFDQSKNGYAGYIDGGASQEEFYKFIKPILEKMDGTEELLVKLNREDLLRKQRTFDNGSIPHQIHLGELHAILRRQEDFYPFLKDNREKIEKILTFRIPYYVGPLARGNSRFAWMTRKSEETITPWNFEEVVDKGASAQSFIERMTNFDKNLPNEKVLPKHSLLYEYFTVYNELTKVKYVTEGMRKPAFLSGEQKKAIVDLLFKTNRKVTVKQLKEDYFKKIECFDSVEISGVEDRFNASLGTYHDLLKIIKDKDFLDNEENEDILEDIVLTLTLFEDREMIEERLKTYAHLFDDKVMKQLKRRRYTGWGRLSRKLINGIRDKQSGKTILDFLKSDGFANRNFMQLIHDDSLTFKEDIQKAQVSGQGDSLHEHIANLAGSPAIKKGILQTVKVVDELVKVMGRHKPENIVIEMARENQTTQKGQKNSRERMKRIEEGIKELGSQILKEHPVENTQLQNEKLYLYYLQNGRDMYVDQELDINRLSDYDVDHIVPQSFLKDDSIDNKVLTRSDKARGKSDNVPSEEVVKKMKNYWRQLLNAKLITQRKFDNLTKAERGGLSELDKAGFIKRQLVETRQITKHVAQILDSRMNTKYDENDKLIREVKVITLKSKLVSDFRKDFQFYKVREINNYHHAHDAYLNAVVGTALIKKYPKLESEFVYGDYKVYDVRKMIAKSEQEIGKATAKYFFYSNIMNFFKTEITLANGEIRKRPLIETNGETGEIVWDKGRDFATVRKVLSMPQVNIVKKTEVQTGGFSKESILPKRNSDKLIARKKDWDPKKYGGFDSPTVAYSVLVVAKVEKGKSKKLKSVKELLGITIMERSSFEKNPIDFLEAKGYKEVKKDLIIKLPKYSLFELENGRKRMLASAGELQKGNELALPSKYVNFLYLASHYEKLKGSPEDNEQKQLFVEQHKHYLDEIIEQISEFSKRVILADANLDKVLSAYNKHRDKPIREQAENIIHLFTLTNLGAPAAFKYFDTTIDRKRYTSTKEVLDATLIHQSITGLYETRIDLSQLGGDGGPAPGSSGGLGIEDEYRLHETSTEPDVSLGSTWLSDFPQAWAETGGMGLAVRQAPLIIPLKATSTPVSIQQYPMSHEARLGIKPHIQRLLDQGILVPCQSPWNTPLLPVKKPGTNDYRPVQDLREVNKRVEDIHPTVPNPYNLLSGLPPSHQWYTVLDLKDAFFCLRLHPTSQPLFAFEWRDPGMGISGQLTWTRLPQGFKNSPTLFNEALHRDLADFRIQHPDLILLQYVDDILLAATSELDCQQGTRALLQTLGDLGYRASAKKAQICQKQVKYLGYLLREGQRWLTEARKETVMGQPVPKTPRQLREFLGKAGFCRLFIPGFAEMAAPLYPLTKPGTLFSWGPDQQKAYQEIKQALLTAPALGLPDLTKPFELFVDEKQGYAKGVLTQKLGPWRRPVAYLSKKLDPVAAGWPPCLRMVAAIAVLTKDAGKLTMGQPLVILAPHAVEALVKQPPDRWLSNARMTHYQAMLLDTDRVQFGPVVALNPATLLPLPEEGAPHDCLEILAETHGTRPDLTDQPIPDADHTWYTDGSSFLQEGQRKAGAAVTTETEVIWAGALPAGTSAQRAELIALTQALKMAEGKRLNVYTDSRYAFATAHIHGEIYRRRGWLTSEGREIKNKSEILALLKALFLPKRLSIIHCLGHQKGDSAEARGNRLADQAAREAAIKTPPDTSTLLIAGKRTADGSEFEKRTADGSEFESPKKKAKVE

SEQ ID NO: 2058 - protein, 2094 aa, synthetic construct
  source 1..2094: note = Description of Artificial Sequence: Synthetic polypeptide
MPAAKRVKLDGGDKKYSIGLDIGTNSVGWAVITDEYKVPSKKFKVLGNTDRHSIKKNLIGALLFDSGETAEATRLKRTARRRYTRRKNRICYLQEIFSNEMAKVDDSFFHRLEESFLVEEDKKHERHPIFGNIVDEVAYHEKYPTIYHLRKKLVDSTDKADLRLIYLALAHMIKFRGHFLIEGDLNPDNSDVDKLFIQLVQTYNQLFEENPINASGVDAKAILSARLSKSRRLENLIAQLPGEKKNGLFGNLIALSLGLTPNFKSNFDLAEDAKLQLSKDTYDDDLDNLLAQIGDQYADLFLAAKNLSDAILLSDILRVNTEITKAPLSASMIKRYDEHHQDLTLLKALVRQQLPEKYKEIFFDQSKNGYAGYIDGGASQEEFYKFIKPILEKMDGTEELLVKLNREDLLRKQRTFDNGSIPHQIHLGELHAILRRQEDFYPFLKDNREKIEKILTFRIPYYVGPLARGNSRFAWMTRKSEETITPWNFEEVVDKGASAQSFIERMTNFDKNLPNEKVLPKHSLLYEYFTVYNELTKVKYVTEGMRKPAFLSGEQKKAIVDLLFKTNRKVTVKQLKEDYFKKIECFDSVEISGVEDRFNASLGTYHDLLKIIKDKDFLDNEENEDILEDIVLTLTLFEDREMIEERLKTYAHLFDDKVMKQLKRRRYTGWGRLSRKLINGIRDKQSGKTILDFLKSDGFANRNFMQLIHDDSLTFKEDIQKAQVSGQGDSLHEHIANLAGSPAIKKGILQTVKVVDELVKVMGRHKPENIVIEMARENQTTQKGQKNSRERMKRIEEGIKELGSQILKEHPVENTQLQNEKLYLYYLQNGRDMYVDQELDINRLSDYDVDHIVPQSFLKDDSIDNKVLTRSDKARGKSDNVPSEEVVKKMKNYWRQLLNAKLITQRKFDNLTKAERGGLSELDKAGFIKRQLVETRQITKHVAQILDSRMNTKYDENDKLIREVKVITLKSKLVSDFRKDFQFYKVREINNYHHAHDAYLNAVVGTALIKKYPKLESEFVYGDYKVYDVRKMIAKSEQEIGKATAKYFFYSNIMNFFKTEITLANGEIRKRPLIETNGETGEIVWDKGRDFATVRKVLSMPQVNIVKKTEVQTGGFSKESILPKRNSDKLIARKKDWDPKKYGGFDSPTVAYSVLVVAKVEKGKSKKLKSVKELLGITIMERSSFEKNPIDFLEAKGYKEVKKDLIIKLPKYSLFELENGRKRMLASAGELQKGNELALPSKYVNFLYLASHYEKLKGSPEDNEQKQLFVEQHKHYLDEIIEQISEFSKRVILADANLDKVLSAYNKHRDKPIREQAENIIHLFTLTNLGAPAAFKYFDTTIDRKRYTSTKEVLDATLIHQSITGLYETRIDLSQLGGDGGGGSPAPGGGGGLGIEDEYRLHETSTEPDVSLGSTWLSDFPQAWAETGGMGLAVRQAPLIIPLKATSTPVSIQQYPMSHEARLGIKPHIQRLLDQGILVPCQSPWNTPLLPVKKPGTNDYRPVQDLREVNKRVEDIHPTVPNPYNLLSGLPPSHQWYTVLDLKDAFFCLRLHPTSQPLFAFEWRDPGMGISGQLTWTRLPQGFKNSPTLFNEALHRDLADFRIQHPDLILLQYVDDILLAATSELDCQQGTRALLQTLGDLGYRASAKKAQICQKQVKYLGYLLREGQRWLTEARKETVMGQPVPKTPRQLREFLGKAGFCRLFIPGFAEMAAPLYPLTKPGTLFSWGPDQQKAYQEIKQALLTAPALGLPDLTKPFELFVDEKQGYAKGVLTQKLGPWRRPVAYLSKKLDPVAAGWPPCLRMVAAIAVLTKDAGKLTMGQPLVILAPHAVEALVKQPPDRWLSNARMTHYQAMLLDTDRVQFGPVVALNPATLLPLPEEGAPHDCLEILAETHGTRPDLTDQPIPDADHTWYTDGSSFLQEGQRKAGAAVTTETEVIWAGALPAGTSAQRAELIALTQALKMAEGKRLNVYTDSRYAFATAHIHGEIYRRRGWLTSEGREIKNKSEILALLKALFLPKRLSIIHCLGHQKGDSAEARGNRLADQAAREAAIKTPPDTSTLLIAGKRTADGSEFEKRTADGSEFESPKKKAKVE

SEQ ID NO: 2059 - protein, 2096 aa, synthetic construct
  source 1..2096: note = Description of Artificial Sequence: Synthetic polypeptide
MPAAKRVKLDGGDKKYSIGLDIGTNSVGWAVITDEYKVPSKKFKVLGNTDRHSIKKNLIGALLFDSGETAEATRLKRTARRRYTRRKNRICYLQEIFSNEMAKVDDSFFHRLEESFLVEEDKKHERHPIFGNIVDEVAYHEKYPTIYHLRKKLVDSTDKADLRLIYLALAHMIKFRGHFLIEGDLNPDNSDVDKLFIQLVQTYNQLFEENPINASGVDAKAILSARLSKSRRLENLIAQLPGEKKNGLFGNLIALSLGLTPNFKSNFDLAEDAKLQLSKDTYDDDLDNLLAQIGDQYADLFLAAKNLSDAILLSDILRVNTEITKAPLSASMIKRYDEHHQDLTLLKALVRQQLPEKYKEIFFDQSKNGYAGYIDGGASQEEFYKFIKPILEKMDGTEELLVKLNREDLLRKQRTFDNGSIPHQIHLGELHAILRRQEDFYPFLKDNREKIEKILTFRIPYYVGPLARGNSRFAWMTRKSEETITPWNFEEVVDKGASAQSFIERMTNFDKNLPNEKVLPKHSLLYEYFTVYNELTKVKYVTEGMRKPAFLSGEQKKAIVDLLFKTNRKVTVKQLKEDYFKKIECFDSVEISGVEDRFNASLGTYHDLLKIIKDKDFLDNEENEDILEDIVLTLTLFEDREMIEERLKTYAHLFDDKVMKQLKRRRYTGWGRLSRKLINGIRDKQSGKTILDFLKSDGFANRNFMQLIHDDSLTFKEDIQKAQVSGQGDSLHEHIANLAGSPAIKKGILQTVKVVDELVKVMGRHKPENIVIEMARENQTTQKGQKNSRERMKRIEEGIKELGSQILKEHPVENTQLQNEKLYLYYLQNGRDMYVDQELDINRLSDYDVDHIVPQSFLKDDSIDNKVLTRSDKARGKSDNVPSEEVVKKMKNYWRQLLNAKLITQRKFDNLTKAERGGLSELDKAGFIKRQLVETRQITKHVAQILDSRMNTKYDENDKLIREVKVITLKSKLVSDFRKDFQFYKVREINNYHHAHDAYLNAVVGTALIKKYPKLESEFVYGDYKVYDVRKMIAKSEQEIGKATAKYFFYSNIMNFFKTEITLANGEIRKRPLIETNGETGEIVWDKGRDFATVRKVLSMPQVNIVKKTEVQTGGFSKESILPKRNSDKLIARKKDWDPKKYGGFDSPTVAYSVLVVAKVEKGKSKKLKSVKELLGITIMERSSFEKNPIDFLEAKGYKEVKKDLIIKLPKYSLFELENGRKRMLASAGELQKGNELALPSKYVNFLYLASHYEKLKGSPEDNEQKQLFVEQHKHYLDEIIEQISEFSKRVILADANLDKVLSAYNKHRDKPIREQAENIIHLFTLTNLGAPAAFKYFDTTIDRKRYTSTKEVLDATLIHQSITGLYETRIDLSQLGGDGGGGGGGSEAAAKGGLGIEDEYRLHETSTEPDVSLGSTWLSDFPQAWAETGGMGLAVRQAPLIIPLKATSTPVSIQQYPMSHEARLGIKPHIQRLLDQGILVPCQSPWNTPLLPVKKPGTNDYRPVQDLREVNKRVEDIHPTVPNPYNLLSGLPPSHQWYTVLDLKDAFFCLRLHPTSQPLFAFEWRDPGMGISGQLTWTRLPQGFKNSPTLFNEALHRDLADFRIQHPDLILLQYVDDILLAATSELDCQQGTRALLQTLGDLGYRASAKKAQICQKQVKYLGYLLREGQRWLTEARKETVMGQPVPKTPRQLREFLGKAGFCRLFIPGFAEMAAPLYPLTKPGTLFSWGPDQQKAYQEIKQALLTAPALGLPDLTKPFELFVDEKQGYAKGVLTQKLGPWRRPVAYLSKKLDPVAAGWPPCLRMVAAIAVLTKDAGKLTMGQPLVILAPHAVEALVKQPPDRWLSNARMTHYQAMLLDTDRVQFGPVVALNPATLLPLPEEGAPHDCLEILAETHGTRPDLTDQPIPDADHTWYTDGSSFLQEGQRKAGAAVTTETEVIWAGALPAGTSAQRAELIALTQALKMAEGKRLNVYTDSRYAFATAHIHGEIYRRRGWLTSEGREIKNKSEILALLKALFLPKRLSIIHCLGHQKGDSAEARGNRLADQAAREAAIKTPPDTSTLLIAGKRTADGSEFEKRTADGSEFESPKKKAKVE

SEQ ID NO: 2060 - protein, 2094 aa, synthetic construct
  source 1..2094: note = Description of Artificial Sequence: Synthetic polypeptide
MPAAKRVKLDGGDKKYSIGLDIGTNSVGWAVITDEYKVPSKKFKVLGNTDRHSIKKNLIGALLFDSGETAEATRLKRTARRRYTRRKNRICYLQEIFSNEMAKVDDSFFHRLEESFLVEEDKKHERHPIFGNIVDEVAYHEKYPTIYHLRKKLVDSTDKADLRLIYLALAHMIKFRGHFLIEGDLNPDNSDVDKLFIQLVQTYNQLFEENPINASGVDAKAILSARLSKSRRLENLIAQLPGEKKNGLFGNLIALSLGLTPNFKSNFDLAEDAKLQLSKDTYDDDLDNLLAQIGDQYADLFLAAKNLSDAILLSDILRVNTEITKAPLSASMIKRYDEHHQDLTLLKALVRQQLPEKYKEIFFDQSKNGYAGYIDGGASQEEFYKFIKPILEKMDGTEELLVKLNREDLLRKQRTFDNGSIPHQIHLGELHAILRRQEDFYPFLKDNREKIEKILTFRIPYYVGPLARGNSRFAWMTRKSEETITPWNFEEVVDKGASAQSFIERMTNFDKNLPNEKVLPKHSLLYEYFTVYNELTKVKYVTEGMRKPAFLSGEQKKAIVDLLFKTNRKVTVKQLKEDYFKKIECFDSVEISGVEDRFNASLGTYHDLLKIIKDKDFLDNEENEDILEDIVLTLTLFEDREMIEERLKTYAHLFDDKVMKQLKRRRYTGWGRLSRKLINGIRDKQSGKTILDFLKSDGFANRNFMQLIHDDSLTFKEDIQKAQVSGQGDSLHEHIANLAGSPAIKKGILQTVKVVDELVKVMGRHKPENIVIEMARENQTTQKGQKNSRERMKRIEEGIKELGSQILKEHPVENTQLQNEKLYLYYLQNGRDMYVDQELDINRLSDYDVDHIVPQSFLKDDSIDNKVLTRSDKARGKSDNVPSEEVVKKMKNYWRQLLNAKLITQRKFDNLTKAERGGLSELDKAGFIKRQLVETRQITKHVAQILDSRMNTKYDENDKLIREVKVITLKSKLVSDFRKDFQFYKVREINNYHHAHDAYLNAVVGTALIKKYPKLESEFVYGDYKVYDVRKMIAKSEQEIGKATAKYFFYSNIMNFFKTEITLANGEIRKRPLIETNGETGEIVWDKGRDFATVRKVLSMPQVNIVKKTEVQTGGFSKESILPKRNSDKLIARKKDWDPKKYGGFDSPTVAYSVLVVAKVEKGKSKKLKSVKELLGITIMERSSFEKNPIDFLEAKGYKEVKKDLIIKLPKYSLFELENGRKRMLASAGELQKGNELALPSKYVNFLYLASHYEKLKGSPEDNEQKQLFVEQHKHYLDEIIEQISEFSKRVILADANLDKVLSAYNKHRDKPIREQAENIIHLFTLTNLGAPAAFKYFDTTIDRKRYTSTKEVLDATLIHQSITGLYETRIDLSQLGGDGGGSSPAPGGGGGLGIEDEYRLHETSTEPDVSLGSTWLSDFPQAWAETGGMGLAVRQAPLIIPLKATSTPVSIQQYPMSHEARLGIKPHIQRLLDQGILVPCQSPWNTPLLPVKKPGTNDYRPVQDLREVNKRVEDIHPTVPNPYNLLSGLPPSHQWYTVLDLKDAFFCLRLHPTSQPLFAFEWRDPGMGISGQLTWTRLPQGFKNSPTLFNEALHRDLADFRIQHPDLILLQYVDDILLAATSELDCQQGTRALLQTLGDLGYRASAKKAQICQKQVKYLGYLLREGQRWLTEARKETVMGQPVPKTPRQLREFLGKAGFCRLFIPGFAEMAAPLYPLTKPGTLFSWGPDQQKAYQEIKQALLTAPALGLPDLTKPFELFVDEKQGYAKGVLTQKLGPWRRPVAYLSKKLDPVAAGWPPCLRMVAAIAVLTKDAGKLTMGQPLVILAPHAVEALVKQPPDRWLSNARMTHYQAMLLDTDRVQFGPVVALNPATLLPLPEEGAPHDCLEILAETHGTRPDLTDQPIPDADHTWYTDGSSFLQEGQRKAGAAVTTETEVIWAGALPAGTSAQRAELIALTQALKMAEGKRLNVYTDSRYAFATAHIHGEIYRRRGWLTSEGREIKNKSEILALLKALFLPKRLSIIHCLGHQKGDSAEARGNRLADQAAREAAIKTPPDTSTLLIAGKRTADGSEFEKRTADGSEFESPKKKAKVE

SEQ ID NO: 2061 - protein, 2094 aa, synthetic construct
  source 1..2094: note = Description of Artificial Sequence: Synthetic polypeptide
MPAAKRVKLDGGDKKYSIGLDIGTNSVGWAVITDEYKVPSKKFKVLGNTDRHSIKKNLIGALLFDSGETAEATRLKRTARRRYTRRKNRICYLQEIFSNEMAKVDDSFFHRLEESFLVEEDKKHERHPIFGNIVDEVAYHEKYPTIYHLRKKLVDSTDKADLRLIYLALAHMIKFRGHFLIEGDLNPDNSDVDKLFIQLVQTYNQLFEENPINASGVDAKAILSARLSKSRRLENLIAQLPGEKKNGLFGNLIALSLGLTPNFKSNFDLAEDAKLQLSKDTYDDDLDNLLAQIGDQYADLFLAAKNLSDAILLSDILRVNTEITKAPLSASMIKRYDEHHQDLTLLKALVRQQLPEKYKEIFFDQSKNGYAGYIDGGASQEEFYKFIKPILEKMDGTEELLVKLNREDLLRKQRTFDNGSIPHQIHLGELHAILRRQEDFYPFLKDNREKIEKILTFRIPYYVGPLARGNSRFAWMTRKSEETITPWNFEEVVDKGASAQSFIERMTNFDKNLPNEKVLPKHSLLYEYFTVYNELTKVKYVTEGMRKPAFLSGEQKKAIVDLLFKTNRKVTVKQLKEDYFKKIECFDSVEISGVEDRFNASLGTYHDLLKIIKDKDFLDNEENEDILEDIVLTLTLFEDREMIEERLKTYAHLFDDKVMKQLKRRRYTGWGRLSRKLINGIRDKQSGKTILDFLKSDGFANRNFMQLIHDDSLTFKEDIQKAQVSGQGDSLHEHIANLAGSPAIKKGILQTVKVVDELVKVMGRHKPENIVIEMARENQTTQKGQKNSRERMKRIEEGIKELGSQILKEHPVENTQLQNEKLYLYYLQNGRDMYVDQELDINRLSDYDVDHIVPQSFLKDDSIDNKVLTRSDKARGKSDNVPSEEVVKKMKNYWRQLLNAKLITQRKFDNLTKAERGGLSELDKAGFIKRQLVETRQITKHVAQILDSRMNTKYDENDKLIREVKVITLKSKLVSDFRKDFQFYKVREINNYHHAHDAYLNAVVGTALIKKYPKLESEFVYGDYKVYDVRKMIAKSEQEIGKATAKYFFYSNIMNFFKTEITLANGEIRKRPLIETNGETGEIVWDKGRDFATVRKVLSMPQVNIVKKTEVQTGGFSKESILPKRNSDKLIARKKDWDPKKYGGFDSPTVAYSVLVVAKVEKGKSKKLKSVKELLGITIMERSSFEKNPIDFLEAKGYKEVKKDLIIKLPKYSLFELENGRKRMLASAGELQKGNELALPSKYVNFLYLASHYEKLKGSPEDNEQKQLFVEQHKHYLDEIIEQISEFSKRVILADANLDKVLSAYNKHRDKPIREQAENIIHLFTLTNLGAPAAFKYFDTTIDRKRYTSTKEVLDATLIHQSITGLYETRIDLSQLGGDGGGGSGGGPAPGGLGIEDEYRLHETSTEPDVSLGSTWLSDFPQAWAETGGMGLAVRQAPLIIPLKATSTPVSIQQYPMSHEARLGIKPHIQRLLDQGILVPCQSPWNTPLLPVKKPGTNDYRPVQDLREVNKRVEDIHPTVPNPYNLLSGLPPSHQWYTVLDLKDAFFCLRLHPTSQPLFAFEWRDPGMGISGQLTWTRLPQGFKNSPTLFNEALHRDLADFRIQHPDLILLQYVDDILLAATSELDCQQGTRALLQTLGDLGYRASAKKAQICQKQVKYLGYLLREGQRWLTEARKETVMGQPVPKTPRQLREFLGKAGFCRLFIPGFAEMAAPLYPLTKPGTLFSWGPDQQKAYQEIKQALLTAPALGLPDLTKPFELFVDEKQGYAKGVLTQKLGPWRRPVAYLSKKLDPVAAGWPPCLRMVAAIAVLTKDAGKLTMGQPLVILAPHAVEALVKQPPDRWLSNARMTHYQAMLLDTDRVQFGPVVALNPATLLPLPEEGAPHDCLEILAETHGTRPDLTDQPIPDADHTWYTDGSSFLQEGQRKAGAAVTTETEVIWAGALPAGTSAQRAELIALTQALKMAEGKRLNVYTDSRYAFATAHIHGEIYRRRGWLTSEGREIKNKSEILALLKALFLPKRLSIIHCLGHQKGDSAEARGNRLADQAAREAAIKTPPDTSTLLIAGKRTADGSEFEKRTADGSEFESPKKKAKVE

SEQ ID NO: 2062 - protein, 2096 aa, synthetic construct
  source 1..2096: note = Description of Artificial Sequence: Synthetic polypeptide
MPAAKRVKLDGGDKKYSIGLDIGTNSVGWAVITDEYKVPSKKFKVLGNTDRHSIKKNLIGALLFDSGETAEATRLKRTARRRYTRRKNRICYLQEIFSNEMAKVDDSFFHRLEESFLVEEDKKHERHPIFGNIVDEVAYHEKYPTIYHLRKKLVDSTDKADLRLIYLALAHMIKFRGHFLIEGDLNPDNSDVDKLFIQLVQTYNQLFEENPINASGVDAKAILSARLSKSRRLENLIAQLPGEKKNGLFGNLIALSLGLTPNFKSNFDLAEDAKLQLSKDTYDDDLDNLLAQIGDQYADLFLAAKNLSDAILLSDILRVNTEITKAPLSASMIKRYDEHHQDLTLLKALVRQQLPEKYKEIFFDQSKNGYAGYIDGGASQEEFYKFIKPILEKMDGTEELLVKLNREDLLRKQRTFDNGSIPHQIHLGELHAILRRQEDFYPFLKDNREKIEKILTFRIPYYVGPLARGNSRFAWMTRKSEETITPWNFEEVVDKGASAQSFIERMTNFDKNLPNEKVLPKHSLLYEYFTVYNELTKVKYVTEGMRKPAFLSGEQKKAIVDLLFKTNRKVTVKQLKEDYFKKIECFDSVEISGVEDRFNASLGTYHDLLKIIKDKDFLDNEENEDILEDIVLTLTLFEDREMIEERLKTYAHLFDDKVMKQLKRRRYTGWGRLSRKLINGIRDKQSGKTILDFLKSDGFANRNFMQLIHDDSLTFKEDIQKAQVSGQGDSLHEHIANLAGSPAIKKGILQTVKVVDELVKVMGRHKPENIVIEMARENQTTQKGQKNSRERMKRIEEGIKELGSQILKEHPVENTQLQNEKLYLYYLQNGRDMYVDQELDINRLSDYDVDHIVPQSFLKDDSIDNKVLTRSDKARGKSDNVPSEEVVKKMKNYWRQLLNAKLITQRKFDNLTKAERGGLSELDKAGFIKRQLVETRQITKHVAQILDSRMNTKYDENDKLIREVKVITLKSKLVSDFRKDFQFYKVREINNYHHAHDAYLNAVVGTALIKKYPKLESEFVYGDYKVYDVRKMIAKSEQEIGKATAKYFFYSNIMNFFKTEITLANGEIRKRPLIETNGETGEIVWDKGRDFATVRKVLSMPQVNIVKKTEVQTGGFSKESILPKRNSDKLIARKKDWDPKKYGGFDSPTVAYSVLVVAKVEKGKSKKLKSVKELLGITIMERSSFEKNPIDFLEAKGYKEVKKDLIIKLPKYSLFELENGRKRMLASAGELQKGNELALPSKYVNFLYLASHYEKLKGSPEDNEQKQLFVEQHKHYLDEIIEQISEFSKRVILADANLDKVLSAYNKHRDKPIREQAENIIHLFTLTNLGAPAAFKYFDTTIDRKRYTSTKEVLDATLIHQSITGLYETRIDLSQLGGDGGGSSPAPEAAAKGGTLGIEDEYRLHETSTEPDVSLGSTWLSDFPQAWAETGGMGLAVRQAPLIIPLKATSTPVSIQQYPMSHEARLGIKPHIQRLLDQGILVPCQSPWNTPLLPVKKPGTNDYRPVQDLREVNKRVEDIHPTVPNPYNLLSGLPPSHQWYTVLDLKDAFFCLRLHPTSQPLFAFEWRDPGMGISGQLTWTRLPQGFKNSPTLFDEALHRDLADFRIQHPDLILLQYVDDILLAATSELDCQQGTRALLQTLGDLGYRASAKKAQICQKQVKYLGYLLREGQRWLTEARKETVMGQPVPKTPRQLREFLGTAGFCRLWIPGFAEMAAPLYPLTKTGTLFSWGPDQQKAYQEIKQALLTAPALGLPDLTKPFELFVDEKQGYAKGVLTQKLGPWRRPVAYLSKKLDPVAAGWPPCLRMVAAIAVLTKDAGKLTMGQPLVILAPHAVEALVKQPPDRWLSNARMTHYQAMLLDTDRVQFGPVVALNPATLLPLPEEGAPHDCLEILAETHGTRPDLTDQPIPDADHTWYTDGSSFLQEGQRKAGAAVTTETEVIWAGALPAGTSAQRAELIALTQALKMAEGKRLNVYTDSRYAFATAHIHGEIYRRRGLLTSEGREIKNKSEILALLKALFLPKRLSIIHCLGHQKGDSAEARGNRLADQAAREAAIKTPPDTSTLLAGKRTADGSEFEKRTADGSEFESPKKKAKVE

SEQ ID NO: 2063 - protein, 2105 aa, synthetic construct
  source 1..2105: note = Description of Artificial Sequence: Synthetic polypeptide
MPAAKRVKLDGGDKKYSIGLDIGTNSVGWAVITDEYKVPSKKFKVLGNTDRHSIKKNLIGALLFDSGETAEATRLKRTARRRYTRRKNRICYLQEIFSNEMAKVDDSFFHRLEESFLVEEDKKHERHPIFGNIVDEVAYHEKYPTIYHLRKKLVDSTDKADLRLIYLALAHMIKFRGHFLIEGDLNPDNSDVDKLFIQLVQTYNQLFEENPINASGVDAKAILSARLSKSRRLENLIAQLPGEKKNGLFGNLIALSLGLTPNFKSNFDLAEDAKLQLSKDTYDDDLDNLLAQIGDQYADLFLAAKNLSDAILLSDILRVNTEITKAPLSASMIKRYDEHHQDLTLLKALVRQQLPEKYKEIFFDQSKNGYAGYIDGGASQEEFYKFIKPILEKMDGTEELLVKLNREDLLRKQRTFDNGSIPHQIHLGELHAILRRQEDFYPFLKDNREKIEKILTFRIPYYVGPLARGNSRFAWMTRKSEETITPWNFEEVVDKGASAQSFIERMTNFDKNLPNEKVLPKHSLLYEYFTVYNELTKVKYVTEGMRKPAFLSGEQKKAIVDLLFKTNRKVTVKQLKEDYFKKIECFDSVEISGVEDRFNASLGTYHDLLKIIKDKDFLDNEENEDILEDIVLTLTLFEDREMIEERLKTYAHLFDDKVMKQLKRRRYTGWGRLSRKLINGIRDKQSGKTILDFLKSDGFANRNFMQLIHDDSLTFKEDIQKAQVSGQGDSLHEHIANLAGSPAIKKGILQTVKVVDELVKVMGRHKPENIVIEMARENQTTQKGQKNSRERMKRIEEGIKELGSQILKEHPVENTQLQNEKLYLYYLQNGRDMYVDQELDINRLSDYDVDHIVPQSFLKDDSIDNKVLTRSDKARGKSDNVPSEEVVKKMKNYWRQLLNAKLITQRKFDNLTKAERGGLSELDKAGFIKRQLVETRQITKHVAQILDSRMNTKYDENDKLIREVKVITLKSKLVSDFRKDFQFYKVREINNYHHAHDAYLNAVVGTALIKKYPKLESEFVYGDYKVYDVRKMIAKSEQEIGKATAKYFFYSNIMNFFKTEITLANGEIRKRPLIETNGETGEIVWDKGRDFATVRKVLSMPQVNIVKKTEVQTGGFSKESILPKRNSDKLIARKKDWDPKKYGGFDSPTVAYSVLVVAKVEKGKSKKLKSVKELLGITIMERSSFEKNPIDFLEAKGYKEVKKDLIIKLPKYSLFELENGRKRMLASAGELQKGNELALPSKYVNFLYLASHYEKLKGSPEDNEQKQLFVEQHKHYLDEIIEQISEFSKRVILADANLDKVLSAYNKHRDKPIREQAENIIHLFTLTNLGAPAAFKYFDTTIDRKRYTSTKEVLDATLIHQSITGLYETRIDLSQLGGDGGGGGGSGGGGSGGGGSGGGGSGGTLGIEDEYRLHETSTEPDVSLGSTWLSDFPQAWAETGGMGLAVRQAPLIIPLKATSTPVSIQQYPMSHEARLGIKPHIQRLLDQGILVPCQSPWNTPLLPVKKPGTNDYRPVQDLREVNKRVEDIHPTVPNPYNLLSGLPPSHQWYTVLDLKDAFFCLRLHPTSQPLFAFEWRDPGMGISGQLTWTRLPQGFKNSPTLFDEALHRDLADFRIQHPDLILLQYVDDILLAATSELDCQQGTRALLQTLGDLGYRASAKKAQICQKQVKYLGYLLREGQRWLTEARKETVMGQPVPKTPRQLREFLGTAGFCRLWIPGFAEMAAPLYPLTKTGTLFSWGPDQQKAYQEIKQALLTAPALGLPDLTKPFELFVDEKQGYAKGVLTQKLGPWRRPVAYLSKKLDPVAAGWPPCLRMVAAIAVLTKDAGKLTMGQPLVILAPHAVEALVKQPPDRWLSNARMTHYQAMLLDTDRVQFGPVVALNPATLLPLPEEGAPHDCLEILAETHGTRPDLTDQPIPDADHTWYTDGSSFLQEGQRKAGAAVTTETEVIWAGALPAGTSAQRAELIALTQALKMAEGKRLNVYTDSRYAFATAHIHGEIYRRRGLLTSEGREIKNKSEILALLKALFLPKRLSIIHCLGHQKGDSAEARGNRLADQAAREAAIKTPPDTSTLLAGKRTADGSEFEKRTADGSEFESPKKKAKVE

SEQ ID NO: 2064 - protein, 2095 aa, synthetic construct
  source 1..2095: note = Description of Artificial Sequence: Synthetic polypeptide
MPAAKRVKLDGGDKKYSIGLDIGTNSVGWAVITDEYKVPSKKFKVLGNTDRHSIKKNLIGALLFDSGETAEATRLKRTARRRYTRRKNRICYLQEIFSNEMAKVDDSFFHRLEESFLVEEDKKHERHPIFGNIVDEVAYHEKYPTIYHLRKKLVDSTDKADLRLIYLALAHMIKFRGHFLIEGDLNPDNSDVDKLFIQLVQTYNQLFEENPINASGVDAKAILSARLSKSRRLENLIAQLPGEKKNGLFGNLIALSLGLTPNFKSNFDLAEDAKLQLSKDTYDDDLDNLLAQIGDQYADLFLAAKNLSDAILLSDILRVNTEITKAPLSASMIKRYDEHHQDLTLLKALVRQQLPEKYKEIFFDQSKNGYAGYIDGGASQEEFYKFIKPILEKMDGTEELLVKLNREDLLRKQRTFDNGSIPHQIHLGELHAILRRQEDFYPFLKDNREKIEKILTFRIPYYVGPLARGNSRFAWMTRKSEETITPWNFEEVVDKGASAQSFIERMTNFDKNLPNEKVLPKHSLLYEYFTVYNELTKVKYVTEGMRKPAFLSGEQKKAIVDLLFKTNRKVTVKQLKEDYFKKIECFDSVEISGVEDRFNASLGTYHDLLKIIKDKDFLDNEENEDILEDIVLTLTLFEDREMIEERLKTYAHLFDDKVMKQLKRRRYTGWGRLSRKLINGIRDKQSGKTILDFLKSDGFANRNFMQLIHDDSLTFKEDIQKAQVSGQGDSLHEHIANLAGSPAIKKGILQTVKVVDELVKVMGRHKPENIVIEMARENQTTQKGQKNSRERMKRIEEGIKELGSQILKEHPVENTQLQNEKLYLYYLQNGRDMYVDQELDINRLSDYDVDHIVPQSFLKDDSIDNKVLTRSDKARGKSDNVPSEEVVKKMKNYWRQLLNAKLITQRKFDNLTKAERGGLSELDKAGFIKRQLVETRQITKHVAQILDSRMNTKYDENDKLIREVKVITLKSKLVSDFRKDFQFYKVREINNYHHAHDAYLNAVVGTALIKKYPKLESEFVYGDYKVYDVRKMIAKSEQEIGKATAKYFFYSNIMNFFKTEITLANGEIRKRPLIETNGETGEIVWDKGRDFATVRKVLSMPQVNIVKKTEVQTGGFSKESILPKRNSDKLIARKKDWDPKKYGGFDSPTVAYSVLVVAKVEKGKSKKLKSVKELLGITIMERSSFEKNPIDFLEAKGYKEVKKDLIIKLPKYSLFELENGRKRMLASAGELQKGNELALPSKYVNFLYLASHYEKLKGSPEDNEQKQLFVEQHKHYLDEIIEQISEFSKRVILADANLDKVLSAYNKHRDKPIREQAENIIHLFTLTNLGAPAAFKYFDTTIDRKRYTSTKEVLDATLIHQSITGLYETRIDLSQLGGDGGEAAAKEAAAKGGTLGIEDEYRLHETSTEPDVSLGSTWLSDFPQAWAETGGMGLAVRQAPLIIPLKATSTPVSIQQYPMSHEARLGIKPHIQRLLDQGILVPCQSPWNTPLLPVKKPGTNDYRPVQDLREVNKRVEDIHPTVPNPYNLLSGLPPSHQWYTVLDLKDAFFCLRLHPTSQPLFAFEWRDPGMGISGQLTWTRLPQGFKNSPTLFDEALHRDLADFRIQHPDLILLQYVDDILLAATSELDCQQGTRALLQTLGDLGYRASAKKAQICQKQVKYLGYLLREGQRWLTEARKETVMGQPVPKTPRQLREFLGTAGFCRLWIPGFAEMAAPLYPLTKTGTLFSWGPDQQKAYQEIKQALLTAPALGLPDLTKPFELFVDEKQGYAKGVLTQKLGPWRRPVAYLSKKLDPVAAGWPPCLRMVAAIAVLTKDAGKLTMGQPLVILAPHAVEALVKQPPDRWLSNARMTHYQAMLLDTDRVQFGPVVALNPATLLPLPEEGAPHDCLEILAETHGTRPDLTDQPIPDADHTWYTDGSSFLQEGQRKAGAAVTTETEVIWAGALPAGTSAQRAELIALTQALKMAEGKRLNVYTDSRYAFATAHIHGEIYRRRGLLTSEGREIKNKSEILALLKALFLPKRLSIIHCLGHQKGDSAEARGNRLADQAAREAAIKTPPDTSTLLAGKRTADGSEFEKRTADGSEFESPKKKAKVE

SEQ ID NO: 2065 - protein, 2096 aa, synthetic construct
  source 1..2096: note = Description of Artificial Sequence: Synthetic polypeptide
MPAAKRVKLDGGDKKYSIGLDIGTNSVGWAVITDEYKVPSKKFKVLGNTDRHSIKKNLIGALLFDSGETAEATRLKRTARRRYTRRKNRICYLQEIFSNEMAKVDDSFFHRLEESFLVEEDKKHERHPIFGNIVDEVAYHEKYPTIYHLRKKLVDSTDKADLRLIYLALAHMIKFRGHFLIEGDLNPDNSDVDKLFIQLVQTYNQLFEENPINASGVDAKAILSARLSKSRRLENLIAQLPGEKKNGLFGNLIALSLGLTPNFKSNFDLAEDAKLQLSKDTYDDDLDNLLAQIGDQYADLFLAAKNLSDAILLSDILRVNTEITKAPLSASMIKRYDEHHQDLTLLKALVRQQLPEKYKEIFFDQSKNGYAGYIDGGASQEEFYKFIKPILEKMDGTEELLVKLNREDLLRKQRTFDNGSIPHQIHLGELHAILRRQEDFYPFLKDNREKIEKILTFRIPYYVGPLARGNSRFAWMTRKSEETITPWNFEEVVDKGASAQSFIERMTNFDKNLPNEKVLPKHSLLYEYFTVYNELTKVKYVTEGMRKPAFLSGEQKKAIVDLLFKTNRKVTVKQLKEDYFKKIECFDSVEISGVEDRFNASLGTYHDLLKIIKDKDFLDNEENEDILEDIVLTLTLFEDREMIEERLKTYAHLFDDKVMKQLKRRRYTGWGRLSRKLINGIRDKQSGKTILDFLKSDGFANRNFMQLIHDDSLTFKEDIQKAQVSGQGDSLHEHIANLAGSPAIKKGILQTVKVVDELVKVMGRHKPENIVIEMARENQTTQKGQKNSRERMKRIEEGIKELGSQILKEHPVENTQLQNEKLYLYYLQNGRDMYVDQELDINRLSDYDVDHIVPQSFLKDDSIDNKVLTRSDKARGKSDNVPSEEVVKKMKNYWRQLLNAKLITQRKFDNLTKAERGGLSELDKAGFIKRQLVETRQITKHVAQILDSRMNTKYDENDKLIREVKVITLKSKLVSDFRKDFQFYKVREINNYHHAHDAYLNAVVGTALIKKYPKLESEFVYGDYKVYDVRKMIAKSEQEIGKATAKYFFYSNIMNFFKTEITLANGEIRKRPLIETNGETGEIVWDKGRDFATVRKVLSMPQVNIVKKTEVQTGGFSKESILPKRNSDKLIARKKDWDPKKYGGFDSPTVAYSVLVVAKVEKGKSKKLKSVKELLGITIMERSSFEKNPIDFLEAKGYKEVKKDLIIKLPKYSLFELENGRKRMLASAGELQKGNELALPSKYVNFLYLASHYEKLKGSPEDNEQKQLFVEQHKHYLDEIIEQISEFSKRVILADANLDKVLSAYNKHRDKPIREQAENIIHLFTLTNLGAPAAFKYFDTTIDRKRYTSTKEVLDATLIHQSITGLYETRIDLSQLGGDGGPAPGSSEAAAKGGTLGIEDEYRLHETSTEPDVSLGSTWLSDFPQAWAETGGMGLAVRQAPLIIPLKATSTPVSIQQYPMSHEARLGIKPHIQRLLDQGILVPCQSPWNTPLLPVKKPGTNDYRPVQDLREVNKRVEDIHPTVPNPYNLLSGLPPSHQWYTVLDLKDAFFCLRLHPTSQPLFAFEWRDPGMGISGQLTWTRLPQGFKNSPTLFDEALHRDLADFRIQHPDLILLQYVDDILLAATSELDCQQGTRALLQTLGDLGYRASAKKAQICQKQVKYLGYLLREGQRWLTEARKETVMGQPVPKTPRQLREFLGTAGFCRLWIPGFAEMAAPLYPLTKTGTLFSWGPDQQKAYQEIKQALLTAPALGLPDLTKPFELFVDEKQGYAKGVLTQKLGPWRRPVAYLSKKLDPVAAGWPPCLRMVAAIAVLTKDAGKLTMGQPLVILAPHAVEALVKQPPDRWLSNARMTHYQAMLLDTDRVQFGPVVALNPATLLPLPEEGAPHDCLEILAETHGTRPDLTDQPIPDADHTWYTDGSSFLQEGQRKAGAAVTTETEVIWAGALPAGTSAQRAELIALTQALKMAEGKRLNVYTDSRYAFATAHIHGEIYRRRGLLTSEGREIKNKSEILALLKALFLPKRLSIIHCLGHQKGDSAEARGNRLADQAAREAAIKTPPDTSTLLAGKRTADGSEFEKRTADGSEFESPKKKAKVE

SEQ ID NO: 2066 - protein, 2115 aa, synthetic construct
  source 1..2115: note = Description of Artificial Sequence: Synthetic polypeptide
MPAAKRVKLDGGDKKYSIGLDIGTNSVGWAVITDEYKVPSKKFKVLGNTDRHSIKKNLIGALLFDSGETAEATRLKRTARRRYTRRKNRICYLQEIFSNEMAKVDDSFFHRLEESFLVEEDKKHERHPIFGNIVDEVAYHEKYPTIYHLRKKLVDSTDKADLRLIYLALAHMIKFRGHFLIEGDLNPDNSDVDKLFIQLVQTYNQLFEENPINASGVDAKAILSARLSKSRRLENLIAQLPGEKKNGLFGNLIALSLGLTPNFKSNFDLAEDAKLQLSKDTYDDDLDNLLAQIGDQYADLFLAAKNLSDAILLSDILRVNTEITKAPLSASMIKRYDEHHQDLTLLKALVRQQLPEKYKEIFFDQSKNGYAGYIDGGASQEEFYKFIKPILEKMDGTEELLVKLNREDLLRKQRTFDNGSIPHQIHLGELHAILRRQEDFYPFLKDNREKIEKILTFRIPYYVGPLARGNSRFAWMTRKSEETITPWNFEEVVDKGASAQSFIERMTNFDKNLPNEKVLPKHSLLYEYFTVYNELTKVKYVTEGMRKPAFLSGEQKKAIVDLLFKTNRKVTVKQLKEDYFKKIECFDSVEISGVEDRFNASLGTYHDLLKIIKDKDFLDNEENEDILEDIVLTLTLFEDREMIEERLKTYAHLFDDKVMKQLKRRRYTGWGRLSRKLINGIRDKQSGKTILDFLKSDGFANRNFMQLIHDDSLTFKEDIQKAQVSGQGDSLHEHIANLAGSPAIKKGILQTVKVVDELVKVMGRHKPENIVIEMARENQTTQKGQKNSRERMKRIEEGIKELGSQILKEHPVENTQLQNEKLYLYYLQNGRDMYVDQELDINRLSDYDVDHIVPQSFLKDDSIDNKVLTRSDKARGKSDNVPSEEVVKKMKNYWRQLLNAKLITQRKFDNLTKAERGGLSELDKAGFIKRQLVETRQITKHVAQILDSRMNTKYDENDKLIREVKVITLKSKLVSDFRKDFQFYKVREINNYHHAHDAYLNAVVGTALIKKYPKLESEFVYGDYKVYDVRKMIAKSEQEIGKATAKYFFYSNIMNFFKTEITLANGEIRKRPLIETNGETGEIVWDKGRDFATVRKVLSMPQVNIVKKTEVQTGGFSKESILPKRNSDKLIARKKDWDPKKYGGFDSPTVAYSVLVVAKVEKGKSKKLKSVKELLGITIMERSSFEKNPIDFLEAKGYKEVKKDLIIKLPKYSLFELENGRKRMLASAGELQKGNELALPSKYVNFLYLASHYEKLKGSPEDNEQKQLFVEQHKHYLDEIIEQISEFSKRVILADANLDKVLSAYNKHRDKPIREQAENIIHLFTLTNLGAPAAFKYFDTTIDRKRYTSTKEVLDATLIHQSITGLYETRIDLSQLGGDGGGGGGSGGGGSGGGGSGGGGSGGGGSGGGGSGGTLGIEDEYRLHETSTEPDVSLGSTWLSDFPQAWAETGGMGLAVRQAPLIIPLKATSTPVSIQQYPMSHEARLGIKPHIQRLLDQGILVPCQSPWNTPLLPVKKPGTNDYRPVQDLREVNKRVEDIHPTVPNPYNLLSGLPPSHQWYTVLDLKDAFFCLRLHPTSQPLFAFEWRDPGMGISGQLTWTRLPQGFKNSPTLFDEALHRDLADFRIQHPDLILLQYVDDILLAATSELDCQQGTRALLQTLGDLGYRASAKKAQICQKQVKYLGYLLREGQRWLTEARKETVMGQPVPKTPRQLREFLGTAGFCRLWIPGFAEMAAPLYPLTKTGTLFSWGPDQQKAYQEIKQALLTAPALGLPDLTKPFELFVDEKQGYAKGVLTQKLGPWRRPVAYLSKKLDPVAAGWPPCLRMVAAIAVLTKDAGKLTMGQPLVILAPHAVEALVKQPPDRWLSNARMTHYQAMLLDTDRVQFGPVVALNPATLLPLPEEGAPHDCLEILAETHGTRPDLTDQPIPDADHTWYTDGSSFLQEGQRKAGAAVTTETEVIWAGALPAGTSAQRAELIALTQALKMAEGKRLNVYTDSRYAFATAHIHGEIYRRRGLLTSEGREIKNKSEILALLKALFLPKRLSIIHCLGHQKGDSAEARGNRLADQAAREAAIKTPPDTSTLLAGKRTADGSEFEKRTADGSEFESPKKKAKVE

SEQ ID NO: 2067 - protein, 2093 aa, synthetic construct
  source 1..2093: note = Description of Artificial Sequence: Synthetic polypeptide
MPAAKRVKLDGGDKKYSIGLDIGTNSVGWAVITDEYKVPSKKFKVLGNTDRHSIKKNLIGALLFDSGETAEATRLKRTARRRYTRRKNRICYLQEIFSNEMAKVDDSFFHRLEESFLVEEDKKHERHPIFGNIVDEVAYHEKYPTIYHLRKKLVDSTDKADLRLIYLALAHMIKFRGHFLIEGDLNPDNSDVDKLFIQLVQTYNQLFEENPINASGVDAKAILSARLSKSRRLENLIAQLPGEKKNGLFGNLIALSLGLTPNFKSNFDLAEDAKLQLSKDTYDDDLDNLLAQIGDQYADLFLAAKNLSDAILLSDILRVNTEITKAPLSASMIKRYDEHHQDLTLLKALVRQQLPEKYKEIFFDQSKNGYAGYIDGGASQEEFYKFIKPILEKMDGTEELLVKLNREDLLRKQRTFDNGSIPHQIHLGELHAILRRQEDFYPFLKDNREKIEKILTFRIPYYVGPLARGNSRFAWMTRKSEETITPWNFEEVVDKGASAQSFIERMTNFDKNLPNEKVLPKHSLLYEYFTVYNELTKVKYVTEGMRKPAFLSGEQKKAIVDLLFKTNRKVTVKQLKEDYFKKIECFDSVEISGVEDRFNASLGTYHDLLKIIKDKDFLDNEENEDILEDIVLTLTLFEDREMIEERLKTYAHLFDDKVMKQLKRRRYTGWGRLSRKLINGIRDKQSGKTILDFLKSDGFANRNFMQLIHDDSLTFKEDIQKAQVSGQGDSLHEHIANLAGSPAIKKGILQTVKVVDELVKVMGRHKPENIVIEMARENQTTQKGQKNSRERMKRIEEGIKELGSQILKEHPVENTQLQNEKLYLYYLQNGRDMYVDQELDINRLSDYDVDHIVPQSFLKDDSIDNKVLTRSDKARGKSDNVPSEEVVKKMKNYWRQLLNAKLITQRKFDNLTKAERGGLSELDKAGFIKRQLVETRQITKHVAQILDSRMNTKYDENDKLIREVKVITLKSKLVSDFRKDFQFYKVREINNYHHAHDAYLNAVVGTALIKKYPKLESEFVYGDYKVYDVRKMIAKSEQEIGKATAKYFFYSNIMNFFKTEITLANGEIRKRPLIETNGETGEIVWDKGRDFATVRKVLSMPQVNIVKKTEVQTGGFSKESILPKRNSDKLIARKKDWDPKKYGGFDSPTVAYSVLVVAKVEKGKSKKLKSVKELLGITIMERSSFEKNPIDFLEAKGYKEVKKDLIIKLPKYSLFELENGRKRMLASAGELQKGNELALPSKYVNFLYLASHYEKLKGSPEDNEQKQLFVEQHKHYLDEIIEQISEFSKRVILADANLDKVLSAYNKHRDKPIREQAENIIHLFTLTNLGAPAAFKYFDTTIDRKRYTSTKEVLDATLIHQSITGLYETRIDLSQLGGDGGEAAAKPAPGGTLGIEDEYRLHETSTEPDVSLGSTWLSDFPQAWAETGGMGLAVRQAPLIIPLKATSTPVSIQQYPMSHEARLGIKPHIQRLLDQGILVPCQSPWNTPLLPVKKPGTNDYRPVQDLREVNKRVEDIHPTVPNPYNLLSGLPPSHQWYTVLDLKDAFFCLRLHPTSQPLFAFEWRDPGMGISGQLTWTRLPQGFKNSPTLFDEALHRDLADFRIQHPDLILLQYVDDILLAATSELDCQQGTRALLQTLGDLGYRASAKKAQICQKQVKYLGYLLREGQRWLTEARKETVMGQPVPKTPRQLREFLGTAGFCRLWIPGFAEMAAPLYPLTKTGTLFSWGPDQQKAYQEIKQALLTAPALGLPDLTKPFELFVDEKQGYAKGVLTQKLGPWRRPVAYLSKKLDPVAAGWPPCLRMVAAIAVLTKDAGKLTMGQPLVILAPHAVEALVKQPPDRWLSNARMTHYQAMLLDTDRVQFGPVVALNPATLLPLPEEGAPHDCLEILAETHGTRPDLTDQPIPDADHTWYTDGSSFLQEGQRKAGAAVTTETEVIWAGALPAGTSAQRAELIALTQALKMAEGKRLNVYTDSRYAFATAHIHGEIYRRRGLLTSEGREIKNKSEILALLKALFLPKRLSIIHCLGHQKGDSAEARGNRLADQAAREAAIKTPPDTSTLLAGKRTADGSEFEKRTADGSEFESPKKKAKVE

SEQ ID NO: 2068 - protein, 2096 aa, synthetic construct
  source 1..2096: note = Description of Artificial Sequence: Synthetic polypeptide
MPAAKRVKLDGGDKKYSIGLDIGTNSVGWAVITDEYKVPSKKFKVLGNTDRHSIKKNLIGALLFDSGETAEATRLKRTARRRYTRRKNRICYLQEIFSNEMAKVDDSFFHRLEESFLVEEDKKHERHPIFGNIVDEVAYHEKYPTIYHLRKKLVDSTDKADLRLIYLALAHMIKFRGHFLIEGDLNPDNSDVDKLFIQLVQTYNQLFEENPINASGVDAKAILSARLSKSRRLENLIAQLPGEKKNGLFGNLIALSLGLTPNFKSNFDLAEDAKLQLSKDTYDDDLDNLLAQIGDQYADLFLAAKNLSDAILLSDILRVNTEITKAPLSASMIKRYDEHHQDLTLLKALVRQQLPEKYKEIFFDQSKNGYAGYIDGGASQEEFYKFIKPILEKMDGTEELLVKLNREDLLRKQRTFDNGSIPHQIHLGELHAILRRQEDFYPFLKDNREKIEKILTFRIPYYVGPLARGNSRFAWMTRKSEETITPWNFEEVVDKGASAQSFIERMTNFDKNLPNEKVLPKHSLLYEYFTVYNELTKVKYVTEGMRKPAFLSGEQKKAIVDLLFKTNRKVTVKQLKEDYFKKIECFDSVEISGVEDRFNASLGTYHDLLKIIKDKDFLDNEENEDILEDIVLTLTLFEDREMIEERLKTYAHLFDDKVMKQLKRRRYTGWGRLSRKLINGIRDKQSGKTILDFLKSDGFANRNFMQLIHDDSLTFKEDIQKAQVSGQGDSLHEHIANLAGSPAIKKGILQTVKVVDELVKVMGRHKPENIVIEMARENQTTQKGQKNSRERMKRIEEGIKELGSQILKEHPVENTQLQNEKLYLYYLQNGRDMYVDQELDINRLSDYDVDHIVPQSFLKDDSIDNKVLTRSDKARGKSDNVPSEEVVKKMKNYWRQLLNAKLITQRKFDNLTKAERGGLSELDKAGFIKRQLVETRQITKHVAQILDSRMNTKYDENDKLIREVKVITLKSKLVSDFRKDFQFYKVREINNYHHAHDAYLNAVVGTALIKKYPKLESEFVYGDYKVYDVRKMIAKSEQEIGKATAKYFFYSNIMNFFKTEITLANGEIRKRPLIETNGETGEIVWDKGRDFATVRKVLSMPQVNIVKKTEVQTGGFSKESILPKRNSDKLIARKKDWDPKKYGGFDSPTVAYSVLVVAKVEKGKSKKLKSVKELLGITIMERSSFEKNPIDFLEAKGYKEVKKDLIIKLPKYSLFELENGRKRMLASAGELQKGNELALPSKYVNFLYLASHYEKLKGSPEDNEQKQLFVEQHKHYLDEIIEQISEFSKRVILADANLDKVLSAYNKHRDKPIREQAENIIHLFTLTNLGAPAAFKYFDTTIDRKRYTSTKEVLDATLIHQSITGLYETRIDLSQLGGDGGGGGGGSEAAAKGGTLGIEDEYRLHETSTEPDVSLGSTWLSDFPQAWAETGGMGLAVRQAPLIIPLKATSTPVSIQQYPMSHEARLGIKPHIQRLLDQGILVPCQSPWNTPLLPVKKPGTNDYRPVQDLREVNKRVEDIHPTVPNPYNLLSGLPPSHQWYTVLDLKDAFFCLRLHPTSQPLFAFEWRDPGMGISGQLTWTRLPQGFKNSPTLFDEALHRDLADFRIQHPDLILLQYVDDILLAATSELDCQQGTRALLQTLGDLGYRASAKKAQICQKQVKYLGYLLREGQRWLTEARKETVMGQPVPKTPRQLREFLGTAGFCRLWIPGFAEMAAPLYPLTKTGTLFSWGPDQQKAYQEIKQALLTAPALGLPDLTKPFELFVDEKQGYAKGVLTQKLGPWRRPVAYLSKKLDPVAAGWPPCLRMVAAIAVLTKDAGKLTMGQPLVILAPHAVEALVKQPPDRWLSNARMTHYQAMLLDTDRVQFGPVVALNPATLLPLPEEGAPHDCLEILAETHGTRPDLTDQPIPDADHTWYTDGSSFLQEGQRKAGAAVTTETEVIWAGALPAGTSAQRAELIALTQALKMAEGKRLNVYTDSRYAFATAHIHGEIYRRRGLLTSEGREIKNKSEILALLKALFLPKRLSIIHCLGHQKGDSAEARGNRLADQAAREAAIKTPPDTSTLLAGKRTADGSEFEKRTADGSEFESPKKKAKVE

SEQ ID NO: 2069 - protein, 2096 aa, synthetic construct
  source 1..2096: note = Description of Artificial Sequence: Synthetic polypeptide
MPAAKRVKLDGGDKKYSIGLDIGTNSVGWAVITDEYKVPSKKFKVLGNTDRHSIKKNLIGALLFDSGETAEATRLKRTARRRYTRRKNRICYLQEIFSNEMAKVDDSFFHRLEESFLVEEDKKHERHPIFGNIVDEVAYHEKYPTIYHLRKKLVDSTDKADLRLIYLALAHMIKFRGHFLIEGDLNPDNSDVDKLFIQLVQTYNQLFEENPINASGVDAKAILSARLSKSRRLENLIAQLPGEKKNGLFGNLIALSLGLTPNFKSNFDLAEDAKLQLSKDTYDDDLDNLLAQIGDQYADLFLAAKNLSDAILLSDILRVNTEITKAPLSASMIKRYDEHHQDLTLLKALVRQQLPEKYKEIFFDQSKNGYAGYIDGGASQEEFYKFIKPILEKMDGTEELLVKLNREDLLRKQRTFDNGSIPHQIHLGELHAILRRQEDFYPFLKDNREKIEKILTFRIPYYVGPLARGNSRFAWMTRKSEETITPWNFEEVVDKGASAQSFIERMTNFDKNLPNEKVLPKHSLLYEYFTVYNELTKVKYVTEGMRKPAFLSGEQKKAIVDLLFKTNRKVTVKQLKEDYFKKIECFDSVEISGVEDRFNASLGTYHDLLKIIKDKDFLDNEENEDILEDIVLTLTLFEDREMIEERLKTYAHLFDDKVMKQLKRRRYTGWGRLSRKLINGIRDKQSGKTILDFLKSDGFANRNFMQLIHDDSLTFKEDIQKAQVSGQGDSLHEHIANLAGSPAIKKGILQTVKVVDELVKVMGRHKPENIVIEMARENQTTQKGQKNSRERMKRIEEGIKELGSQILKEHPVENTQLQNEKLYLYYLQNGRDMYVDQELDINRLSDYDVDHIVPQSFLKDDSIDNKVLTRSDKARGKSDNVPSEEVVKKMKNYWRQLLNAKLITQRKFDNLTKAERGGLSELDKAGFIKRQLVETRQITKHVAQILDSRMNTKYDENDKLIREVKVITLKSKLVSDFRKDFQFYKVREINNYHHAHDAYLNAVVGTALIKKYPKLESEFVYGDYKVYDVRKMIAKSEQEIGKATAKYFFYSNIMNFFKTEITLANGEIRKRPLIETNGETGEIVWDKGRDFATVRKVLSMPQVNIVKKTEVQTGGFSKESILPKRNSDKLIARKKDWDPKKYGGFDSPTVAYSVLVVAKVEKGKSKKLKSVKELLGITIMERSSFEKNPIDFLEAKGYKEVKKDLIIKLPKYSLFELENGRKRMLASAGELQKGNELALPSKYVNFLYLASHYEKLKGSPEDNEQKQLFVEQHKHYLDEIIEQISEFSKRVILADANLDKVLSAYNKHRDKPIREQAENIIHLFTLTNLGAPAAFKYFDTTIDRKRYTSTKEVLDATLIHQSITGLYETRIDLSQLGGDGGGGSEAAAKPAPGGTLGIEDEYRLHETSTEPDVSLGSTWLSDFPQAWAETGGMGLAVRQAPLIIPLKATSTPVSIQQYPMSHEARLGIKPHIQRLLDQGILVPCQSPWNTPLLPVKKPGTNDYRPVQDLREVNKRVEDIHPTVPNPYNLLSGLPPSHQWYTVLDLKDAFFCLRLHPTSQPLFAFEWRDPGMGISGQLTWTRLPQGFKNSPTLFDEALHRDLADFRIQHPDLILLQYVDDILLAATSELDCQQGTRALLQTLGDLGYRASAKKAQICQKQVKYLGYLLREGQRWLTEARKETVMGQPVPKTPRQLREFLGTAGFCRLWIPGFAEMAAPLYPLTKTGTLFSWGPDQQKAYQEIKQALLTAPALGLPDLTKPFELFVDEKQGYAKGVLTQKLGPWRRPVAYLSKKLDPVAAGWPPCLRMVAAIAVLTKDAGKLTMGQPLVILAPHAVEALVKQPPDRWLSNARMTHYQAMLLDTDRVQFGPVVALNPATLLPLPEEGAPHDCLEILAETHGTRPDLTDQPIPDADHTWYTDGSSFLQEGQRKAGAAVTTETEVIWAGALPAGTSAQRAELIALTQALKMAEGKRLNVYTDSRYAFATAHIHGEIYRRRGLLTSEGREIKNKSEILALLKALFLPKRLSIIHCLGHQKGDSAEARGNRLADQAAREAAIKTPPDTSTLLAGKRTADGSEFEKRTADGSEFESPKKKAKVE

SEQ ID NO: 2070 - protein, 2105 aa, synthetic construct
  source 1..2105: note = Description of Artificial Sequence: Synthetic polypeptide
MPAAKRVKLDGGDKKYSIGLDIGTNSVGWAVITDEYKVPSKKFKVLGNTDRHSIKKNLIGALLFDSGETAEATRLKRTARRRYTRRKNRICYLQEIFSNEMAKVDDSFFHRLEESFLVEEDKKHERHPIFGNIVDEVAYHEKYPTIYHLRKKLVDSTDKADLRLIYLALAHMIKFRGHFLIEGDLNPDNSDVDKLFIQLVQTYNQLFEENPINASGVDAKAILSARLSKSRRLENLIAQLPGEKKNGLFGNLIALSLGLTPNFKSNFDLAEDAKLQLSKDTYDDDLDNLLAQIGDQYADLFLAAKNLSDAILLSDILRVNTEITKAPLSASMIKRYDEHHQDLTLLKALVRQQLPEKYKEIFFDQSKNGYAGYIDGGASQEEFYKFIKPILEKMDGTEELLVKLNREDLLRKQRTFDNGSIPHQIHLGELHAILRRQEDFYPFLKDNREKIEKILTFRIPYYVGPLARGNSRFAWMTRKSEETITPWNFEEVVDKGASAQSFIERMTNFDKNLPNEKVLPKHSLLYEYFTVYNELTKVKYVTEGMRKPAFLSGEQKKAIVDLLFKTNRKVTVKQLKEDYFKKIECFDSVEISGVEDRFNASLGTYHDLLKIIKDKDFLDNEENEDILEDIVLTLTLFEDREMIEERLKTYAHLFDDKVMKQLKRRRYTGWGRLSRKLINGIRDKQSGKTILDFLKSDGFANRNFMQLIHDDSLTFKEDIQKAQVSGQGDSLHEHIANLAGSPAIKKGILQTVKVVDELVKVMGRHKPENIVIEMARENQTTQKGQKNSRERMKRIEEGIKELGSQILKEHPVENTQLQNEKLYLYYLQNGRDMYVDQELDINRLSDYDVDHIVPQSFLKDDSIDNKVLTRSDKARGKSDNVPSEEVVKKMKNYWRQLLNAKLITQRKFDNLTKAERGGLSELDKAGFIKRQLVETRQITKHVAQILDSRMNTKYDENDKLIREVKVITLKSKLVSDFRKDFQFYKVREINNYHHAHDAYLNAVVGTALIKKYPKLESEFVYGDYKVYDVRKMIAKSEQEIGKATAKYFFYSNIMNFFKTEITLANGEIRKRPLIETNGETGEIVWDKGRDFATVRKVLSMPQVNIVKKTEVQTGGFSKESILPKRNSDKLIARKKDWDPKKYGGFDSPTVAYSVLVVAKVEKGKSKKLKSVKELLGITIMERSSFEKNPIDFLEAKGYKEVKKDLIIKLPKYSLFELENGRKRMLASAGELQKGNELALPSKYVNFLYLASHYEKLKGSPEDNEQKQLFVEQHKHYLDEIIEQISEFSKRVILADANLDKVLSAYNKHRDKPIREQAENIIHLFTLTNLGAPAAFKYFDTTIDRKRYTSTKEVLDATLIHQSITGLYETRIDLSQLGGDGGEAAAKEAAAKEAAAKEAAAKGGTLGIEDEYRLHETSTEPDVSLGSTWLSDFPQAWAETGGMGLAVRQAPLIIPLKATSTPVSIQQYPMSHEARLGIKPHIQRLLDQGILVPCQSPWNTPLLPVKKPGTNDYRPVQDLREVNKRVEDIHPTVPNPYNLLSGLPPSHQWYTVLDLKDAFFCLRLHPTSQPLFAFEWRDPGMGISGQLTWTRLPQGFKNSPTLFNEALHRDLADFRIQHPDLILLQYVDDILLAATSELDCQQGTRALLQTLGDLGYRASAKKAQICQKQVKYLGYLLREGQRWLTEARKETVMGQPVPKTPRQLREFLGTAGFCRLWIPGFAEMAAPLYPLTKPGTLFSWGPDQQKAYQEIKQALLTAPALGLPDLTKPFELFVDEKQGYAKGVLTQKLGPWRRPVAYLSKKLDPVAAGWPPCLRMVAAIAVLTKDAGKLTMGQPLVILAPHAVEALVKQPPDRWLSNARMTHYQAMLLDTDRVQFGPVVALNPATLLPLPEEGAPHDCLEILAETHGTRPDLTDQPIPDADHTWYTDGSSFLQEGQRKAGAAVTTETEVIWAGALPAGTSAQRAELIALTQALKMAEGKRLNVYTDSRYAFATAHIHGEIYRRRGWLTSEGREIKNKSEILALLKALFLPKRLSIIHCLGHQKGDSAEARGNRLADQAAREAAIKTPPDTSTLLAGKRTADGSEFEKRTADGSEFESPKKKAKVE

SEQ ID NO: 2071 - protein, 2096 aa, synthetic construct
  source 1..2096: note = Description of Artificial Sequence: Synthetic polypeptide
MPAAKRVKLDGGDKKYSIGLDIGTNSVGWAVITDEYKVPSKKFKVLGNTDRHSIKKNLIGALLFDSGETAEATRLKRTARRRYTRRKNRICYLQEIFSNEMAKVDDSFFHRLEESFLVEEDKKHERHPIFGNIVDEVAYHEKYPTIYHLRKKLVDSTDKADLRLIYLALAHMIKFRGHFLIEGDLNPDNSDVDKLFIQLVQTYNQLFEENPINASGVDAKAILSARLSKSRRLENLIAQLPGEKKNGLFGNLIALSLGLTPNFKSNFDLAEDAKLQLSKDTYDDDLDNLLAQIGDQYADLFLAAKNLSDAILLSDILRVNTEITKAPLSASMIKRYDEHHQDLTLLKALVRQQLPEKYKEIFFDQSKNGYAGYIDGGASQEEFYKFIKPILEKMDGTEELLVKLNREDLLRKQRTFDNGSIPHQIHLGELHAILRRQEDFYPFLKDNREKIEKILTFRIPYYVGPLARGNSRFAWMTRKSEETITPWNFEEVVDKGASAQSFIERMTNFDKNLPNEKVLPKHSLLYEYFTVYNELTKVKYVTEGMRKPAFLSGEQKKAIVDLLFKTNRKVTVKQLKEDYFKKIECFDSVEISGVEDRFNASLGTYHDLLKIIKDKDFLDNEENEDILEDIVLTLTLFEDREMIEERLKTYAHLFDDKVMKQLKRRRYTGWGRLSRKLINGIRDKQSGKTILDFLKSDGFANRNFMQLIHDDSLTFKEDIQKAQVSGQGDSLHEHIANLAGSPAIKKGILQTVKVVDELVKVMGRHKPENIVIEMARENQTTQKGQKNSRERMKRIEEGIKELGSQILKEHPVENTQLQNEKLYLYYLQNGRDMYVDQELDINRLSDYDVDHIVPQSFLKDDSIDNKVLTRSDKARGKSDNVPSEEVVKKMKNYWRQLLNAKLITQRKFDNLTKAERGGLSELDKAGFIKRQLVETRQITKHVAQILDSRMNTKYDENDKLIREVKVITLKSKLVSDFRKDFQFYKVREINNYHHAHDAYLNAVVGTALIKKYPKLESEFVYGDYKVYDVRKMIAKSEQEIGKATAKYFFYSNIMNFFKTEITLANGEIRKRPLIETNGETGEIVWDKGRDFATVRKVLSMPQVNIVKKTEVQTGGFSKESILPKRNSDKLIARKKDWDPKKYGGFDSPTVAYSVLVVAKVEKGKSKKLKSVKELLGITIMERSSFEKNPIDFLEAKGYKEVKKDLIIKLPKYSLFELENGRKRMLASAGELQKGNELALPSKYVNFLYLASHYEKLKGSPEDNEQKQLFVEQHKHYLDEIIEQISEFSKRVILADANLDKVLSAYNKHRDKPIREQAENIIHLFTLTNLGAPAAFKYFDTTIDRKRYTSTKEVLDATLIHQSITGLYETRIDLSQLGGDGGGGSEAAAKPAPGGTLGIEDEYRLHETSTEPDVSLGSTWLSDFPQAWAETGGMGLAVRQAPLIIPLKATSTPVSIQQYPMSHEARLGIKPHIQRLLDQGILVPCQSPWNTPLLPVKKPGTNDYRPVQDLREVNKRVEDIHPTVPNPYNLLSGLPPSHQWYTVLDLKDAFFCLRLHPTSQPLFAFEWRDPGMGISGQLTWTRLPQGFKNSPTLFNEALHRDLADFRIQHPDLILLQYVDDILLAATSELDCQQGTRALLQTLGDLGYRASAKKAQICQKQVKYLGYLLREGQRWLTEARKETVMGQPVPKTPRQLREFLGTAGFCRLWIPGFAEMAAPLYPLTKPGTLFSWGPDQQKAYQEIKQALLTAPALGLPDLTKPFELFVDEKQGYAKGVLTQKLGPWRRPVAYLSKKLDPVAAGWPPCLRMVAAIAVLTKDAGKLTMGQPLVILAPHAVEALVKQPPDRWLSNARMTHYQAMLLDTDRVQFGPVVALNPATLLPLPEEGAPHDCLEILAETHGTRPDLTDQPIPDADHTWYTDGSSFLQEGQRKAGAAVTTETEVIWAGALPAGTSAQRAELIALTQALKMAEGKRLNVYTDSRYAFATAHIHGEIYRRRGWLTSEGREIKNKSEILALLKALFLPKRLSIIHCLGHQKGDSAEARGNRLADQAAREAAIKTPPDTSTLLAGKRTADGSEFEKRTADGSEFESPKKKAKVE

SEQ ID NO: 2072 - protein, 2105 aa, synthetic construct
  source 1..2105: note = Description of Artificial Sequence: Synthetic polypeptide
MPAAKRVKLDGGDKKYSIGLDIGTNSVGWAVITDEYKVPSKKFKVLGNTDRHSIKKNLIGALLFDSGETAEATRLKRTARRRYTRRKNRICYLQEIFSNEMAKVDDSFFHRLEESFLVEEDKKHERHPIFGNIVDEVAYHEKYPTIYHLRKKLVDSTDKADLRLIYLALAHMIKFRGHFLIEGDLNPDNSDVDKLFIQLVQTYNQLFEENPINASGVDAKAILSARLSKSRRLENLIAQLPGEKKNGLFGNLIALSLGLTPNFKSNFDLAEDAKLQLSKDTYDDDLDNLLAQIGDQYADLFLAAKNLSDAILLSDILRVNTEITKAPLSASMIKRYDEHHQDLTLLKALVRQQLPEKYKEIFFDQSKNGYAGYIDGGASQEEFYKFIKPILEKMDGTEELLVKLNREDLLRKQRTFDNGSIPHQIHLGELHAILRRQEDFYPFLKDNREKIEKILTFRIPYYVGPLARGNSRFAWMTRKSEETITPWNFEEVVDKGASAQSFIERMTNFDKNLPNEKVLPKHSLLYEYFTVYNELTKVKYVTEGMRKPAFLSGEQKKAIVDLLFKTNRKVTVKQLKEDYFKKIECFDSVEISGVEDRFNASLGTYHDLLKIIKDKDFLDNEENEDILEDIVLTLTLFEDREMIEERLKTYAHLFDDKVMKQLKRRRYTGWGRLSRKLINGIRDKQSGKTILDFLKSDGFANRNFMQLIHDDSLTFKEDIQKAQVSGQGDSLHEHIANLAGSPAIKKGILQTVKVVDELVKVMGRHKPENIVIEMARENQTTQKGQKNSRERMKRIEEGIKELGSQILKEHPVENTQLQNEKLYLYYLQNGRDMYVDQELDINRLSDYDVDHIVPQSFLKDDSIDNKVLTRSDKARGKSDNVPSEEVVKKMKNYWRQLLNAKLITQRKFDNLTKAERGGLSELDKAGFIKRQLVETRQITKHVAQILDSRMNTKYDENDKLIREVKVITLKSKLVSDFRKDFQFYKVREINNYHHAHDAYLNAVVGTALIKKYPKLESEFVYGDYKVYDVRKMIAKSEQEIGKATAKYFFYSNIMNFFKTEITLANGEIRKRPLIETNGETGEIVWDKGRDFATVRKVLSMPQVNIVKKTEVQTGGFSKESILPKRNSDKLIARKKDWDPKKYGGFDSPTVAYSVLVVAKVEKGKSKKLKSVKELLGITIMERSSFEKNPIDFLEAKGYKEVKKDLIIKLPKYSLFELENGRKRMLASAGELQKGNELALPSKYVNFLYLASHYEKLKGSPEDNEQKQLFVEQHKHYLDEIIEQISEFSKRVILADANLDKVLSAYNKHRDKPIREQAENIIHLFTLTNLGAPAAFKYFDTTIDRKRYTSTKEVLDATLIHQSITGLYETRIDLSQLGGDGGGGGGSGGGGSGGGGSGGGGSGGTLGIEDEYRLHETSTEPDVSLGSTWLSDFPQAWAETGGMGLAVRQAPLIIPLKATSTPVSIQQYPMSHEARLGIKPHIQRLLDQGILVPCQSPWNTPLLPVKKPGTNDYRPVQDLREVNKRVEDIHPTVPNPYNLLSGLPPSHQWYTVLDLKDAFFCLRLHPTSQPLFAFEWRDPGMGISGQLTWTRLPQGFKNSPTLFNEALHRDLADFRIQHPDLILLQYVDDILLAATSELDCQQGTRALLQTLGDLGYRASAKKAQICQKQVKYLGYLLREGQRWLTEARKETVMGQPVPKTPRQLREFLGTAGFCRLWIPGFAEMAAPLYPLTKPGTLFSWGPDQQKAYQEIKQALLTAPALGLPDLTKPFELFVDEKQGYAKGVLTQKLGPWRRPVAYLSKKLDPVAAGWPPCLRMVAAIAVLTKDAGKLTMGQPLVILAPHAVEALVKQPPDRWLSNARMTHYQAMLLDTDRVQFGPVVALNPATLLPLPEEGAPHDCLEILAETHGTRPDLTDQPIPDADHTWYTDGSSFLQEGQRKAGAAVTTETEVIWAGALPAGTSAQRAELIALTQALKMAEGKRLNVYTDSRYAFATAHIHGEIYRRRGWLTSEGREIKNKSEILALLKALFLPKRLSIIHCLGHQKGDSAEARGNRLADQAAREAAIKTPPDTSTLLAGKRTADGSEFEKRTADGSEFESPKKKAKVE

SEQ ID NO: 2073 - protein, 2093 aa, synthetic construct
  source 1..2093: note = Description of Artificial Sequence: Synthetic polypeptide
MPAAKRVKLDGGDKKYSIGLDIGTNSVGWAVITDEYKVPSKKFKVLGNTDRHSIKKNLIGALLFDSGETAEATRLKRTARRRYTRRKNRICYLQEIFSNEMAKVDDSFFHRLEESFLVEEDKKHERHPIFGNIVDEVAYHEKYPTIYHLRKKLVDSTDKADLRLIYLALAHMIKFRGHFLIEGDLNPDNSDVDKLFIQLVQTYNQLFEENPINASGVDAKAILSARLSKSRRLENLIAQLPGEKKNGLFGNLIALSLGLTPNFKSNFDLAEDAKLQLSKDTYDDDLDNLLAQIGDQYADLFLAAKNLSDAILLSDILRVNTEITKAPLSASMIKRYDEHHQDLTLLKALVRQQLPEKYKEIFFDQSKNGYAGYIDGGASQEEFYKFIKPILEKMDGTEELLVKLNREDLLRKQRTFDNGSIPHQIHLGELHAILRRQEDFYPFLKDNREKIEKILTFRIPYYVGPLARGNSRFAWMTRKSEETITPWNFEEVVDKGASAQSFIERMTNFDKNLPNEKVLPKHSLLYEYFTVYNELTKVKYVTEGMRKPAFLSGEQKKAIVDLLFKTNRKVTVKQLKEDYFKKIECFDSVEISGVEDRFNASLGTYHDLLKIIKDKDFLDNEENEDILEDIVLTLTLFEDREMIEERLKTYAHLFDDKVMKQLKRRRYTGWGRLSRKLINGIRDKQSGKTILDFLKSDGFANRNFMQLIHDDSLTFKEDIQKAQVSGQGDSLHEHIANLAGSPAIKKGILQTVKVVDELVKVMGRHKPENIVIEMARENQTTQKGQKNSRERMKRIEEGIKELGSQILKEHPVENTQLQNEKLYLYYLQNGRDMYVDQELDINRLSDYDVDHIVPQSFLKDDSIDNKVLTRSDKARGKSDNVPSEEVVKKMKNYWRQLLNAKLITQRKFDNLTKAERGGLSELDKAGFIKRQLVETRQITKHVAQILDSRMNTKYDENDKLIREVKVITLKSKLVSDFRKDFQFYKVREINNYHHAHDAYLNAVVGTALIKKYPKLESEFVYGDYKVYDVRKMIAKSEQEIGKATAKYFFYSNIMNFFKTEITLANGEIRKRPLIETNGETGEIVWDKGRDFATVRKVLSMPQVNIVKKTEVQTGGFSKESILPKRNSDKLIARKKDWDPKKYGGFDSPTVAYSVLVVAKVEKGKSKKLKSVKELLGITIMERSSFEKNPIDFLEAKGYKEVKKDLIIKLPKYSLFELENGRKRMLASAGELQKGNELALPSKYVNFLYLASHYEKLKGSPEDNEQKQLFVEQHKHYLDEIIEQISEFSKRVILADANLDKVLSAYNKHRDKPIREQAENIIHLFTLTNLGAPAAFKYFDTTIDRKRYTSTKEVLDATLIHQSITGLYETRIDLSQLGGDGGGSSEAAAKGGTLGIEDEYRLHETSTEPDVSLGSTWLSDFPQAWAETGGMGLAVRQAPLIIPLKATSTPVSIQQYPMSHEARLGIKPHIQRLLDQGILVPCQSPWNTPLLPVKKPGTNDYRPVQDLREVNKRVEDIHPTVPNPYNLLSGLPPSHQWYTVLDLKDAFFCLRLHPTSQPLFAFEWRDPGMGISGQLTWTRLPQGFKNSPTLFNEALHRDLADFRIQHPDLILLQYVDDILLAATSELDCQQGTRALLQTLGDLGYRASAKKAQICQKQVKYLGYLLREGQRWLTEARKETVMGQPVPKTPRQLREFLGTAGFCRLWIPGFAEMAAPLYPLTKPGTLFSWGPDQQKAYQEIKQALLTAPALGLPDLTKPFELFVDEKQGYAKGVLTQKLGPWRRPVAYLSKKLDPVAAGWPPCLRMVAAIAVLTKDAGKLTMGQPLVILAPHAVEALVKQPPDRWLSNARMTHYQAMLLDTDRVQFGPVVALNPATLLPLPEEGAPHDCLEILAETHGTRPDLTDQPIPDADHTWYTDGSSFLQEGQRKAGAAVTTETEVIWAGALPAGTSAQRAELIALTQALKMAEGKRLNVYTDSRYAFATAHIHGEIYRRRGWLTSEGREIKNKSEILALLKALFLPKRLSIIHCLGHQKGDSAEARGNRLADQAAREAAIKTPPDTSTLLAGKRTADGSEFEKRTADGSEFESPKKKAKVE

SEQ ID NO: 2074 - protein, 2096 aa, synthetic construct
  source 1..2096: note = Description of Artificial Sequence: Synthetic polypeptide
MPAAKRVKLDGGDKKYSIGLDIGTNSVGWAVITDEYKVPSKKFKVLGNTDRHSIKKNLIGALLFDSGETAEATRLKRTARRRYTRRKNRICYLQEIFSNEMAKVDDSFFHRLEESFLVEEDKKHERHPIFGNIVDEVAYHEKYPTIYHLRKKLVDSTDKADLRLIYLALAHMIKFRGHFLIEGDLNPDNSDVDKLFIQLVQTYNQLFEENPINASGVDAKAILSARLSKSRRLENLIAQLPGEKKNGLFGNLIALSLGLTPNFKSNFDLAEDAKLQLSKDTYDDDLDNLLAQIGDQYADLFLAAKNLSDAILLSDILRVNTEITKAPLSASMIKRYDEHHQDLTLLKALVRQQLPEKYKEIFFDQSKNGYAGYIDGGASQEEFYKFIKPILEKMDGTEELLVKLNREDLLRKQRTFDNGSIPHQIHLGELHAILRRQEDFYPFLKDNREKIEKILTFRIPYYVGPLARGNSRFAWMTRKSEETITPWNFEEVVDKGASAQSFIERMTNFDKNLPNEKVLPKHSLLYEYFTVYNELTKVKYVTEGMRKPAFLSGEQKKAIVDLLFKTNRKVTVKQLKEDYFKKIECFDSVEISGVEDRFNASLGTYHDLLKIIKDKDFLDNEENEDILEDIVLTLTLFEDREMIEERLKTYAHLFDDKVMKQLKRRRYTGWGRLSRKLINGIRDKQSGKTILDFLKSDGFANRNFMQLIHDDSLTFKEDIQKAQVSGQGDSLHEHIANLAGSPAIKKGILQTVKVVDELVKVMGRHKPENIVIEMARENQTTQKGQKNSRERMKRIEEGIKELGSQILKEHPVENTQLQNEKLYLYYLQNGRDMYVDQELDINRLSDYDVDHIVPQSFLKDDSIDNKVLTRSDKARGKSDNVPSEEVVKKMKNYWRQLLNAKLITQRKFDNLTKAERGGLSELDKAGFIKRQLVETRQITKHVAQILDSRMNTKYDENDKLIREVKVITLKSKLVSDFRKDFQFYKVREINNYHHAHDAYLNAVVGTALIKKYPKLESEFVYGDYKVYDVRKMIAKSEQEIGKATAKYFFYSNIMNFFKTEITLANGEIRKRPLIETNGETGEIVWDKGRDFATVRKVLSMPQVNIVKKTEVQTGGFSKESILPKRNSDKLIARKKDWDPKKYGGFDSPTVAYSVLVVAKVEKGKSKKLKSVKELLGITIMERSSFEKNPIDFLEAKGYKEVKKDLIIKLPKYSLFELENGRKRMLASAGELQKGNELALPSKYVNFLYLASHYEKLKGSPEDNEQKQLFVEQHKHYLDEIIEQISEFSKRVILADANLDKVLSAYNKHRDKPIREQAENIIHLFTLTNLGAPAAFKYFDTTIDRKRYTSTKEVLDATLIHQSITGLYETRIDLSQLGGDGGGGSEAAAKGGGGGTLGIEDEYRLHETSTEPDVSLGSTWLSDFPQAWAETGGMGLAVRQAPLIIPLKATSTPVSIQQYPMSHEARLGIKPHIQRLLDQGILVPCQSPWNTPLLPVKKPGTNDYRPVQDLREVNKRVEDIHPTVPNPYNLLSGLPPSHQWYTVLDLKDAFFCLRLHPTSQPLFAFEWRDPGMGISGQLTWTRLPQGFKNSPTLFNEALHRDLADFRIQHPDLILLQYVDDILLAATSELDCQQGTRALLQTLGDLGYRASAKKAQICQKQVKYLGYLLREGQRWLTEARKETVMGQPVPKTPRQLREFLGTAGFCRLWIPGFAEMAAPLYPLTKPGTLFSWGPDQQKAYQEIKQALLTAPALGLPDLTKPFELFVDEKQGYAKGVLTQKLGPWRRPVAYLSKKLDPVAAGWPPCLRMVAAIAVLTKDAGKLTMGQPLVILAPHAVEALVKQPPDRWLSNARMTHYQAMLLDTDRVQFGPVVALNPATLLPLPEEGAPHDCLEILAETHGTRPDLTDQPIPDADHTWYTDGSSFLQEGQRKAGAAVTTETEVIWAGALPAGTSAQRAELIALTQALKMAEGKRLNVYTDSRYAFATAHIHGEIYRRRGWLTSEGREIKNKSEILALLKALFLPKRLSIIHCLGHQKGDSAEARGNRLADQAAREAAIKTPPDTSTLLAGKRTADGSEFEKRTADGSEFESPKKKAKVE

SEQ ID NO: 2075 - protein, 2096 aa, synthetic construct
  source 1..2096: note = Description of Artificial Sequence: Synthetic polypeptide
MPAAKRVKLDGGDKKYSIGLDIGTNSVGWAVITDEYKVPSKKFKVLGNTDRHSIKKNLIGALLFDSGETAEATRLKRTARRRYTRRKNRICYLQEIFSNEMAKVDDSFFHRLEESFLVEEDKKHERHPIFGNIVDEVAYHEKYPTIYHLRKKLVDSTDKADLRLIYLALAHMIKFRGHFLIEGDLNPDNSDVDKLFIQLVQTYNQLFEENPINASGVDAKAILSARLSKSRRLENLIAQLPGEKKNGLFGNLIALSLGLTPNFKSNFDLAEDAKLQLSKDTYDDDLDNLLAQIGDQYADLFLAAKNLSDAILLSDILRVNTEITKAPLSASMIKRYDEHHQDLTLLKALVRQQLPEKYKEIFFDQSKNGYAGYIDGGASQEEFYKFIKPILEKMDGTEELLVKLNREDLLRKQRTFDNGSIPHQIHLGELHAILRRQEDFYPFLKDNREKIEKILTFRIPYYVGPLARGNSRFAWMTRKSEETITPWNFEEVVDKGASAQSFIERMTNFDKNLPNEKVLPKHSLLYEYFTVYNELTKVKYVTEGMRKPAFLSGEQKKAIVDLLFKTNRKVTVKQLKEDYFKKIECFDSVEISGVEDRFNASLGTYHDLLKIIKDKDFLDNEENEDILEDIVLTLTLFEDREMIEERLKTYAHLFDDKVMKQLKRRRYTGWGRLSRKLINGIRDKQSGKTILDFLKSDGFANRNFMQLIHDDSLTFKEDIQKAQVSGQGDSLHEHIANLAGSPAIKKGILQTVKVVDELVKVMGRHKPENIVIEMARENQTTQKGQKNSRERMKRIEEGIKELGSQILKEHPVENTQLQNEKLYLYYLQNGRDMYVDQELDINRLSDYDVDHIVPQSFLKDDSIDNKVLTRSDKARGKSDNVPSEEVVKKMKNYWRQLLNAKLITQRKFDNLTKAERGGLSELDKAGFIKRQLVETRQITKHVAQILDSRMNTKYDENDKLIREVKVITLKSKLVSDFRKDFQFYKVREINNYHHAHDAYLNAVVGTALIKKYPKLESEFVYGDYKVYDVRKMIAKSEQEIGKATAKYFFYSNIMNFFKTEITLANGEIRKRPLIETNGETGEIVWDKGRDFATVRKVLSMPQVNIVKKTEVQTGGFSKESILPKRNSDKLIARKKDWDPKKYGGFDSPTVAYSVLVVAKVEKGKSKKLKSVKELLGITIMERSSFEKNPIDFLEAKGYKEVKKDLIIKLPKYSLFELENGRKRMLASAGELQKGNELALPSKYVNFLYLASHYEKLKGSPEDNEQKQLFVEQHKHYLDEIIEQISEFSKRVILADANLDKVLSAYNKHRDKPIREQAENIIHLFTLTNLGAPAAFKYFDTTIDRKRYTSTKEVLDATLIHQSITGLYETRIDLSQLGGDGGGSSEAAAKGGGGGTLGIEDEYRLHETSTEPDVSLGSTWLSDFPQAWAETGGMGLAVRQAPLIIPLKATSTPVSIQQYPMSHEARLGIKPHIQRLLDQGILVPCQSPWNTPLLPVKKPGTNDYRPVQDLREVNKRVEDIHPTVPNPYNLLSGLPPSHQWYTVLDLKDAFFCLRLHPTSQPLFAFEWRDPGMGISGQLTWTRLPQGFKNSPTLFNEALHRDLADFRIQHPDLILLQYVDDILLAATSELDCQQGTRALLQTLGDLGYRASAKKAQICQKQVKYLGYLLREGQRWLTEARKETVMGQPVPKTPRQLREFLGTAGFCRLWIPGFAEMAAPLYPLTKPGTLFSWGPDQQKAYQEIKQALLTAPALGLPDLTKPFELFVDEKQGYAKGVLTQKLGPWRRPVAYLSKKLDPVAAGWPPCLRMVAAIAVLTKDAGKLTMGQPLVILAPHAVEALVKQPPDRWLSNARMTHYQAMLLDTDRVQFGPVVALNPATLLPLPEEGAPHDCLEILAETHGTRPDLTDQPIPDADHTWYTDGSSFLQEGQRKAGAAVTTETEVIWAGALPAGTSAQRAELIALTQALKMAEGKRLNVYTDSRYAFATAHIHGEIYRRRGWLTSEGREIKNKSEILALLKALFLPKRLSIIHCLGHQKGDSAEARGNRLADQAAREAAIKTPPDTSTLLAGKRTADGSEFEKRTADGSEFESPKKKAKVE

SEQ ID NO: 2076 - protein, 2096 aa, synthetic construct
  source 1..2096: note = Description of Artificial Sequence: Synthetic polypeptide
MPAAKRVKLDGGDKKYSIGLDIGTNSVGWAVITDEYKVPSKKFKVLGNTDRHSIKKNLIGALLFDSGETAEATRLKRTARRRYTRRKNRICYLQEIFSNEMAKVDDSFFHRLEESFLVEEDKKHERHPIFGNIVDEVAYHEKYPTIYHLRKKLVDSTDKADLRLIYLALAHMIKFRGHFLIEGDLNPDNSDVDKLFIQLVQTYNQLFEENPINASGVDAKAILSARLSKSRRLENLIAQLPGEKKNGLFGNLIALSLGLTPNFKSNFDLAEDAKLQLSKDTYDDDLDNLLAQIGDQYADLFLAAKNLSDAILLSDILRVNTEITKAPLSASMIKRYDEHHQDLTLLKALVRQQLPEKYKEIFFDQSKNGYAGYIDGGASQEEFYKFIKPILEKMDGTEELLVKLNREDLLRKQRTFDNGSIPHQIHLGELHAILRRQEDFYPFLKDNREKIEKILTFRIPYYVGPLARGNSRFAWMTRKSEETITPWNFEEVVDKGASAQSFIERMTNFDKNLPNEKVLPKHSLLYEYFTVYNELTKVKYVTEGMRKPAFLSGEQKKAIVDLLFKTNRKVTVKQLKEDYFKKIECFDSVEISGVEDRFNASLGTYHDLLKIIKDKDFLDNEENEDILEDIVLTLTLFEDREMIEERLKTYAHLFDDKVMKQLKRRRYTGWGRLSRKLINGIRDKQSGKTILDFLKSDGFANRNFMQLIHDDSLTFKEDIQKAQVSGQGDSLHEHIANLAGSPAIKKGILQTVKVVDELVKVMGRHKPENIVIEMARENQTTQKGQKNSRERMKRIEEGIKELGSQILKEHPVENTQLQNEKLYLYYLQNGRDMYVDQELDINRLSDYDVDHIVPQSFLKDDSIDNKVLTRSDKARGKSDNVPSEEVVKKMKNYWRQLLNAKLITQRKFDNLTKAERGGLSELDKAGFIKRQLVETRQITKHVAQILDSRMNTKYDENDKLIREVKVITLKSKLVSDFRKDFQFYKVREINNYHHAHDAYLNAVVGTALIKKYPKLESEFVYGDYKVYDVRKMIAKSEQEIGKATAKYFFYSNIMNFFKTEITLANGEIRKRPLIETNGETGEIVWDKGRDFATVRKVLSMPQVNIVKKTEVQTGGFSKESILPKRNSDKLIARKKDWDPKKYGGFDSPTVAYSVLVVAKVEKGKSKKLKSVKELLGITIMERSSFEKNPIDFLEAKGYKEVKKDLIIKLPKYSLFELENGRKRMLASAGELQKGNELALPSKYVNFLYLASHYEKLKGSPEDNEQKQLFVEQHKHYLDEIIEQISEFSKRVILADANLDKVLSAYNKHRDKPIREQAENIIHLFTLTNLGAPAAFKYFDTTIDRKRYTSTKEVLDATLIHQSITGLYETRIDLSQLGGDGGGSSGGSEAAAKGGTLGIEDEYRLHETSTEPDVSLGSTWLSDFPQAWAETGGMGLAVRQAPLIIPLKATSTPVSIQQYPMSHEARLGIKPHIQRLLDQGILVPCQSPWNTPLLPVKKPGTNDYRPVQDLREVNKRVEDIHPTVPNPYNLLSGLPPSHQWYTVLDLKDAFFCLRLHPTSQPLFAFEWRDPGMGISGQLTWTRLPQGFKNSPTLFNEALHRDLADFRIQHPDLILLQYVDDILLAATSELDCQQGTRALLQTLGDLGYRASAKKAQICQKQVKYLGYLLREGQRWLTEARKETVMGQPVPKTPRQLREFLGTAGFCRLWIPGFAEMAAPLYPLTKPGTLFSWGPDQQKAYQEIKQALLTAPALGLPDLTKPFELFVDEKQGYAKGVLTQKLGPWRRPVAYLSKKLDPVAAGWPPCLRMVAAIAVLTKDAGKLTMGQPLVILAPHAVEALVKQPPDRWLSNARMTHYQAMLLDTDRVQFGPVVALNPATLLPLPEEGAPHDCLEILAETHGTRPDLTDQPIPDADHTWYTDGSSFLQEGQRKAGAAVTTETEVIWAGALPAGTSAQRAELIALTQALKMAEGKRLNVYTDSRYAFATAHIHGEIYRRRGWLTSEGREIKNKSEILALLKALFLPKRLSIIHCLGHQKGDSAEARGNRLADQAAREAAIKTPPDTSTLLAGKRTADGSEFEKRTADGSEFESPKKKAKVE

SEQ ID NO: 2077 - protein, 2090 aa, synthetic construct
  source 1..2090: note = Description of Artificial Sequence: Synthetic polypeptide
MPAAKRVKLDGGDKKYSIGLDIGTNSVGWAVITDEYKVPSKKFKVLGNTDRHSIKKNLIGALLFDSGETAEATRLKRTARRRYTRRKNRICYLQEIFSNEMAKVDDSFFHRLEESFLVEEDKKHERHPIFGNIVDEVAYHEKYPTIYHLRKKLVDSTDKADLRLIYLALAHMIKFRGHFLIEGDLNPDNSDVDKLFIQLVQTYNQLFEENPINASGVDAKAILSARLSKSRRLENLIAQLPGEKKNGLFGNLIALSLGLTPNFKSNFDLAEDAKLQLSKDTYDDDLDNLLAQIGDQYADLFLAAKNLSDAILLSDILRVNTEITKAPLSASMIKRYDEHHQDLTLLKALVRQQLPEKYKEIFFDQSKNGYAGYIDGGASQEEFYKFIKPILEKMDGTEELLVKLNREDLLRKQRTFDNGSIPHQIHLGELHAILRRQEDFYPFLKDNREKIEKILTFRIPYYVGPLARGNSRFAWMTRKSEETITPWNFEEVVDKGASAQSFIERMTNFDKNLPNEKVLPKHSLLYEYFTVYNELTKVKYVTEGMRKPAFLSGEQKKAIVDLLFKTNRKVTVKQLKEDYFKKIECFDSVEISGVEDRFNASLGTYHDLLKIIKDKDFLDNEENEDILEDIVLTLTLFEDREMIEERLKTYAHLFDDKVMKQLKRRRYTGWGRLSRKLINGIRDKQSGKTILDFLKSDGFANRNFMQLIHDDSLTFKEDIQKAQVSGQGDSLHEHIANLAGSPAIKKGILQTVKVVDELVKVMGRHKPENIVIEMARENQTTQKGQKNSRERMKRIEEGIKELGSQILKEHPVENTQLQNEKLYLYYLQNGRDMYVDQELDINRLSDYDVDHIVPQSFLKDDSIDNKVLTRSDKARGKSDNVPSEEVVKKMKNYWRQLLNAKLITQRKFDNLTKAERGGLSELDKAGFIKRQLVETRQITKHVAQILDSRMNTKYDENDKLIREVKVITLKSKLVSDFRKDFQFYKVREINNYHHAHDAYLNAVVGTALIKKYPKLESEFVYGDYKVYDVRKMIAKSEQEIGKATAKYFFYSNIMNFFKTEITLANGEIRKRPLIETNGETGEIVWDKGRDFATVRKVLSMPQVNIVKKTEVQTGGFSKESILPKRNSDKLIARKKDWDPKKYGGFDSPTVAYSVLVVAKVEKGKSKKLKSVKELLGITIMERSSFEKNPIDFLEAKGYKEVKKDLIIKLPKYSLFELENGRKRMLASAGELQKGNELALPSKYVNFLYLASHYEKLKGSPEDNEQKQLFVEQHKHYLDEIIEQISEFSKRVILADANLDKVLSAYNKHRDKPIREQAENIIHLFTLTNLGAPAAFKYFDTTIDRKRYTSTKEVLDATLIHQSITGLYETRIDLSQLGGDGGPAPAPGGTLGIEDEYRLHETSTEPDVSLGSTWLSDFPQAWAETGGMGLAVRQAPLIIPLKATSTPVSIQQYPMSHEARLGIKPHIQRLLDQGILVPCQSPWNTPLLPVKKPGTNDYRPVQDLREVNKRVEDIHPTVPNPYNLLSGLPPSHQWYTVLDLKDAFFCLRLHPTSQPLFAFEWRDPGMGISGQLTWTRLPQGFKNSPTLFNEALHRDLADFRIQHPDLILLQYVDDILLAATSELDCQQGTRALLQTLGDLGYRASAKKAQICQKQVKYLGYLLREGQRWLTEARKETVMGQPVPKTPRQLREFLGTAGFCRLWIPGFAEMAAPLYPLTKPGTLFSWGPDQQKAYQEIKQALLTAPALGLPDLTKPFELFVDEKQGYAKGVLTQKLGPWRRPVAYLSKKLDPVAAGWPPCLRMVAAIAVLTKDAGKLTMGQPLVILAPHAVEALVKQPPDRWLSNARMTHYQAMLLDTDRVQFGPVVALNPATLLPLPEEGAPHDCLEILAETHGTRPDLTDQPIPDADHTWYTDGSSFLQEGQRKAGAAVTTETEVIWAGALPAGTSAQRAELIALTQALKMAEGKRLNVYTDSRYAFATAHIHGEIYRRRGWLTSEGREIKNKSEILALLKALFLPKRLSIIHCLGHQKGDSAEARGNRLADQAAREAAIKTPPDTSTLLAGKRTADGSEFEKRTADGSEFESPKKKAKVE

SEQ ID NO: 2078 - protein, 2091 aa, synthetic construct
  source 1..2091: note = Description of Artificial Sequence: Synthetic polypeptide
MPAAKRVKLDGGDKKYSIGLDIGTNSVGWAVITDEYKVPSKKFKVLGNTDRHSIKKNLIGALLFDSGETAEATRLKRTARRRYTRRKNRICYLQEIFSNEMAKVDDSFFHRLEESFLVEEDKKHERHPIFGNIVDEVAYHEKYPTIYHLRKKLVDSTDKADLRLIYLALAHMIKFRGHFLIEGDLNPDNSDVDKLFIQLVQTYNQLFEENPINASGVDAKAILSARLSKSRRLENLIAQLPGEKKNGLFGNLIALSLGLTPNFKSNFDLAEDAKLQLSKDTYDDDLDNLLAQIGDQYADLFLAAKNLSDAILLSDILRVNTEITKAPLSASMIKRYDEHHQDLTLLKALVRQQLPEKYKEIFFDQSKNGYAGYIDGGASQEEFYKFIKPILEKMDGTEELLVKLNREDLLRKQRTFDNGSIPHQIHLGELHAILRRQEDFYPFLKDNREKIEKILTFRIPYYVGPLARGNSRFAWMTRKSEETITPWNFEEVVDKGASAQSFIERMTNFDKNLPNEKVLPKHSLLYEYFTVYNELTKVKYVTEGMRKPAFLSGEQKKAIVDLLFKTNRKVTVKQLKEDYFKKIECFDSVEISGVEDRFNASLGTYHDLLKIIKDKDFLDNEENEDILEDIVLTLTLFEDREMIEERLKTYAHLFDDKVMKQLKRRRYTGWGRLSRKLINGIRDKQSGKTILDFLKSDGFANRNFMQLIHDDSLTFKEDIQKAQVSGQGDSLHEHIANLAGSPAIKKGILQTVKVVDELVKVMGRHKPENIVIEMARENQTTQKGQKNSRERMKRIEEGIKELGSQILKEHPVENTQLQNEKLYLYYLQNGRDMYVDQELDINRLSDYDVDHIVPQSFLKDDSIDNKVLTRSDKARGKSDNVPSEEVVKKMKNYWRQLLNAKLITQRKFDNLTKAERGGLSELDKAGFIKRQLVETRQITKHVAQILDSRMNTKYDENDKLIREVKVITLKSKLVSDFRKDFQFYKVREINNYHHAHDAYLNAVVGTALIKKYPKLESEFVYGDYKVYDVRKMIAKSEQEIGKATAKYFFYSNIMNFFKTEITLANGEIRKRPLIETNGETGEIVWDKGRDFATVRKVLSMPQVNIVKKTEVQTGGFSKESILPKRNSDKLIARKKDWDPKKYGGFDSPTVAYSVLVVAKVEKGKSKKLKSVKELLGITIMERSSFEKNPIDFLEAKGYKEVKKDLIIKLPKYSLFELENGRKRMLASAGELQKGNELALPSKYVNFLYLASHYEKLKGSPEDNEQKQLFVEQHKHYLDEIIEQISEFSKRVILADANLDKVLSAYNKHRDKPIREQAENIIHLFTLTNLGAPAAFKYFDTTIDRKRYTSTKEVLDATLIHQSITGLYETRIDLSQLGGDGGPAPGGSGGTLGIEDEYRLHETSTEPDVSLGSTWLSDFPQAWAETGGMGLAVRQAPLIIPLKATSTPVSIQQYPMSHEARLGIKPHIQRLLDQGILVPCQSPWNTPLLPVKKPGTNDYRPVQDLREVNKRVEDIHPTVPNPYNLLSGLPPSHQWYTVLDLKDAFFCLRLHPTSQPLFAFEWRDPGMGISGQLTWTRLPQGFKNSPTLFNEALHRDLADFRIQHPDLILLQYVDDILLAATSELDCQQGTRALLQTLGDLGYRASAKKAQICQKQVKYLGYLLREGQRWLTEARKETVMGQPVPKTPRQLREFLGTAGFCRLWIPGFAEMAAPLYPLTKPGTLFSWGPDQQKAYQEIKQALLTAPALGLPDLTKPFELFVDEKQGYAKGVLTQKLGPWRRPVAYLSKKLDPVAAGWPPCLRMVAAIAVLTKDAGKLTMGQPLVILAPHAVEALVKQPPDRWLSNARMTHYQAMLLDTDRVQFGPVVALNPATLLPLPEEGAPHDCLEILAETHGTRPDLTDQPIPDADHTWYTDGSSFLQEGQRKAGAAVTTETEVIWAGALPAGTSAQRAELIALTQALKMAEGKRLNVYTDSRYAFATAHIHGEIYRRRGWLTSEGREIKNKSEILALLKALFLPKRLSIIHCLGHQKGDSAEARGNRLADQAAREAAIKTPPDTSTLLAGKRTADGSEFEKRTADGSEFESPKKKAKVE

SEQ ID NO: 2079 - protein, 2094 aa, synthetic construct
  source 1..2094: note = Description of Artificial Sequence: Synthetic polypeptide
MPAAKRVKLDGGDKKYSIGLDIGTNSVGWAVITDEYKVPSKKFKVLGNTDRHSIKKNLIGALLFDSGETAEATRLKRTARRRYTRRKNRICYLQEIFSNEMAKVDDSFFHRLEESFLVEEDKKHERHPIFGNIVDEVAYHEKYPTIYHLRKKLVDSTDKADLRLIYLALAHMIKFRGHFLIEGDLNPDNSDVDKLFIQLVQTYNQLFEENPINASGVDAKAILSARLSKSRRLENLIAQLPGEKKNGLFGNLIALSLGLTPNFKSNFDLAEDAKLQLSKDTYDDDLDNLLAQIGDQYADLFLAAKNLSDAILLSDILRVNTEITKAPLSASMIKRYDEHHQDLTLLKALVRQQLPEKYKEIFFDQSKNGYAGYIDGGASQEEFYKFIKPILEKMDGTEELLVKLNREDLLRKQRTFDNGSIPHQIHLGELHAILRRQEDFYPFLKDNREKIEKILTFRIPYYVGPLARGNSRFAWMTRKSEETITPWNFEEVVDKGASAQSFIERMTNFDKNLPNEKVLPKHSLLYEYFTVYNELTKVKYVTEGMRKPAFLSGEQKKAIVDLLFKTNRKVTVKQLKEDYFKKIECFDSVEISGVEDRFNASLGTYHDLLKIIKDKDFLDNEENEDILEDIVLTLTLFEDREMIEERLKTYAHLFDDKVMKQLKRRRYTGWGRLSRKLINGIRDKQSGKTILDFLKSDGFANRNFMQLIHDDSLTFKEDIQKAQVSGQGDSLHEHIANLAGSPAIKKGILQTVKVVDELVKVMGRHKPENIVIEMARENQTTQKGQKNSRERMKRIEEGIKELGSQILKEHPVENTQLQNEKLYLYYLQNGRDMYVDQELDINRLSDYDVDHIVPQSFLKDDSIDNKVLTRSDKARGKSDNVPSEEVVKKMKNYWRQLLNAKLITQRKFDNLTKAERGGLSELDKAGFIKRQLVETRQITKHVAQILDSRMNTKYDENDKLIREVKVITLKSKLVSDFRKDFQFYKVREINNYHHAHDAYLNAVVGTALIKKYPKLESEFVYGDYKVYDVRKMIAKSEQEIGKATAKYFFYSNIMNFFKTEITLANGEIRKRPLIETNGETGEIVWDKGRDFATVRKVLSMPQVNIVKKTEVQTGGFSKESILPKRNSDKLIARKKDWDPKKYGGFDSPTVAYSVLVVAKVEKGKSKKLKSVKELLGITIMERSSFEKNPIDFLEAKGYKEVKKDLIIKLPKYSLFELENGRKRMLASAGELQKGNELALPSKYVNFLYLASHYEKLKGSPEDNEQKQLFVEQHKHYLDEIIEQISEFSKRVILADANLDKVLSAYNKHRDKPIREQAENIIHLFTLTNLGAPAAFKYFDTTIDRKRYTSTKEVLDATLIHQSITGLYETRIDLSQLGGDGGPAPGSSGGGGGTLGIEDEYRLHETSTEPDVSLGSTWLSDFPQAWAETGGMGLAVRQAPLIIPLKATSTPVSIQQYPMSHEARLGIKPHIQRLLDQGILVPCQSPWNTPLLPVKKPGTNDYRPVQDLREVNKRVEDIHPTVPNPYNLLSGLPPSHQWYTVLDLKDAFFCLRLHPTSQPLFAFEWRDPGMGISGQLTWTRLPQGFKNSPTLFNEALHRDLADFRIQHPDLILLQYVDDILLAATSELDCQQGTRALLQTLGDLGYRASAKKAQICQKQVKYLGYLLREGQRWLTEARKETVMGQPVPKTPRQLREFLGTAGFCRLWIPGFAEMAAPLYPLTKPGTLFSWGPDQQKAYQEIKQALLTAPALGLPDLTKPFELFVDEKQGYAKGVLTQKLGPWRRPVAYLSKKLDPVAAGWPPCLRMVAAIAVLTKDAGKLTMGQPLVILAPHAVEALVKQPPDRWLSNARMTHYQAMLLDTDRVQFGPVVALNPATLLPLPEEGAPHDCLEILAETHGTRPDLTDQPIPDADHTWYTDGSSFLQEGQRKAGAAVTTETEVIWAGALPAGTSAQRAELIALTQALKMAEGKRLNVYTDSRYAFATAHIHGEIYRRRGWLTSEGREIKNKSEILALLKALFLPKRLSIIHCLGHQKGDSAEARGNRLADQAAREAAIKTPPDTSTLLAGKRTADGSEFEKRTADGSEFESPKKKAKVE

SEQ ID NO: 2080 - protein, 2094 aa, synthetic construct
  source 1..2094: note = Description of Artificial Sequence: Synthetic polypeptide
MPAAKRVKLDGGDKKYSIGLDIGTNSVGWAVITDEYKVPSKKFKVLGNTDRHSIKKNLIGALLFDSGETAEATRLKRTARRRYTRRKNRICYLQEIFSNEMAKVDDSFFHRLEESFLVEEDKKHERHPIFGNIVDEVAYHEKYPTIYHLRKKLVDSTDKADLRLIYLALAHMIKFRGHFLIEGDLNPDNSDVDKLFIQLVQTYNQLFEENPINASGVDAKAILSARLSKSRRLENLIAQLPGEKKNGLFGNLIALSLGLTPNFKSNFDLAEDAKLQLSKDTYDDDLDNLLAQIGDQYADLFLAAKNLSDAILLSDILRVNTEITKAPLSASMIKRYDEHHQDLTLLKALVRQQLPEKYKEIFFDQSKNGYAGYIDGGASQEEFYKFIKPILEKMDGTEELLVKLNREDLLRKQRTFDNGSIPHQIHLGELHAILRRQEDFYPFLKDNREKIEKILTFRIPYYVGPLARGNSRFAWMTRKSEETITPWNFEEVVDKGASAQSFIERMTNFDKNLPNEKVLPKHSLLYEYFTVYNELTKVKYVTEGMRKPAFLSGEQKKAIVDLLFKTNRKVTVKQLKEDYFKKIECFDSVEISGVEDRFNASLGTYHDLLKIIKDKDFLDNEENEDILEDIVLTLTLFEDREMIEERLKTYAHLFDDKVMKQLKRRRYTGWGRLSRKLINGIRDKQSGKTILDFLKSDGFANRNFMQLIHDDSLTFKEDIQKAQVSGQGDSLHEHIANLAGSPAIKKGILQTVKVVDELVKVMGRHKPENIVIEMARENQTTQKGQKNSRERMKRIEEGIKELGSQILKEHPVENTQLQNEKLYLYYLQNGRDMYVDQELDINRLSDYDVDHIVPQSFLKDDSIDNKVLTRSDKARGKSDNVPSEEVVKKMKNYWRQLLNAKLITQRKFDNLTKAERGGLSELDKAGFIKRQLVETRQITKHVAQILDSRMNTKYDENDKLIREVKVITLKSKLVSDFRKDFQFYKVREINNYHHAHDAYLNAVVGTALIKKYPKLESEFVYGDYKVYDVRKMIAKSEQEIGKATAKYFFYSNIMNFFKTEITLANGEIRKRPLIETNGETGEIVWDKGRDFATVRKVLSMPQVNIVKKTEVQTGGFSKESILPKRNSDKLIARKKDWDPKKYGGFDSPTVAYSVLVVAKVEKGKSKKLKSVKELLGITIMERSSFEKNPIDFLEAKGYKEVKKDLIIKLPKYSLFELENGRKRMLASAGELQKGNELALPSKYVNFLYLASHYEKLKGSPEDNEQKQLFVEQHKHYLDEIIEQISEFSKRVILADANLDKVLSAYNKHRDKPIREQAENIIHLFTLTNLGAPAAFKYFDTTIDRKRYTSTKEVLDATLIHQSITGLYETRIDLSQLGGDGGGSSPAPGGSGGTLGIEDEYRLHETSTEPDVSLGSTWLSDFPQAWAETGGMGLAVRQAPLIIPLKATSTPVSIQQYPMSHEARLGIKPHIQRLLDQGILVPCQSPWNTPLLPVKKPGTNDYRPVQDLREVNKRVEDIHPTVPNPYNLLSGLPPSHQWYTVLDLKDAFFCLRLHPTSQPLFAFEWRDPGMGISGQLTWTRLPQGFKNSPTLFNEALHRDLADFRIQHPDLILLQYVDDILLAATSELDCQQGTRALLQTLGDLGYRASAKKAQICQKQVKYLGYLLREGQRWLTEARKETVMGQPVPKTPRQLREFLGTAGFCRLWIPGFAEMAAPLYPLTKPGTLFSWGPDQQKAYQEIKQALLTAPALGLPDLTKPFELFVDEKQGYAKGVLTQKLGPWRRPVAYLSKKLDPVAAGWPPCLRMVAAIAVLTKDAGKLTMGQPLVILAPHAVEALVKQPPDRWLSNARMTHYQAMLLDTDRVQFGPVVALNPATLLPLPEEGAPHDCLEILAETHGTRPDLTDQPIPDADHTWYTDGSSFLQEGQRKAGAAVTTETEVIWAGALPAGTSAQRAELIALTQALKMAEGKRLNVYTDSRYAFATAHIHGEIYRRRGWLTSEGREIKNKSEILALLKALFLPKRLSIIHCLGHQKGDSAEARGNRLADQAAREAAIKTPPDTSTLLAGKRTADGSEFEKRTADGSEFESPKKKAKVE

SEQ ID NO: 2081 - protein, 2093 aa, synthetic construct
  source 1..2093: note = Description of Artificial Sequence: Synthetic polypeptide
MPAAKRVKLDGGDKKYSIGLDIGTNSVGWAVITDEYKVPSKKFKVLGNTDRHSIKKNLIGALLFDSGETAEATRLKRTARRRYTRRKNRICYLQEIFSNEMAKVDDSFFHRLEESFLVEEDKKHERHPIFGNIVDEVAYHEKYPTIYHLRKKLVDSTDKADLRLIYLALAHMIKFRGHFLIEGDLNPDNSDVDKLFIQLVQTYNQLFEENPINASGVDAKAILSARLSKSRRLENLIAQLPGEKKNGLFGNLIALSLGLTPNFKSNFDLAEDAKLQLSKDTYDDDLDNLLAQIGDQYADLFLAAKNLSDAILLSDILRVNTEITKAPLSASMIKRYDEHHQDLTLLKALVRQQLPEKYKEIFFDQSKNGYAGYIDGGASQEEFYKFIKPILEKMDGTEELLVKLNREDLLRKQRTFDNGSIPHQIHLGELHAILRRQEDFYPFLKDNREKIEKILTFRIPYYVGPLARGNSRFAWMTRKSEETITPWNFEEVVDKGASAQSFIERMTNFDKNLPNEKVLPKHSLLYEYFTVYNELTKVKYVTEGMRKPAFLSGEQKKAIVDLLFKTNRKVTVKQLKEDYFKKIECFDSVEISGVEDRFNASLGTYHDLLKIIKDKDFLDNEENEDILEDIVLTLTLFEDREMIEERLKTYAHLFDDKVMKQLKRRRYTGWGRLSRKLINGIRDKQSGKTILDFLKSDGFANRNFMQLIHDDSLTFKEDIQKAQVSGQGDSLHEHIANLAGSPAIKKGILQTVKVVDELVKVMGRHKPENIVIEMARENQTTQKGQKNSRERMKRIEEGIKELGSQILKEHPVENTQLQNEKLYLYYLQNGRDMYVDQELDINRLSDYDVDHIVPQSFLKDDSIDNKVLTRSDKARGKSDNVPSEEVVKKMKNYWRQLLNAKLITQRKFDNLTKAERGGLSELDKAGFIKRQLVETRQITKHVAQILDSRMNTKYDENDKLIREVKVITLKSKLVSDFRKDFQFYKVREINNYHHAHDAYLNAVVGTALIKKYPKLESEFVYGDYKVYDVRKMIAKSEQEIGKATAKYFFYSNIMNFFKTEITLANGEIRKRPLIETNGETGEIVWDKGRDFATVRKVLSMPQVNIVKKTEVQTGGFSKESILPKRNSDKLIARKKDWDPKKYGGFDSPTVAYSVLVVAKVEKGKSKKLKSVKELLGITIMERSSFEKNPIDFLEAKGYKEVKKDLIIKLPKYSLFELENGRKRMLASAGELQKGNELALPSKYVNFLYLASHYEKLKGSPEDNEQKQLFVEQHKHYLDEIIEQISEFSKRVILADANLDKVLSAYNKHRDKPIREQAENIIHLFTLTNLGAPAAFKYFDTTIDRKRYTSTKEVLDATLIHQSITGLYETRIDLSQLGGDGGEAAAKGGGGGTLGIEDEYRLHETSTEPDVSLGSTWLSDFPQAWAETGGMGLAVRQAPLIIPLKATSTPVSIQQYPMSHEARLGIKPHIQRLLDQGILVPCQSPWNTPLLPVKKPGTNDYRPVQDLREVNKRVEDIHPTVPNPYNLLSGLPPSHQWYTVLDLKDAFFCLRLHPTSQPLFAFEWRDPGMGISGQLTWTRLPQGFKNSPTLFNEALHRDLADFRIQHPDLILLQYVDDILLAATSELDCQQGTRALLQTLGDLGYRASAKKAQICQKQVKYLGYLLREGQRWLTEARKETVMGQPVPKTPRQLREFLGTAGFCRLWIPGFAEMAAPLYPLTKPGTLFSWGPDQQKAYQEIKQALLTAPALGLPDLTKPFELFVDEKQGYAKGVLTQKLGPWRRPVAYLSKKLDPVAAGWPPCLRMVAAIAVLTKDAGKLTMGQPLVILAPHAVEALVKQPPDRWLSNARMTHYQAMLLDTDRVQFGPVVALNPATLLPLPEEGAPHDCLEILAETHGTRPDLTDQPIPDADHTWYTDGSSFLQEGQRKAGAAVTTETEVIWAGALPAGTSAQRAELIALTQALKMAEGKRLNVYTDSRYAFATAHIHGEIYRRRGWLTSEGREIKNKSEILALLKALFLPKRLSIIHCLGHQKGDSAEARGNRLADQAAREAAIKTPPDTSTLLAGKRTADGSEFEKRTADGSEFESPKKKAKVE

SEQ ID NO: 2082 - protein, 2096 aa, synthetic construct
  source 1..2096: note = Description of Artificial Sequence: Synthetic polypeptide
MPAAKRVKLDGGDKKYSIGLDIGTNSVGWAVITDEYKVPSKKFKVLGNTDRHSIKKNLIGALLFDSGETAEATRLKRTARRRYTRRKNRICYLQEIFSNEMAKVDDSFFHRLEESFLVEEDKKHERHPIFGNIVDEVAYHEKYPTIYHLRKKLVDSTDKADLRLIYLALAHMIKFRGHFLIEGDLNPDNSDVDKLFIQLVQTYNQLFEENPINASGVDAKAILSARLSKSRRLENLIAQLPGEKKNGLFGNLIALSLGLTPNFKSNFDLAEDAKLQLSKDTYDDDLDNLLAQIGDQYADLFLAAKNLSDAILLSDILRVNTEITKAPLSASMIKRYDEHHQDLTLLKALVRQQLPEKYKEIFFDQSKNGYAGYIDGGASQEEFYKFIKPILEKMDGTEELLVKLNREDLLRKQRTFDNGSIPHQIHLGELHAILRRQEDFYPFLKDNREKIEKILTFRIPYYVGPLARGNSRFAWMTRKSEETITPWNFEEVVDKGASAQSFIERMTNFDKNLPNEKVLPKHSLLYEYFTVYNELTKVKYVTEGMRKPAFLSGEQKKAIVDLLFKTNRKVTVKQLKEDYFKKIECFDSVEISGVEDRFNASLGTYHDLLKIIKDKDFLDNEENEDILEDIVLTLTLFEDREMIEERLKTYAHLFDDKVMKQLKRRRYTGWGRLSRKLINGIRDKQSGKTILDFLKSDGFANRNFMQLIHDDSLTFKEDIQKAQVSGQGDSLHEHIANLAGSPAIKKGILQTVKVVDELVKVMGRHKPENIVIEMARENQTTQKGQKNSRERMKRIEEGIKELGSQILKEHPVENTQLQNEKLYLYYLQNGRDMYVDQELDINRLSDYDVDHIVPQSFLKDDSIDNKVLTRSDKARGKSDNVPSEEVVKKMKNYWRQLLNAKLITQRKFDNLTKAERGGLSELDKAGFIKRQLVETRQITKHVAQILDSRMNTKYDENDKLIREVKVITLKSKLVSDFRKDFQFYKVREINNYHHAHDAYLNAVVGTALIKKYPKLESEFVYGDYKVYDVRKMIAKSEQEIGKATAKYFFYSNIMNFFKTEITLANGEIRKRPLIETNGETGEIVWDKGRDFATVRKVLSMPQVNIVKKTEVQTGGFSKESILPKRNSDKLIARKKDWDPKKYGGFDSPTVAYSVLVVAKVEKGKSKKLKSVKELLGITIMERSSFEKNPIDFLEAKGYKEVKKDLIIKLPKYSLFELENGRKRMLASAGELQKGNELALPSKYVNFLYLASHYEKLKGSPEDNEQKQLFVEQHKHYLDEIIEQISEFSKRVILADANLDKVLSAYNKHRDKPIREQAENIIHLFTLTNLGAPAAFKYFDTTIDRKRYTSTKEVLDATLIHQSITGLYETRIDLSQLGGDGGGGGGGSEAAAKGGTLGIEDEYRLHETSTEPDVSLGSTWLSDFPQAWAETGGMGLAVRQAPLIIPLKATSTPVSIQQYPMSHEARLGIKPHIQRLLDQGILVPCQSPWNTPLLPVKKPGTNDYRPVQDLREVNKRVEDIHPTVPNPYNLLSGLPPSHQWYTVLDLKDAFFCLRLHPTSQPLFAFEWRDPGMGISGQLTWTRLPQGFKNSPTLFNEALHRDLADFRIQHPDLILLQYVDDILLAATSELDCQQGTRALLQTLGDLGYRASAKKAQICQKQVKYLGYLLREGQRWLTEARKETVMGQPVPKTPRQLREFLGTAGFCRLWIPGFAEMAAPLYPLTKPGTLFSWGPDQQKAYQEIKQALLTAPALGLPDLTKPFELFVDEKQGYAKGVLTQKLGPWRRPVAYLSKKLDPVAAGWPPCLRMVAAIAVLTKDAGKLTMGQPLVILAPHAVEALVKQPPDRWLSNARMTHYQAMLLDTDRVQFGPVVALNPATLLPLPEEGAPHDCLEILAETHGTRPDLTDQPIPDADHTWYTDGSSFLQEGQRKAGAAVTTETEVIWAGALPAGTSAQRAELIALTQALKMAEGKRLNVYTDSRYAFATAHIHGEIYRRRGWLTSEGREIKNKSEILALLKALFLPKRLSIIHCLGHQKGDSAEARGNRLADQAAREAAIKTPPDTSTLLAGKRTADGSEFEKRTADGSEFESPKKKAKVE

SEQ ID NO: 2083 - protein, 2091 aa, synthetic construct
  source 1..2091: note = Description of Artificial Sequence: Synthetic polypeptide
MPAAKRVKLDGGDKKYSIGLDIGTNSVGWAVITDEYKVPSKKFKVLGNTDRHSIKKNLIGALLFDSGETAEATRLKRTARRRYTRRKNRICYLQEIFSNEMAKVDDSFFHRLEESFLVEEDKKHERHPIFGNIVDEVAYHEKYPTIYHLRKKLVDSTDKADLRLIYLALAHMIKFRGHFLIEGDLNPDNSDVDKLFIQLVQTYNQLFEENPINASGVDAKAILSARLSKSRRLENLIAQLPGEKKNGLFGNLIALSLGLTPNFKSNFDLAEDAKLQLSKDTYDDDLDNLLAQIGDQYADLFLAAKNLSDAILLSDILRVNTEITKAPLSASMIKRYDEHHQDLTLLKALVRQQLPEKYKEIFFDQSKNGYAGYIDGGASQEEFYKFIKPILEKMDGTEELLVKLNREDLLRKQRTFDNGSIPHQIHLGELHAILRRQEDFYPFLKDNREKIEKILTFRIPYYVGPLARGNSRFAWMTRKSEETITPWNFEEVVDKGASAQSFIERMTNFDKNLPNEKVLPKHSLLYEYFTVYNELTKVKYVTEGMRKPAFLSGEQKKAIVDLLFKTNRKVTVKQLKEDYFKKIECFDSVEISGVEDRFNASLGTYHDLLKIIKDKDFLDNEENEDILEDIVLTLTLFEDREMIEERLKTYAHLFDDKVMKQLKRRRYTGWGRLSRKLINGIRDKQSGKTILDFLKSDGFANRNFMQLIHDDSLTFKEDIQKAQVSGQGDSLHEHIANLAGSPAIKKGILQTVKVVDELVKVMGRHKPENIVIEMARENQTTQKGQKNSRERMKRIEEGIKELGSQILKEHPVENTQLQNEKLYLYYLQNGRDMYVDQELDINRLSDYDVDHIVPQSFLKDDSIDNKVLTRSDKARGKSDNVPSEEVVKKMKNYWRQLLNAKLITQRKFDNLTKAERGGLSELDKAGFIKRQLVETRQITKHVAQILDSRMNTKYDENDKLIREVKVITLKSKLVSDFRKDFQFYKVREINNYHHAHDAYLNAVVGTALIKKYPKLESEFVYGDYKVYDVRKMIAKSEQEIGKATAKYFFYSNIMNFFKTEITLANGEIRKRPLIETNGETGEIVWDKGRDFATVRKVLSMPQVNIVKKTEVQTGGFSKESILPKRNSDKLIARKKDWDPKKYGGFDSPTVAYSVLVVAKVEKGKSKKLKSVKELLGITIMERSSFEKNPIDFLEAKGYKEVKKDLIIKLPKYSLFELENGRKRMLASAGELQKGNELALPSKYVNFLYLASHYEKLKGSPEDNEQKQLFVEQHKHYLDEIIEQISEFSKRVILADANLDKVLSAYNKHRDKPIREQAENIIHLFTLTNLGAPAAFKYFDTTIDRKRYTSTKEVLDATLIHQSITGLYETRIDLSQLGGDGGGGSPAPGGTLGIEDEYRLHETSTEPDVSLGSTWLSDFPQAWAETGGMGLAVRQAPLIIPLKATSTPVSIQQYPMSHEARLGIKPHIQRLLDQGILVPCQSPWNTPLLPVKKPGTNDYRPVQDLREVNKRVEDIHPTVPNPYNLLSGLPPSHQWYTVLDLKDAFFCLRLHPTSQPLFAFEWRDPGMGISGQLTWTRLPQGFKNSPTLFNEALHRDLADFRIQHPDLILLQYVDDILLAATSELDCQQGTRALLQTLGDLGYRASAKKAQICQKQVKYLGYLLREGQRWLTEARKETVMGQPVPKTPRQLREFLGTAGFCRLWIPGFAEMAAPLYPLTKPGTLFSWGPDQQKAYQEIKQALLTAPALGLPDLTKPFELFVDEKQGYAKGVLTQKLGPWRRPVAYLSKKLDPVAAGWPPCLRMVAAIAVLTKDAGKLTMGQPLVILAPHAVEALVKQPPDRWLSNARMTHYQAMLLDTDRVQFGPVVALNPATLLPLPEEGAPHDCLEILAETHGTRPDLTDQPIPDADHTWYTDGSSFLQEGQRKAGAAVTTETEVIWAGALPAGTSAQRAELIALTQALKMAEGKRLNVYTDSRYAFATAHIHGEIYRRRGWLTSEGREIKNKSEILALLKALFLPKRLSIIHCLGHQKGDSAEARGNRLADQAAREAAIKTPPDTSTLLAGKRTADGSEFEKRTADGSEFESPKKKAKVE

SEQ ID NO: 2084 - protein, 2110 aa, synthetic construct
  source 1..2110: note = Description of Artificial Sequence: Synthetic polypeptide
MPAAKRVKLDGGDKKYSIGLDIGTNSVGWAVITDEYKVPSKKFKVLGNTDRHSIKKNLIGALLFDSGETAEATRLKRTARRRYTRRKNRICYLQEIFSNEMAKVDDSFFHRLEESFLVEEDKKHERHPIFGNIVDEVAYHEKYPTIYHLRKKLVDSTDKADLRLIYLALAHMIKFRGHFLIEGDLNPDNSDVDKLFIQLVQTYNQLFEENPINASGVDAKAILSARLSKSRRLENLIAQLPGEKKNGLFGNLIALSLGLTPNFKSNFDLAEDAKLQLSKDTYDDDLDNLLAQIGDQYADLFLAAKNLSDAILLSDILRVNTEITKAPLSASMIKRYDEHHQDLTLLKALVRQQLPEKYKEIFFDQSKNGYAGYIDGGASQEEFYKFIKPILEKMDGTEELLVKLNREDLLRKQRTFDNGSIPHQIHLGELHAILRRQEDFYPFLKDNREKIEKILTFRIPYYVGPLARGNSRFAWMTRKSEETITPWNFEEVVDKGASAQSFIERMTNFDKNLPNEKVLPKHSLLYEYFTVYNELTKVKYVTEGMRKPAFLSGEQKKAIVDLLFKTNRKVTVKQLKEDYFKKIECFDSVEISGVEDRFNASLGTYHDLLKIIKDKDFLDNEENEDILEDIVLTLTLFEDREMIEERLKTYAHLFDDKVMKQLKRRRYTGWGRLSRKLINGIRDKQSGKTILDFLKSDGFANRNFMQLIHDDSLTFKEDIQKAQVSGQGDSLHEHIANLAGSPAIKKGILQTVKVVDELVKVMGRHKPENIVIEMARENQTTQKGQKNSRERMKRIEEGIKELGSQILKEHPVENTQLQNEKLYLYYLQNGRDMYVDQELDINRLSDYDVDHIVPQSFLKDDSIDNKVLTRSDKARGKSDNVPSEEVVKKMKNYWRQLLNAKLITQRKFDNLTKAERGGLSELDKAGFIKRQLVETRQITKHVAQILDSRMNTKYDENDKLIREVKVITLKSKLVSDFRKDFQFYKVREINNYHHAHDAYLNAVVGTALIKKYPKLESEFVYGDYKVYDVRKMIAKSEQEIGKATAKYFFYSNIMNFFKTEITLANGEIRKRPLIETNGETGEIVWDKGRDFATVRKVLSMPQVNIVKKTEVQTGGFSKESILPKRNSDKLIARKKDWDPKKYGGFDSPTVAYSVLVVAKVEKGKSKKLKSVKELLGITIMERSSFEKNPIDFLEAKGYKEVKKDLIIKLPKYSLFELENGRKRMLASAGELQKGNELALPSKYVNFLYLASHYEKLKGSPEDNEQKQLFVEQHKHYLDEIIEQISEFSKRVILADANLDKVLSAYNKHRDKPIREQAENIIHLFTLTNLGAPAAFKYFDTTIDRKRYTSTKEVLDATLIHQSITGLYETRIDLSQLGGDGGGGGGSGGGGSGGGGSGGGGSGGGGSGGLGIEDEYRLHETSTEPDVSLGSTWLSDFPQAWAETGGMGLAVRQAPLIIPLKATSTPVSIQQYPMSHEARLGIKPHIQRLLDQGILVPCQSPWNTPLLPVKKPGTNDYRPVQDLREVNKRVEDIHPTVPNPYNLLSGLPPSHQWYTVLDLKDAFFCLRLHPTSQPLFAFEWRDPGMGISGQLTWTRLPQGFKNSPTLFNEALHRDLADFRIQHPDLILLQYVDDILLAATSELDCQQGTRALLQTLGDLGYRASAKKAQICQKQVKYLGYLLREGQRWLTEARKETVMGQPVPKTPRQLREFLGKAGFCRLFIPGFAEMAAPLYPLTKPGTLFSWGPDQQKAYQEIKQALLTAPALGLPDLTKPFELFVDEKQGYAKGVLTQKLGPWRRPVAYLSKKLDPVAAGWPPCLRMVAAIAVLTKDAGKLTMGQPLVILAPHAVEALVKQPPDRWLSNARMTHYQAMLLDTDRVQFGPVVALNPATLLPLPEEGAPHDCLEILAETHGTRPDLTDQPIPDADHTWYTDGSSFLQEGQRKAGAAVTTETEVIWAGALPAGTSAQRAELIALTQALKMAEGKRLNVYTDSRYAFATAHIHGEIYRRRGWLTSEGREIKNKSEILALLKALFLPKRLSIIHCLGHQKGDSAEARGNRLADQAAREAAIKTPPDTSTLLIAGKRTADGSEFEKRTADGSEFESPKKKAKVE

SEQ ID NO: 2085 - protein, 2105 aa, synthetic construct
  source 1..2105: note = Description of Artificial Sequence: Synthetic polypeptide
MPAAKRVKLDGGDKKYSIGLDIGTNSVGWAVITDEYKVPSKKFKVLGNTDRHSIKKNLIGALLFDSGETAEATRLKRTARRRYTRRKNRICYLQEIFSNEMAKVDDSFFHRLEESFLVEEDKKHERHPIFGNIVDEVAYHEKYPTIYHLRKKLVDSTDKADLRLIYLALAHMIKFRGHFLIEGDLNPDNSDVDKLFIQLVQTYNQLFEENPINASGVDAKAILSARLSKSRRLENLIAQLPGEKKNGLFGNLIALSLGLTPNFKSNFDLAEDAKLQLSKDTYDDDLDNLLAQIGDQYADLFLAAKNLSDAILLSDILRVNTEITKAPLSASMIKRYDEHHQDLTLLKALVRQQLPEKYKEIFFDQSKNGYAGYIDGGASQEEFYKFIKPILEKMDGTEELLVKLNREDLLRKQRTFDNGSIPHQIHLGELHAILRRQEDFYPFLKDNREKIEKILTFRIPYYVGPLARGNSRFAWMTRKSEETITPWNFEEVVDKGASAQSFIERMTNFDKNLPNEKVLPKHSLLYEYFTVYNELTKVKYVTEGMRKPAFLSGEQKKAIVDLLFKTNRKVTVKQLKEDYFKKIECFDSVEISGVEDRFNASLGTYHDLLKIIKDKDFLDNEENEDILEDIVLTLTLFEDREMIEERLKTYAHLFDDKVMKQLKRRRYTGWGRLSRKLINGIRDKQSGKTILDFLKSDGFANRNFMQLIHDDSLTFKEDIQKAQVSGQGDSLHEHIANLAGSPAIKKGILQTVKVVDELVKVMGRHKPENIVIEMARENQTTQKGQKNSRERMKRIEEGIKELGSQILKEHPVENTQLQNEKLYLYYLQNGRDMYVDQELDINRLSDYDVDHIVPQSFLKDDSIDNKVLTRSDKARGKSDNVPSEEVVKKMKNYWRQLLNAKLITQRKFDNLTKAERGGLSELDKAGFIKRQLVETRQITKHVAQILDSRMNTKYDENDKLIREVKVITLKSKLVSDFRKDFQFYKVREINNYHHAHDAYLNAVVGTALIKKYPKLESEFVYGDYKVYDVRKMIAKSEQEIGKATAKYFFYSNIMNFFKTEITLANGEIRKRPLIETNGETGEIVWDKGRDFATVRKVLSMPQVNIVKKTEVQTGGFSKESILPKRNSDKLIARKKDWDPKKYGGFDSPTVAYSVLVVAKVEKGKSKKLKSVKELLGITIMERSSFEKNPIDFLEAKGYKEVKKDLIIKLPKYSLFELENGRKRMLASAGELQKGNELALPSKYVNFLYLASHYEKLKGSPEDNEQKQLFVEQHKHYLDEIIEQISEFSKRVILADANLDKVLSAYNKHRDKPIREQAENIIHLFTLTNLGAPAAFKYFDTTIDRKRYTSTKEVLDATLIHQSITGLYETRIDLSQLGGDGGGGGGSGGGGSGGGGSGGGGSGGLGIEDEYRLHETSTEPDVSLGSTWLSDFPQAWAETGGMGLAVRQAPLIIPLKATSTPVSIQQYPMSHEARLGIKPHIQRLLDQGILVPCQSPWNTPLLPVKKPGTNDYRPVQDLREVNKRVEDIHPTVPNPYNLLSGLPPSHQWYTVLDLKDAFFCLRLHPTSQPLFAFEWRDPGMGISGQLTWTRLPQGFKNSPTLFNEALHRDLADFRIQHPDLILLQYVDDILLAATSELDCQQGTRALLQTLGDLGYRASAKKAQICQKQVKYLGYLLREGQRWLTEARKETVMGQPVPKTPRQLREFLGKAGFCRLFIPGFAEMAAPLYPLTKPGTLFSWGPDQQKAYQEIKQALLTAPALGLPDLTKPFELFVDEKQGYAKGVLTQKLGPWRRPVAYLSKKLDPVAAGWPPCLRMVAAIAVLTKDAGKLTMGQPLVILAPHAVEALVKQPPDRWLSNARMTHYQAMLLDTDRVQFGPVVALNPATLLPLPEEGAPHDCLEILAETHGTRPDLTDQPIPDADHTWYTDGSSFLQEGQRKAGAAVTTETEVIWAGALPAGTSAQRAELIALTQALKMAEGKRLNVYTDSRYAFATAHIHGEIYRRRGWLTSEGREIKNKSEILALLKALFLPKRLSIIHCLGHQKGDSAEARGNRLADQAAREAAIKTPPDTSTLLIAGKRTADGSEFEKRTADGSEFESPKKKAKVE

SEQ ID NO: 2086 - protein, 2110 aa, synthetic construct
  source 1..2110: note = Description of Artificial Sequence: Synthetic polypeptide
MPAAKRVKLDGGDKKYSIGLDIGTNSVGWAVITDEYKVPSKKFKVLGNTDRHSIKKNLIGALLFDSGETAEATRLKRTARRRYTRRKNRICYLQEIFSNEMAKVDDSFFHRLEESFLVEEDKKHERHPIFGNIVDEVAYHEKYPTIYHLRKKLVDSTDKADLRLIYLALAHMIKFRGHFLIEGDLNPDNSDVDKLFIQLVQTYNQLFEENPINASGVDAKAILSARLSKSRRLENLIAQLPGEKKNGLFGNLIALSLGLTPNFKSNFDLAEDAKLQLSKDTYDDDLDNLLAQIGDQYADLFLAAKNLSDAILLSDILRVNTEITKAPLSASMIKRYDEHHQDLTLLKALVRQQLPEKYKEIFFDQSKNGYAGYIDGGASQEEFYKFIKPILEKMDGTEELLVKLNREDLLRKQRTFDNGSIPHQIHLGELHAILRRQEDFYPFLKDNREKIEKILTFRIPYYVGPLARGNSRFAWMTRKSEETITPWNFEEVVDKGASAQSFIERMTNFDKNLPNEKVLPKHSLLYEYFTVYNELTKVKYVTEGMRKPAFLSGEQKKAIVDLLFKTNRKVTVKQLKEDYFKKIECFDSVEISGVEDRFNASLGTYHDLLKIIKDKDFLDNEENEDILEDIVLTLTLFEDREMIEERLKTYAHLFDDKVMKQLKRRRYTGWGRLSRKLINGIRDKQSGKTILDFLKSDGFANRNFMQLIHDDSLTFKEDIQKAQVSGQGDSLHEHIANLAGSPAIKKGILQTVKVVDELVKVMGRHKPENIVIEMARENQTTQKGQKNSRERMKRIEEGIKELGSQILKEHPVENTQLQNEKLYLYYLQNGRDMYVDQELDINRLSDYDVDHIVPQSFLKDDSIDNKVLTRSDKARGKSDNVPSEEVVKKMKNYWRQLLNAKLITQRKFDNLTKAERGGLSELDKAGFIKRQLVETRQITKHVAQILDSRMNTKYDENDKLIREVKVITLKSKLVSDFRKDFQFYKVREINNYHHAHDAYLNAVVGTALIKKYPKLESEFVYGDYKVYDVRKMIAKSEQEIGKATAKYFFYSNIMNFFKTEITLANGEIRKRPLIETNGETGEIVWDKGRDFATVRKVLSMPQVNIVKKTEVQTGGFSKESILPKRNSDKLIARKKDWDPKKYGGFDSPTVAYSVLVVAKVEKGKSKKLKSVKELLGITIMERSSFEKNPIDFLEAKGYKEVKKDLIIKLPKYSLFELENGRKRMLASAGELQKGNELALPSKYVNFLYLASHYEKLKGSPEDNEQKQLFVEQHKHYLDEIIEQISEFSKRVILADANLDKVLSAYNKHRDKPIREQAENIIHLFTLTNLGAPAAFKYFDTTIDRKRYTSTKEVLDATLIHQSITGLYETRIDLSQLGGDGGEAAAKEAAAKEAAAKEAAAKEAAAKGGLGIEDEYRLHETSTEPDVSLGSTWLSDFPQAWAETGGMGLAVRQAPLIIPLKATSTPVSIQQYPMSHEARLGIKPHIQRLLDQGILVPCQSPWNTPLLPVKKPGTNDYRPVQDLREVNKRVEDIHPTVPNPYNLLSGLPPSHQWYTVLDLKDAFFCLRLHPTSQPLFAFEWRDPGMGISGQLTWTRLPQGFKNSPTLFNEALHRDLADFRIQHPDLILLQYVDDILLAATSELDCQQGTRALLQTLGDLGYRASAKKAQICQKQVKYLGYLLREGQRWLTEARKETVMGQPVPKTPRQLREFLGKAGFCRLFIPGFAEMAAPLYPLTKPGTLFSWGPDQQKAYQEIKQALLTAPALGLPDLTKPFELFVDEKQGYAKGVLTQKLGPWRRPVAYLSKKLDPVAAGWPPCLRMVAAIAVLTKDAGKLTMGQPLVILAPHAVEALVKQPPDRWLSNARMTHYQAMLLDTDRVQFGPVVALNPATLLPLPEEGAPHDCLEILAETHGTRPDLTDQPIPDADHTWYTDGSSFLQEGQRKAGAAVTTETEVIWAGALPAGTSAQRAELIALTQALKMAEGKRLNVYTDSRYAFATAHIHGEIYRRRGWLTSEGREIKNKSEILALLKALFLPKRLSIIHCLGHQKGDSAEARGNRLADQAAREAAIKTPPDTSTLLIAGKRTADGSEFEKRTADGSEFESPKKKAKVE

SEQ ID NO: 2087 - protein, 2098 aa, synthetic construct
  source 1..2098: note = Description of Artificial Sequence: Synthetic polypeptide
MPAAKRVKLDGGDKKYSIGLDIGTNSVGWAVITDEYKVPSKKFKVLGNTDRHSIKKNLIGALLFDSGETAEATRLKRTARRRYTRRKNRICYLQEIFSNEMAKVDDSFFHRLEESFLVEEDKKHERHPIFGNIVDEVAYHEKYPTIYHLRKKLVDSTDKADLRLIYLALAHMIKFRGHFLIEGDLNPDNSDVDKLFIQLVQTYNQLFEENPINASGVDAKAILSARLSKSRRLENLIAQLPGEKKNGLFGNLIALSLGLTPNFKSNFDLAEDAKLQLSKDTYDDDLDNLLAQIGDQYADLFLAAKNLSDAILLSDILRVNTEITKAPLSASMIKRYDEHHQDLTLLKALVRQQLPEKYKEIFFDQSKNGYAGYIDGGASQEEFYKFIKPILEKMDGTEELLVKLNREDLLRKQRTFDNGSIPHQIHLGELHAILRRQEDFYPFLKDNREKIEKILTFRIPYYVGPLARGNSRFAWMTRKSEETITPWNFEEVVDKGASAQSFIERMTNFDKNLPNEKVLPKHSLLYEYFTVYNELTKVKYVTEGMRKPAFLSGEQKKAIVDLLFKTNRKVTVKQLKEDYFKKIECFDSVEISGVEDRFNASLGTYHDLLKIIKDKDFLDNEENEDILEDIVLTLTLFEDREMIEERLKTYAHLFDDKVMKQLKRRRYTGWGRLSRKLINGIRDKQSGKTILDFLKSDGFANRNFMQLIHDDSLTFKEDIQKAQVSGQGDSLHEHIANLAGSPAIKKGILQTVKVVDELVKVMGRHKPENIVIEMARENQTTQKGQKNSRERMKRIEEGIKELGSQILKEHPVENTQLQNEKLYLYYLQNGRDMYVDQELDINRLSDYDVDHIVPQSFLKDDSIDNKVLTRSDKARGKSDNVPSEEVVKKMKNYWRQLLNAKLITQRKFDNLTKAERGGLSELDKAGFIKRQLVETRQITKHVAQILDSRMNTKYDENDKLIREVKVITLKSKLVSDFRKDFQFYKVREINNYHHAHDAYLNAVVGTALIKKYPKLESEFVYGDYKVYDVRKMIAKSEQEIGKATAKYFFYSNIMNFFKTEITLANGEIRKRPLIETNGETGEIVWDKGRDFATVRKVLSMPQVNIVKKTEVQTGGFSKESILPKRNSDKLIARKKDWDPKKYGGFDSPTVAYSVLVVAKVEKGKSKKLKSVKELLGITIMERSSFEKNPIDFLEAKGYKEVKKDLIIKLPKYSLFELENGRKRMLASAGELQKGNELALPSKYVNFLYLASHYEKLKGSPEDNEQKQLFVEQHKHYLDEIIEQISEFSKRVILADANLDKVLSAYNKHRDKPIREQAENIIHLFTLTNLGAPAAFKYFDTTIDRKRYTSTKEVLDATLIHQSITGLYETRIDLSQLGGDGGPAPAPAPAPAPAPGGLGIEDEYRLHETSTEPDVSLGSTWLSDFPQAWAETGGMGLAVRQAPLIIPLKATSTPVSIQQYPMSHEARLGIKPHIQRLLDQGILVPCQSPWNTPLLPVKKPGTNDYRPVQDLREVNKRVEDIHPTVPNPYNLLSGLPPSHQWYTVLDLKDAFFCLRLHPTSQPLFAFEWRDPGMGISGQLTWTRLPQGFKNSPTLFNEALHRDLADFRIQHPDLILLQYVDDILLAATSELDCQQGTRALLQTLGDLGYRASAKKAQICQKQVKYLGYLLREGQRWLTEARKETVMGQPVPKTPRQLREFLGKAGFCRLFIPGFAEMAAPLYPLTKPGTLFSWGPDQQKAYQEIKQALLTAPALGLPDLTKPFELFVDEKQGYAKGVLTQKLGPWRRPVAYLSKKLDPVAAGWPPCLRMVAAIAVLTKDAGKLTMGQPLVILAPHAVEALVKQPPDRWLSNARMTHYQAMLLDTDRVQFGPVVALNPATLLPLPEEGAPHDCLEILAETHGTRPDLTDQPIPDADHTWYTDGSSFLQEGQRKAGAAVTTETEVIWAGALPAGTSAQRAELIALTQALKMAEGKRLNVYTDSRYAFATAHIHGEIYRRRGWLTSEGREIKNKSEILALLKALFLPKRLSIIHCLGHQKGDSAEARGNRLADQAAREAAIKTPPDTSTLLIAGKRTADGSEFEKRTADGSEFESPKKKAKVE

SEQ ID NO: 2088 - protein, 2131 aa, synthetic construct
  source 1..2131: note = Description of Artificial Sequence: Synthetic polypeptide
MPAAKRVKLDGGDKKYSIGLDIGTNSVGWAVITDEYKVPSKKFKVLGNTDRHSIKKNLIGALLFDSGETAEATRLKRTARRRYTRRKNRICYLQEIFSNEMAKVDDSFFHRLEESFLVEEDKKHERHPIFGNIVDEVAYHEKYPTIYHLRKKLVDSTDKADLRLIYLALAHMIKFRGHFLIEGDLNPDNSDVDKLFIQLVQTYNQLFEENPINASGVDAKAILSARLSKSRRLENLIAQLPGEKKNGLFGNLIALSLGLTPNFKSNFDLAEDAKLQLSKDTYDDDLDNLLAQIGDQYADLFLAAKNLSDAILLSDILRVNTEITKAPLSASMIKRYDEHHQDLTLLKALVRQQLPEKYKEIFFDQSKNGYAGYIDGGASQEEFYKFIKPILEKMDGTEELLVKLNREDLLRKQRTFDNGSIPHQIHLGELHAILRRQEDFYPFLKDNREKIEKILTFRIPYYVGPLARGNSRFAWMTRKSEETITPWNFEEVVDKGASAQSFIERMTNFDKNLPNEKVLPKHSLLYEYFTVYNELTKVKYVTEGMRKPAFLSGEQKKAIVDLLFKTNRKVTVKQLKEDYFKKIECFDSVEISGVEDRFNASLGTYHDLLKIIKDKDFLDNEENEDILEDIVLTLTLFEDREMIEERLKTYAHLFDDKVMKQLKRRRYTGWGRLSRKLINGIRDKQSGKTILDFLKSDGFANRNFMQLIHDDSLTFKEDIQKAQVSGQGDSLHEHIANLAGSPAIKKGILQTVKVVDELVKVMGRHKPENIVIEMARENQTTQKGQKNSRERMKRIEEGIKELGSQILKEHPVENTQLQNEKLYLYYLQNGRDMYVDQELDINRLSDYDVDHIVPQSFLKDDSIDNKVLTRSDKARGKSDNVPSEEVVKKMKNYWRQLLNAKLITQRKFDNLTKAERGGLSELDKAGFIKRQLVETRQITKHVAQILDSRMNTKYDENDKLIREVKVITLKSKLVSDFRKDFQFYKVREINNYHHAHDAYLNAVVGTALIKKYPKLESEFVYGDYKVYDVRKMIAKSEQEIGKATAKYFFYSNIMNFFKTEITLANGEIRKRPLIETNGETGEIVWDKGRDFATVRKVLSMPQVNIVKKTEVQTGGFSKESILPKRNSDKLIARKKDWDPKKYGGFDSPTVAYSVLVVAKVEKGKSKKLKSVKELLGITIMERSSFEKNPIDFLEAKGYKEVKKDLIIKLPKYSLFELENGRKRMLASAGELQKGNELALPSKYVNFLYLASHYEKLKGSPEDNEQKQLFVEQHKHYLDEIIEQISEFSKRVILADANLDKVLSAYNKHRDKPIREQAENIIHLFTLTNLGAPAAFKYFDTTIDRKRYTSTKEVLDATLIHQSITGLYETRIDLSQLGGDGGAEAAAKEAAAKEAAAKEAAAKALEAEAAAKEAAAKEAAAKEAAAKAGGLGIEDEYRLHETSTEPDVSLGSTWLSDFPQAWAETGGMGLAVRQAPLIIPLKATSTPVSIQQYPMSHEARLGIKPHIQRLLDQGILVPCQSPWNTPLLPVKKPGTNDYRPVQDLREVNKRVEDIHPTVPNPYNLLSGLPPSHQWYTVLDLKDAFFCLRLHPTSQPLFAFEWRDPGMGISGQLTWTRLPQGFKNSPTLFNEALHRDLADFRIQHPDLILLQYVDDILLAATSELDCQQGTRALLQTLGDLGYRASAKKAQICQKQVKYLGYLLREGQRWLTEARKETVMGQPVPKTPRQLREFLGKAGFCRLFIPGFAEMAAPLYPLTKPGTLFSWGPDQQKAYQEIKQALLTAPALGLPDLTKPFELFVDEKQGYAKGVLTQKLGPWRRPVAYLSKKLDPVAAGWPPCLRMVAAIAVLTKDAGKLTMGQPLVILAPHAVEALVKQPPDRWLSNARMTHYQAMLLDTDRVQFGPVVALNPATLLPLPEEGAPHDCLEILAETHGTRPDLTDQPIPDADHTWYTDGSSFLQEGQRKAGAAVTTETEVIWAGALPAGTSAQRAELIALTQALKMAEGKRLNVYTDSRYAFATAHIHGEIYRRRGWLTSEGREIKNKSEILALLKALFLPKRLSIIHCLGHQKGDSAEARGNRLADQAAREAAIKTPPDTSTLLIAGKRTADGSEFEKRTADGSEFESPKKKAKVE

SEQ ID NO: 2089 - protein, 2096 aa, synthetic construct; identical to SEQ ID NO: 2050
  source 1..2096: note = Description of Artificial Sequence: Synthetic polypeptide

SEQ ID NO: 2090 - protein, 2100 aa, synthetic construct; identical to SEQ ID NO: 2049
  source 1..2100: note = Description of Artificial Sequence: Synthetic polypeptide

SEQ ID NO: 2091 - protein, 2094 aa, synthetic construct
  source 1..2094: note = Description of Artificial Sequence: Synthetic polypeptide
MPAAKRVKLDGGDKKYSIGLDIGTNSVGWAVITDEYKVPSKKFKVLGNTDRHSIKKNLIGALLFDSGETAEATRLKRTARRRYTRRKNRICYLQEIFSNEMAKVDDSFFHRLEESFLVEEDKKHERHPIFGNIVDEVAYHEKYPTIYHLRKKLVDSTDKADLRLIYLALAHMIKFRGHFLIEGDLNPDNSDVDKLFIQLVQTYNQLFEENPINASGVDAKAILSARLSKSRRLENLIAQLPGEKKNGLFGNLIALSLGLTPNFKSNFDLAEDAKLQLSKDTYDDDLDNLLAQIGDQYADLFLAAKNLSDAILLSDILRVNTEITKAPLSASMIKRYDEHHQDLTLLKALVRQQLPEKYKEIFFDQSKNGYAGYIDGGASQEEFYKFIKPILEKMDGTEELLVKLNREDLLRKQRTFDNGSIPHQIHLGELHAILRRQEDFYPFLKDNREKIEKILTFRIPYYVGPLARGNSRFAWMTRKSEETITPWNFEEVVDKGASAQSFIERMTNFDKNLPNEKVLPKHSLLYEYFTVYNELTKVKYVTEGMRKPAFLSGEQKKAIVDLLFKTNRKVTVKQLKEDYFKKIECFDSVEISGVEDRFNASLGTYHDLLKIIKDKDFLDNEENEDILEDIVLTLTLFEDREMIEERLKTYAHLFDDKVMKQLKRRRYTGWGRLSRKLINGIRDKQSGKTILDFLKSDGFANRNFMQLIHDDSLTFKEDIQKAQVSGQGDSLHEHIANLAGSPAIKKGILQTVKVVDELVKVMGRHKPENIVIEMARENQTTQKGQKNSRERMKRIEEGIKELGSQILKEHPVENTQLQNEKLYLYYLQNGRDMYVDQELDINRLSDYDVDHIVPQSFLKDDSIDNKVLTRSDKARGKSDNVPSEEVVKKMKNYWRQLLNAKLITQRKFDNLTKAERGGLSELDKAGFIKRQLVETRQITKHVAQILDSRMNTKYDENDKLIREVKVITLKSKLVSDFRKDFQFYKVREINNYHHAHDAYLNAVVGTALIKKYPKLESEFVYGDYKVYDVRKMIAKSEQEIGKATAKYFFYSNIMNFFKTEITLANGEIRKRPLIETNGETGEIVWDKGRDFATVRKVLSMPQVNIVKKTEVQTGGFSKESILPKRNSDKLIARKKDWDPKKYGGFDSPTVAYSVLVVAKVEKGKSKKLKSVKELLGITIMERSSFEKNPIDFLEAKGYKEVKKDLIIKLPKYSLFELENGRKRMLASAGELQKGNELALPSKYVNFLYLASHYEKLKGSPEDNEQKQLFVEQHKHYLDEIIEQISEFSKRVILADANLDKVLSAYNKHRDKPIREQAENIIHLFTLTNLGAPAAFKYFDTTIDRKRYTSTKEVLDATLIHQSITGLYETRIDLSQLGGDGGPAPGSSGGGGGLGIEDEYRLHETSTEPDVSLGSTWLSDFPQAWAETGGMGLAVRQAPLIIPLKATSTPVSIQQYPMSHEARLGIKPHIQRLLDQGILVPCQSPWNTPLLPVKKPGTNDYRPVQDLREVNKRVEDIHPTVPNPYNLLSGLPPSHQWYTVLDLKDAFFCLRLHPTSQPLFAFEWRDPGMGISGQLTWTRLPQGFKNSPTLFNEALHRDLADFRIQHPDLILLQYVDDILLAATSELDCQQGTRALLQTLGDLGYRASAKKAQICQKQVKYLGYLLREGQRWLTEARKETVMGQPVPKTPRQLREFLGKAGFCRLFIPGFAEMAAPLYPLTKPGTLFSWGPDQQKAYQEIKQALLTAPALGLPDLTKPFELFVDEKQGYAKGVLTQKLGPWRRPVAYLSKKLDPVAAGWPPCLRMVAAIAVLTKDAGKLTMGQPLVILAPHAVEALVKQPPDRWLSNARMTHYQAMLLDTDRVQFGPVVALNPATLLPLPEEGAPHDCLEILAETHGTRPDLTDQPIPDADHTWYTDGSSFLQEGQRKAGAAVTTETEVIWAGALPAGTSAQRAELIALTQALKMAEGKRLNVYTDSRYAFATAHIHGEIYRRRGWLTSEGREIKNKSEILALLKALFLPKRLSIIHCLGHQKGDSAEARGNRLADQAAREAAIKTPPDTSTLLIAGKRTADGSEFEKRTADGSEFESPKKKAKVE

SEQ ID NO: 2092 - protein, 2105 aa, synthetic construct
  source 1..2105: note = Description of Artificial Sequence: Synthetic polypeptide
MPAAKRVKLDGGDKKYSIGLDIGTNSVGWAVITDEYKVPSKKFKVLGNTDRHSIKKNLIGALLFDSGETAEATRLKRTARRRYTRRKNRICYLQEIFSNEMAKVDDSFFHRLEESFLVEEDKKHERHPIFGNIVDEVAYHEKYPTIYHLRKKLVDSTDKADLRLIYLALAHMIKFRGHFLIEGDLNPDNSDVDKLFIQLVQTYNQLFEENPINASGVDAKAILSARLSKSRRLENLIAQLPGEKKNGLFGNLIALSLGLTPNFKSNFDLAEDAKLQLSKDTYDDDLDNLLAQIGDQYADLFLAAKNLSDAILLSDILRVNTEITKAPLSASMIKRYDEHHQDLTLLKALVRQQLPEKYKEIFFDQSKNGYAGYIDGGASQEEFYKFIKPILEKMDGTEELLVKLNREDLLRKQRTFDNGSIPHQIHLGELHAILRRQEDFYPFLKDNREKIEKILTFRIPYYVGPLARGNSRFAWMTRKSEETITPWNFEEVVDKGASAQSFIERMTNFDKNLPNEKVLPKHSLLYEYFTVYNELTKVKYVTEGMRKPAFLSGEQKKAIVDLLFKTNRKVTVKQLKEDYFKKIECFDSVEISGVEDRFNASLGTYHDLLKIIKDKDFLDNEENEDILEDIVLTLTLFEDREMIEERLKTYAHLFDDKVMKQLKRRRYTGWGRLSRKLINGIRDKQSGKTILDFLKSDGFANRNFMQLIHDDSLTFKEDIQKAQVSGQGDSLHEHIANLAGSPAIKKGILQTVKVVDELVKVMGRHKPENIVIEMARENQTTQKGQKNSRERMKRIEEGIKELGSQILKEHPVENTQLQNEKLYLYYLQNGRDMYVDQELDINRLSDYDVDHIVPQSFLKDDSIDNKVLTRSDKARGKSDNVPSEEVVKKMKNYWRQLLNAKLITQRKFDNLTKAERGGLSELDKAGFIKRQLVETRQITKHVAQILDSRMNTKYDENDKLIREVKVITLKSKLVSDFRKDFQFYKVREINNYHHAHDAYLNAVVGTALIKKYPKLESEFVYGDYKVYDVRKMIAKSEQEIGKATAKYFFYSNIMNFFKTEITLANGEIRKRPLIETNGETGEIVWDKGRDFATVRKVLSMPQVNIVKKTEVQTGGFSKESILPKRNSDKLIARKKDWDPKKYGGFDSPTVAYSVLVVAKVEKGKSKKLKSVKELLGITIMERSSFEKNPIDFLEAKGYKEVKKDLIIKLPKYSLFELENGRKRMLASAGELQKGNELALPSKYVNFLYLASHYEKLKGSPEDNEQKQLFVEQHKHYLDEIIEQISEFSKRVILADANLDKVLSAYNKHRDKPIREQAENIIHLFTLTNLGAPAAFKYFDTTIDRKRYTSTKEVLDATLIHQSITGLYETRIDLSQLGGDGGEAAAKEAAAKEAAAKEAAAKGGLGIEDEYRLHETSTEPDVSLGSTWLSDFPQAWAETGGMGLAVRQAPLIIPLKATSTPVSIQQYPMSHEARLGIKPHIQRLLDQGILVPCQSPWNTPLLPVKKPGTNDYRPVQDLREVNKRVEDIHPTVPNPYNLLSGLPPSHQWYTVLDLKDAFFCLRLHPTSQPLFAFEWRDPGMGISGQLTWTRLPQGFKNSPTLFNEALHRDLADFRIQHPDLILLQYVDDILLAATSELDCQQGTRALLQTLGDLGYRASAKKAQICQKQVKYLGYLLREGQRWLTEARKETVMGQPVPKTPRQLREFLGKAGFCRLFIPGFAEMAAPLYPLTKPGTLFSWGPDQQKAYQEIKQALLTAPALGLPDLTKPFELFVDEKQGYAKGVLTQKLGPWRRPVAYLSKKLDPVAAGWPPCLRMVAAIAVLTKDAGKLTMGQPLVILAPHAVEALVKQPPDRWLSNARMTHYQAMLLDTDRVQFGPVVALNPATLLPLPEEGAPHDCLEILAETHGTRPDLTDQPIPDADHTWYTDGSSFLQEGQRKAGAAVTTETEVIWAGALPAGTSAQRAELIALTQALKMAEGKRLNVYTDSRYAFATAHIHGEIYRRRGWLTSEGREIKNKSEILALLKALFLPKRLSIIHCLGHQKGDSAEARGNRLADQAAREAAIKTPPDTSTLLIAGKRTADGSEFEKRTADGSEFESPKKKAKVE

SEQ ID NO: 2093 - protein, 2096 aa, synthetic construct; identical to SEQ ID NO: 2048
  source 1..2096: note = Description of Artificial Sequence: Synthetic polypeptide

SEQ ID NO: 2094 - protein, 2115 aa, synthetic construct
  source 1..2115: note = Description of Artificial Sequence: Synthetic polypeptide
MPAAKRVKLDGGDKKYSIGLDIGTNSVGWAVITDEYKVPSKKFKVLGNTDRHSIKKNLIGALLFDSGETAEATRLKRTARRRYTRRKNRICYLQEIFSNEMAKVDDSFFHRLEESFLVEEDKKHERHPIFGNIVDEVAYHEKYPTIYHLRKKLVDSTDKADLRLIYLALAHMIKFRGHFLIEGDLNPDNSDVDKLFIQLVQTYNQLFEENPINASGVDAKAILSARLSKSRRLENLIAQLPGEKKNGLFGNLIALSLGLTPNFKSNFDLAEDAKLQLSKDTYDDDLDNLLAQIGDQYADLFLAAKNLSDAILLSDILRVNTEITKAPLSASMIKRYDEHHQDLTLLKALVRQQLPEKYKEIFFDQSKNGYAGYIDGGASQEEFYKFIKPILEKMDGTEELLVKLNREDLLRKQRTFDNGSIPHQIHLGELHAILRRQEDFYPFLKDNREKIEKILTFRIPYYVGPLARGNSRFAWMTRKSEETITPWNFEEVVDKGASAQSFIERMTNFDKNLPNEKVLPKHSLLYEYFTVYNELTKVKYVTEGMRKPAFLSGEQKKAIVDLLFKTNRKVTVKQLKEDYFKKIECFDSVEISGVEDRFNASLGTYHDLLKIIKDKDFLDNEENEDILEDIVLTLTLFEDREMIEERLKTYAHLFDDKVMKQLKRRRYTGWGRLSRKLINGIRDKQSGKTILDFLKSDGFANRNFMQLIHDDSLTFKEDIQKAQVSGQGDSLHEHIANLAGSPAIKKGILQTVKVVDELVKVMGRHKPENIVIEMARENQTTQKGQKNSRERMKRIEEGIKELGSQILKEHPVENTQLQNEKLYLYYLQNGRDMYVDQELDINRLSDYDVDHIVPQSFLKDDSIDNKVLTRSDKARGKSDNVPSEEVVKKMKNYWRQLLNAKLITQRKFDNLTKAERGGLSELDKAGFIKRQLVETRQITKHVAQILDSRMNTKYDENDKLIREVKVITLKSKLVSDFRKDFQFYKVREINNYHHAHDAYLNAVVGTALIKKYPKLESEFVYGDYKVYDVRKMIAKSEQEIGKATAKYFFYSNIMNFFKTEITLANGEIRKRPLIETNGETGEIVWDKGRDFATVRKVLSMPQVNIVKKTEVQTGGFSKESILPKRNSDKLIARKKDWDPKKYGGFDSPTVAYSVLVVAKVEKGKSKKLKSVKELLGITIMERSSFEKNPIDFLEAKGYKEVKKDLIIKLPKYSLFELENGRKRMLASAGELQKGNELALPSKYVNFLYLASHYEKLKGSPEDNEQKQLFVEQHKHYLDEIIEQISEFSKRVILADANLDKVLSAYNKHRDKPIREQAENIIHLFTLTNLGAPAAFKYFDTTIDRKRYTSTKEVLDATLIHQSITGLYETRIDLSQLGGDGGGGGGSGGGGSGGGGSGGGGSGGGGSGGGGSGGLGIEDEYRLHETSTEPDVSLGSTWLSDFPQAWAETGGMGLAVRQAPLIIPLKATSTPVSIQQYPMSHEARLGIKPHIQRLLDQGILVPCQSPWNTPLLPVKKPGTNDYRPVQDLREVNKRVEDIHPTVPNPYNLLSGLPPSHQWYTVLDLKDAFFCLRLHPTSQPLFAFEWRDPGMGISGQLTWTRLPQGFKNSPTLFNEALHRDLADFRIQHPDLILLQYVDDILLAATSELDCQQGTRALLQTLGDLGYRASAKKAQICQKQVKYLGYLLREGQRWLTEARKETVMGQPVPKTPRQLREFLGKAGFCRLFIPGFAEMAAPLYPLTKPGTLFSWGPDQQKAYQEIKQALLTAPALGLPDLTKPFELFVDEKQGYAKGVLTQKLGPWRRPVAYLSKKLDPVAAGWPPCLRMVAAIAVLTKDAGKLTMGQPLVILAPHAVEALVKQPPDRWLSNARMTHYQAMLLDTDRVQFGPVVALNPATLLPLPEEGAPHDCLEILAETHGTRPDLTDQPIPDADHTWYTDGSSFLQEGQRKAGAAVTTETEVIWAGALPAGTSAQRAELIALTQALKMAEGKRLNVYTDSRYAFATAHIHGEIYRRRGWLTSEGREIKNKSEILALLKALFLPKRLSIIHCLGHQKGDSAEARGNRLADQAAREAAIKTPPDTSTLLIAGKRTADGSEFEKRTADGSEFESPKKKAKVE

SEQ ID NO: 2095 - protein, 2096 aa, synthetic construct
  source 1..2096: note = Description of Artificial Sequence: Synthetic polypeptide
MPAAKRVKLDGGDKKYSIGLDIGTNSVGWAVITDEYKVPSKKFKVLGNTDRHSIKKNLIGALLFDSGETAEATRLKRTARRRYTRRKNRICYLQEIFSNEMAKVDDSFFHRLEESFLVEEDKKHERHPIFGNIVDEVAYHEKYPTIYHLRKKLVDSTDKADLRLIYLALAHMIKFRGHFLIEGDLNPDNSDVDKLFIQLVQTYNQLFEENPINASGVDAKAILSARLSKSRRLENLIAQLPGEKKNGLFGNLIALSLGLTPNFKSNFDLAEDAKLQLSKDTYDDDLDNLLAQIGDQYADLFLAAKNLSDAILLSDILRVNTEITKAPLSASMIKRYDEHHQDLTLLKALVRQQLPEKYKEIFFDQSKNGYAGYIDGGASQEEFYKFIKPILEKMDGTEELLVKLNREDLLRKQRTFDNGSIPHQIHLGELHAILRRQEDFYPFLKDNREKIEKILTFRIPYYVGPLARGNSRFAWMTRKSEETITPWNFEEVVDKGASAQSFIERMTNFDKNLPNEKVLPKHSLLYEYFTVYNELTKVKYVTEGMRKPAFLSGEQKKAIVDLLFKTNRKVTVKQLKEDYFKKIECFDSVEISGVEDRFNASLGTYHDLLKIIKDKDFLDNEENEDILEDIVLTLTLFEDREMIEERLKTYAHLFDDKVMKQLKRRRYTGWGRLSRKLINGIRDKQSGKTILDFLKSDGFANRNFMQLIHDDSLTFKEDIQKAQVSGQGDSLHEHIANLAGSPAIKKGILQTVKVVDELVKVMGRHKPENIVIEMARENQTTQKGQKNSRERMKRIEEGIKELGSQILKEHPVENTQLQNEKLYLYYLQNGRDMYVDQELDINRLSDYDVDHIVPQSFLKDDSIDNKVLTRSDKARGKSDNVPSEEVVKKMKNYWRQLLNAKLITQRKFDNLTKAERGGLSELDKAGFIKRQLVETRQITKHVAQILDSRMNTKYDENDKLIREVKVITLKSKLVSDFRKDFQFYKVREINNYHHAHDAYLNAVVGTALIKKYPKLESEFVYGDYKVYDVRKMIAKSEQEIGKATAKYFFYSNIMNFFKTEITLANGEIRKRPLIETNGETGEIVWDKGRDFATVRKVLSMPQVNIVKKTEVQTGGFSKESILPKRNSDKLIARKKDWDPKKYGGFDSPTVAYSVLVVAKVEKGKSKKLKSVKELLGITIMERSSFEKNPIDFLEAKGYKEVKKDLIIKLPKYSLFELENGRKRMLASAGELQKGNELALPSKYVNFLYLASHYEKLKGSPEDNEQKQLFVEQHKHYLDEIIEQISEFSKRVILADANLDKVLSAYNKHRDKPIREQAENIIHLFTLTNLGAPAAFKYFDTTIDRKRYTSTKEVLDATLIHQSITGLYETRIDLSQLGGDGGPAPEAAAKGSSGGLGIEDEYRLHETSTEPDVSLGSTWLSDFPQAWAETGGMGLAVRQAPLIIPLKATSTPVSIQQYPMSHEARLGIKPHIQRLLDQGILVPCQSPWNTPLLPVKKPGTNDYRPVQDLREVNKRVEDIHPTVPNPYNLLSGLPPSHQWYTVLDLKDAFFCLRLHPTSQPLFAFEWRDPGMGISGQLTWTRLPQGFKNSPTLFNEALHRDLADFRIQHPDLILLQYVDDILLAATSELDCQQGTRALLQTLGDLGYRASAKKAQICQKQVKYLGYLLREGQRWLTEARKETVMGQPVPKTPRQLREFLGKAGFCRLFIPGFAEMAAPLYPLTKPGTLFSWGPDQQKAYQEIKQALLTAPALGLPDLTKPFELFVDEKQGYAKGVLTQKLGPWRRPVAYLSKKLDPVAAGWPPCLRMVAAIAVLTKDAGKLTMGQPLVILAPHAVEALVKQPPDRWLSNARMTHYQAMLLDTDRVQFGPVVALNPATLLPLPEEGAPHDCLEILAETHGTRPDLTDQPIPDADHTWYTDGSSFLQEGQRKAGAAVTTETEVIWAGALPAGTSAQRAELIALTQALKMAEGKRLNVYTDSRYAFATAHIHGEIYRRRGWLTSEGREIKNKSEILALLKALFLPKRLSIIHCLGHQKGDSAEARGNRLADQAAREAAIKTPPDTSTLLIAGKRTADGSEFEKRTADGSEFESPKKKAKVE

SEQ ID NO: 2096 - protein, 2090 aa, synthetic construct
  source 1..2090: note = Description of Artificial Sequence: Synthetic polypeptide
MPAAKRVKLDGGDKKYSIGLDIGTNSVGWAVITDEYKVPSKKFKVLGNTDRHSIKKNLIGALLFDSGETAEATRLKRTARRRYTRRKNRICYLQEIFSNEMAKVDDSFFHRLEESFLVEEDKKHERHPIFGNIVDEVAYHEKYPTIYHLRKKLVDSTDKADLRLIYLALAHMIKFRGHFLIEGDLNPDNSDVDKLFIQLVQTYNQLFEENPINASGVDAKAILSARLSKSRRLENLIAQLPGEKKNGLFGNLIALSLGLTPNFKSNFDLAEDAKLQLSKDTYDDDLDNLLAQIGDQYADLFLAAKNLSDAILLSDILRVNTEITKAPLSASMIKRYDEHHQDLTLLKALVRQQLPEKYKEIFFDQSKNGYAGYIDGGASQEEFYKFIKPILEKMDGTEELLVKLNREDLLRKQRTFDNGSIPHQIHLGELHAILRRQEDFYPFLKDNREKIEKILTFRIPYYVGPLARGNSRFAWMTRKSEETITPWNFEEVVDKGASAQSFIERMTNFDKNLPNEKVLPKHSLLYEYFTVYNELTKVKYVTEGMRKPAFLSGEQKKAIVDLLFKTNRKVTVKQLKEDYFKKIECFDSVEISGVEDRFNASLGTYHDLLKIIKDKDFLDNEENEDILEDIVLTLTLFEDREMIEERLKTYAHLFDDKVMKQLKRRRYTGWGRLSRKLINGIRDKQSGKTILDFLKSDGFANRNFMQLIHDDSLTFKEDIQKAQVSGQGDSLHEHIANLAGSPAIKKGILQTVKVVDELVKVMGRHKPENIVIEMARENQTTQKGQKNSRERMKRIEEGIKELGSQILKEHPVENTQLQNEKLYLYYLQNGRDMYVDQELDINRLSDYDVDHIVPQSFLKDDSIDNKVLTRSDKARGKSDNVPSEEVVKKMKNYWRQLLNAKLITQRKFDNLTKAERGGLSELDKAGFIKRQLVETRQITKHVAQILDSRMNTKYDENDKLIREVKVITLKSKLVSDFRKDFQFYKVREINNYHHAHDAYLNAVVGTALIKKYPKLESEFVYGDYKVYDVRKMIAKSEQEIGKATAKYFFYSNIMNFFKTEITLANGEIRKRPLIETNGETGEIVWDKGRDFATVRKVLSMPQVNIVKKTEVQTGGFSKESILPKRNSDKLIARKKDWDPKKYGGFDSPTVAYSVLVVAKVEKGKSKKLKSVKELLGITIMERSSFEKNPIDFLEAKGYKEVKKDLIIKLPKYSLFELENGRKRMLASAGELQKGNELALPSKYVNFLYLASHYEKLKGSPEDNEQKQLFVEQHKHYLDEIIEQISEFSKRVILADANLDKVLSAYNKHRDKPIREQAENIIHLFTLTNLGAPAAFKYFDTTIDRKRYTSTKEVLDATLIHQSITGLYETRIDLSQLGGDGGEAAAKGGLGIEDEYRLHETSTEPDVSLGSTWLSDFPQAWAETGGMGLAVRQAPLIIPLKATSTPVSIQQYPMSHEARLGIKPHIQRLLDQGILVPCQSPWNTPLLPVKKPGTNDYRPVQDLREVNKRVEDIHPTVPNPYNLLSGLPPSHQWYTVLDLKDAFFCLRLHPTSQPLFAFEWRDPGMGISGQLTWTRLPQGFKNSPTLFNEALHRDLADFRIQHPDLILLQYVDDILLAATSELDCQQGTRALLQTLGDLGYRASAKKAQICQKQVKYLGYLLREGQRWLTEARKETVMGQPVPKTPRQLREFLGKAGFCRLFIPGFAEMAAPLYPLTKPGTLFSWGPDQQKAYQEIKQALLTAPALGLPDLTKPFELFVDEKQGYAKGVLTQKLGPWRRPVAYLSKKLDPVAAGWPPCLRMVAAIAVLTKDAGKLTMGQPLVILAPHAVEALVKQPPDRWLSNARMTHYQAMLLDTDRVQFGPVVALNPATLLPLPEEGAPHDCLEILAETHGTRPDLTDQPIPDADHTWYTDGSSFLQEGQRKAGAAVTTETEVIWAGALPAGTSAQRAELIALTQALKMAEGKRLNVYTDSRYAFATAHIHGEIYRRRGWLTSEGREIKNKSEILALLKALFLPKRLSIIHCLGHQKGDSAEARGNRLADQAAREAAIKTPPDTSTLLIAGKRTADGSEFEKRTADGSEFESPKKKAKVE

SEQ ID NO: 2097 - protein, 2096 aa, synthetic construct
  source 1..2096: note = Description of Artificial Sequence: Synthetic polypeptide
MPAAKRVKLDGGDKKYSIGLDIGTNSVGWAVITDEYKVPSKKFKVLGNTDRHSIKKNLIGALLFDSGETAEATRLKRTARRRYTRRKNRICYLQEIFSNEMAKVDDSFFHRLEESFLVEEDKKHERHPIFGNIVDEVAYHEKYPTIYHLRKKLVDSTDKADLRLIYLALAHMIKFRGHFLIEGDLNPDNSDVDKLFIQLVQTYNQLFEENPINASGVDAKAILSARLSKSRRLENLIAQLPGEKKNGLFGNLIALSLGLTPNFKSNFDLAEDAKLQLSKDTYDDDLDNLLAQIGDQYADLFLAAKNLSDAILLSDILRVNTEITKAPLSASMIKRYDEHHQDLTLLKALVRQQLPEKYKEIFFDQSKNGYAGYIDGGASQEEFYKFIKPILEKMDGTEELLVKLNREDLLRKQRTFDNGSIPHQIHLGELHAILRRQEDFYPFLKDNREKIEKILTFRIPYYVGPLARGNSRFAWMTRKSEETITPWNFEEVVDKGASAQSFIERMTNFDKNLPNEKVLPKHSLLYEYFTVYNELTKVKYVTEGMRKPAFLSGEQKKAIVDLLFKTNRKVTVKQLKEDYFKKIECFDSVEISGVEDRFNASLGTYHDLLKIIKDKDFLDNEENEDILEDIVLTLTLFEDREMIEERLKTYAHLFDDKVMKQLKRRRYTGWGRLSRKLINGIRDKQSGKTILDFLKSDGFANRNFMQLIHDDSLTFKEDIQKAQVSGQGDSLHEHIANLAGSPAIKKGILQTVKVVDELVKVMGRHKPENIVIEMARENQTTQKGQKNSRERMKRIEEGIKELGSQILKEHPVENTQLQNEKLYLYYLQNGRDMYVDQELDINRLSDYDVDHIVPQSFLKDDSIDNKVLTRSDKARGKSDNVPSEEVVKKMKNYWRQLLNAKLITQRKFDNLTKAERGGLSELDKAGFIKRQLVETRQITKHVAQILDSRMNTKYDENDKLIREVKVITLKSKLVSDFRKDFQFYKVREINNYHHAHDAYLNAVVGTALIKKYPKLESEFVYGDYKVYDVRKMIAKSEQEIGKATAKYFFYSNIMNFFKTEITLANGEIRKRPLIETNGETGEIVWDKGRDFATVRKVLSMPQVNIVKKTEVQTGGFSKESILPKRNSDKLIARKKDWDPKKYGGFDSPTVAYSVLVVAKVEKGKSKKLKSVKELLGITIMERSSFEKNPIDFLEAKGYKEVKKDLIIKLPKYSLFELENGRKRMLASAGELQKGNELALPSKYVNFLYLASHYEKLKGSPEDNEQKQLFVEQHKHYLDEIIEQISEFSKRVILADANLDKVLSAYNKHRDKPIREQAENIIHLFTLTNLGAPAAFKYFDTTIDRKRYTSTKEVLDATLIHQSITGLYETRIDLSQLGGDGGPAPEAAAKGGSGGLGIEDEYRLHETSTEPDVSLGSTWLSDFPQAWAETGGMGLAVRQAPLIIPLKATSTPVSIQQYPMSHEARLGIKPHIQRLLDQGILVPCQSPWNTPLLPVKKPGTNDYRPVQDLREVNKRVEDIHPTVPNPYNLLSGLPPSHQWYTVLDLKDAFFCLRLHPTSQPLFAFEWRDPGMGISGQLTWTRLPQGFKNSPTLFNEALHRDLADFRIQHPDLILLQYVDDILLAATSELDCQQGTRALLQTLGDLGYRASAKKAQICQKQVKYLGYLLREGQRWLTEARKETVMGQPVPKTPRQLREFLGKAGFCRLFIPGFAEMAAPLYPLTKPGTLFSWGPDQQKAYQEIKQALLTAPALGLPDLTKPFELFVDEKQGYAKGVLTQKLGPWRRPVAYLSKKLDPVAAGWPPCLRMVAAIAVLTKDAGKLTMGQPLVILAPHAVEALVKQPPDRWLSNARMTHYQAMLLDTDRVQFGPVVALNPATLLPLPEEGAPHDCLEILAETHGTRPDLTDQPIPDADHTWYTDGSSFLQEGQRKAGAAVTTETEVIWAGALPAGTSAQRAELIALTQALKMAEGKRLNVYTDSRYAFATAHIHGEIYRRRGWLTSEGREIKNKSEILALLKALFLPKRLSIIHCLGHQKGDSAEARGNRLADQAAREAAIKTPPDTSTLLIAGKRTADGSEFEKRTADGSEFESPKKKAKVE

SEQ ID NO: 2098 - protein, 2115 aa, synthetic construct
  source 1..2115: note = Description of Artificial Sequence: Synthetic polypeptide
MPAAKRVKLDGGDKKYSIGLDIGTNSVGWAVITDEYKVPSKKFKVLGNTDRHSIKKNLIGALLFDSGETAEATRLKRTARRRYTRRKNRICYLQEIFSNEMAKVDDSFFHRLEESFLVEEDKKHERHPIFGNIVDEVAYHEKYPTIYHLRKKLVDSTDKADLRLIYLALAHMIKFRGHFLIEGDLNPDNSDVDKLFIQLVQTYNQLFEENPINASGVDAKAILSARLSKSRRLENLIAQLPGEKKNGLFGNLIALSLGLTPNFKSNFDLAEDAKLQLSKDTYDDDLDNLLAQIGDQYADLFLAAKNLSDAILLSDILRVNTEITKAPLSASMIKRYDEHHQDLTLLKALVRQQLPEKYKEIFFDQSKNGYAGYIDGGASQEEFYKFIKPILEKMDGTEELLVKLNREDLLRKQRTFDNGSIPHQIHLGELHAILRRQEDFYPFLKDNREKIEKILTFRIPYYVGPLARGNSRFAWMTRKSEETITPWNFEEVVDKGASAQSFIERMTNFDKNLPNEKVLPKHSLLYEYFTVYNELTKVKYVTEGMRKPAFLSGEQKKAIVDLLFKTNRKVTVKQLKEDYFKKIECFDSVEISGVEDRFNASLGTYHDLLKIIKDKDFLDNEENEDILEDIVLTLTLFEDREMIEERLKTYAHLFDDKVMKQLKRRRYTGWGRLSRKLINGIRDKQSGKTILDFLKSDGFANRNFMQLIHDDSLTFKEDIQKAQVSGQGDSLHEHIANLAGSPAIKKGILQTVKVVDELVKVMGRHKPENIVIEMARENQTTQKGQKNSRERMKRIEEGIKELGSQILKEHPVENTQLQNEKLYLYYLQNGRDMYVDQELDINRLSDYDVDHIVPQSFLKDDSIDNKVLTRSDKARGKSDNVPSEEVVKKMKNYWRQLLNAKLITQRKFDNLTKAERGGLSELDKAGFIKRQLVETRQITKHVAQILDSRMNTKYDENDKLIREVKVITLKSKLVSDFRKDFQFYKVREINNYHHAHDAYLNAVVGTALIKKYPKLESEFVYGDYKVYDVRKMIAKSEQEIGKATAKYFFYSNIMNFFKTEITLANGEIRKRPLIETNGETGEIVWDKGRDFATVRKVLSMPQVNIVKKTEVQTGGFSKESILPKRNSDKLIARKKDWDPKKYGGFDSPTVAYSVLVVAKVEKGKSKKLKSVKELLGITIMERSSFEKNPIDFLEAKGYKEVKKDLIIKLPKYSLFELENGRKRMLASAGELQKGNELALPSKYVNFLYLASHYEKLKGSPEDNEQKQLFVEQHKHYLDEIIEQISEFSKRVILADANLDKVLSAYNKHRDKPIREQAENIIHLFTLTNLGAPAAFKYFDTTIDRKRYTSTKEVLDATLIHQSITGLYETRIDLSQLGGDGGEAAAKEAAAKEAAAKEAAAKEAAAKEAAAKGGLGIEDEYRLHETSTEPDVSLGSTWLSDFPQAWAETGGMGLAVRQAPLIIPLKATSTPVSIQQYPMSHEARLGIKPHIQRLLDQGILVPCQSPWNTPLLPVKKPGTNDYRPVQDLREVNKRVEDIHPTVPNPYNLLSGLPPSHQWYTVLDLKDAFFCLRLHPTSQPLFAFEWRDPGMGISGQLTWTRLPQGFKNSPTLFNEALHRDLADFRIQHPDLILLQYVDDILLAATSELDCQQGTRALLQTLGDLGYRASAKKAQICQKQVKYLGYLLREGQRWLTEARKETVMGQPVPKTPRQLREFLGKAGFCRLFIPGFAEMAAPLYPLTKPGTLFSWGPDQQKAYQEIKQALLTAPALGLPDLTKPFELFVDEKQGYAKGVLTQKLGPWRRPVAYLSKKLDPVAAGWPPCLRMVAAIAVLTKDAGKLTMGQPLVILAPHAVEALVKQPPDRWLSNARMTHYQAMLLDTDRVQFGPVVALNPATLLPLPEEGAPHDCLEILAETHGTRPDLTDQPIPDADHTWYTDGSSFLQEGQRKAGAAVTTETEVIWAGALPAGTSAQRAELIALTQALKMAEGKRLNVYTDSRYAFATAHIHGEIYRRRGWLTSEGREIKNKSEILALLKALFLPKRLSIIHCLGHQKGDSAEARGNRLADQAAREAAIKTPPDTSTLLIAGKRTADGSEFEKRTADGSEFESPKKKAKVE

SEQ ID NO: 2099 - protein, 2096 aa, synthetic construct
  source 1..2096: note = Description of Artificial Sequence: Synthetic polypeptide
MPAAKRVKLDGGDKKYSIGLDIGTNSVGWAVITDEYKVPSKKFKVLGNTDRHSIKKNLIGALLFDSGETAEATRLKRTARRRYTRRKNRICYLQEIFSNEMAKVDDSFFHRLEESFLVEEDKKHERHPIFGNIVDEVAYHEKYPTIYHLRKKLVDSTDKADLRLIYLALAHMIKFRGHFLIEGDLNPDNSDVDKLFIQLVQTYNQLFEENPINASGVDAKAILSARLSKSRRLENLIAQLPGEKKNGLFGNLIALSLGLTPNFKSNFDLAEDAKLQLSKDTYDDDLDNLLAQIGDQYADLFLAAKNLSDAILLSDILRVNTEITKAPLSASMIKRYDEHHQDLTLLKALVRQQLPEKYKEIFFDQSKNGYAGYIDGGASQEEFYKFIKPILEKMDGTEELLVKLNREDLLRKQRTFDNGSIPHQIHLGELHAILRRQEDFYPFLKDNREKIEKILTFRIPYYVGPLARGNSRFAWMTRKSEETITPWNFEEVVDKGASAQSFIERMTNFDKNLPNEKVLPKHSLLYEYFTVYNELTKVKYVTEGMRKPAFLSGEQKKAIVDLLFKTNRKVTVKQLKEDYFKKIECFDSVEISGVEDRFNASLGTYHDLLKIIKDKDFLDNEENEDILEDIVLTLTLFEDREMIEERLKTYAHLFDDKVMKQLKRRRYTGWGRLSRKLINGIRDKQSGKTILDFLKSDGFANRNFMQLIHDDSLTFKEDIQKAQVSGQGDSLHEHIANLAGSPAIKKGILQTVKVVDELVKVMGRHKPENIVIEMARENQTTQKGQKNSRERMKRIEEGIKELGSQILKEHPVENTQLQNEKLYLYYLQNGRDMYVDQELDINRLSDYDVDHIVPQSFLKDDSIDNKVLTRSDKARGKSDNVPSEEVVKKMKNYWRQLLNAKLITQRKFDNLTKAERGGLSELDKAGFIKRQLVETRQITKHVAQILDSRMNTKYDENDKLIREVKVITLKSKLVSDFRKDFQFYKVREINNYHHAHDAYLNAVVGTALIKKYPKLESEFVYGDYKVYDVRKMIAKSEQEIGKATAKYFFYSNIMNFFKTEITLANGEIRKRPLIETNGETGEIVWDKGRDFATVRKVLSMPQVNIVKKTEVQTGGFSKESILPKRNSDKLIARKKDWDPKKYGGFDSPTVAYSVLVVAKVEKGKSKKLKSVKELLGITIMERSSFEKNPIDFLEAKGYKEVKKDLIIKLPKYSLFELENGRKRMLASAGELQKGNELALPSKYVNFLYLASHYEKLKGSPEDNEQKQLFVEQHKHYLDEIIEQISEFSKRVILADANLDKVLSAYNKHRDKPIREQAENIIHLFTLTNLGAPAAFKYFDTTIDRKRYTSTKEVLDATLIHQSITGLYETRIDLSQLGGDGGEAAAKPAPGGSGGLGIEDEYRLHETSTEPDVSLGSTWLSDFPQAWAETGGMGLAVRQAPLIIPLKATSTPVSIQQYPMSHEARLGIKPHIQRLLDQGILVPCQSPWNTPLLPVKKPGTNDYRPVQDLREVNKRVEDIHPTVPNPYNLLSGLPPSHQWYTVLDLKDAFFCLRLHPTSQPLFAFEWRDPGMGISGQLTWTRLPQGFKNSPTLFNEALHRDLADFRIQHPDLILLQYVDDILLAATSELDCQQGTRALLQTLGDLGYRASAKKAQICQKQVKYLGYLLREGQRWLTEARKETVMGQPVPKTPRQLREFLGKAGFCRLFIPGFAEMAAPLYPLTKPGTLFSWGPDQQKAYQEIKQALLTAPALGLPDLTKPFELFVDEKQGYAKGVLTQKLGPWRRPVAYLSKKLDPVAAGWPPCLRMVAAIAVLTKDAGKLTMGQPLVILAPHAVEALVKQPPDRWLSNARMTHYQAMLLDTDRVQFGPVVALNPATLLPLPEEGAPHDCLEILAETHGTRPDLTDQPIPDADHTWYTDGSSFLQEGQRKAGAAVTTETEVIWAGALPAGTSAQRAELIALTQALKMAEGKRLNVYTDSRYAFATAHIHGEIYRRRGWLTSEGREIKNKSEILALLKALFLPKRLSIIHCLGHQKGDSAEARGNRLADQAAREAAIKTPPDTSTLLIAGKRTADGSEFEKRTADGSEFESPKKKAKVE

SEQ ID NO: 2100 - protein, 2096 aa, synthetic construct
  source 1..2096: note = Description of Artificial Sequence: Synthetic polypeptide
MPAAKRVKLDGGDKKYSIGLDIGTNSVGWAVITDEYKVPSKKFKVLGNTDRHSIKKNLIGALLFDSGETAEATRLKRTARRRYTRRKNRICYLQEIFSNEMAKVDDSFFHRLEESFLVEEDKKHERHPIFGNIVDEVAYHEKYPTIYHLRKKLVDSTDKADLRLIYLALAHMIKFRGHFLIEGDLNPDNSDVDKLFIQLVQTYNQLFEENPINASGVDAKAILSARLSKSRRLENLIAQLPGEKKNGLFGNLIALSLGLTPNFKSNFDLAEDAKLQLSKDTYDDDLDNLLAQIGDQYADLFLAAKNLSDAILLSDILRVNTEITKAPLSASMIKRYDEHHQDLTLLKALVRQQLPEKYKEIFFDQSKNGYAGYIDGGASQEEFYKFIKPILEKMDGTEELLVKLNREDLLRKQRTFDNGSIPHQIHLGELHAILRRQEDFYPFLKDNREKIEKILTFRIPYYVGPLARGNSRFAWMTRKSEETITPWNFEEVVDKGASAQSFIERMTNFDKNLPNEKVLPKHSLLYEYFTVYNELTKVKYVTEGMRKPAFLSGEQKKAIVDLLFKTNRKVTVKQLKEDYFKKIECFDSVEISGVEDRFNASLGTYHDLLKIIKDKDFLDNEENEDILEDIVLTLTLFEDREMIEERLKTYAHLFDDKVMKQLKRRRYTGWGRLSRKLINGIRDKQSGKTILDFLKSDGFANRNFMQLIHDDSLTFKEDIQKAQVSGQGDSLHEHIANLAGSPAIKKGILQTVKVVDELVKVMGRHKPENIVIEMARENQTTQKGQKNSRERMKRIEEGIKELGSQILKEHPVENTQLQNEKLYLYYLQNGRDMYVDQELDINRLSDYDVDHIVPQSFLKDDSIDNKVLTRSDKARGKSDNVPSEEVVKKMKNYWRQLLNAKLITQRKFDNLTKAERGGLSELDKAGFIKRQLVETRQITKHVAQILDSRMNTKYDENDKLIREVKVITLKSKLVSDFRKDFQFYKVREINNYHHAHDAYLNAVVGTALIKKYPKLESEFVYGDYKVYDVRKMIAKSEQEIGKATAKYFFYSNIMNFFKTEITLANGEIRKRPLIETNGETGEIVWDKGRDFATVRKVLSMPQVNIVKKTEVQTGGFSKESILPKRNSDKLIARKKDWDPKKYGGFDSPTVAYSVLVVAKVEKGKSKKLKSVKELLGITIMERSSFEKNPIDFLEAKGYKEVKKDLIIKLPKYSLFELENGRKRMLASAGELQKGNELALPSKYVNFLYLASHYEKLKGSPEDNEQKQLFVEQHKHYLDEIIEQISEFSKRVILADANLDKVLSAYNKHRDKPIREQAENIIHLFTLTNLGAPAAFKYFDTTIDRKRYTSTKEVLDATLIHQSITGLYETRIDLSQLGGDGGGGSGSSEAAAKGGLGIEDEYRLHETSTEPDVSLGSTWLSDFPQAWAETGGMGLAVRQAPLIIPLKATSTPVSIQQYPMSHEARLGIKPHIQRLLDQGILVPCQSPWNTPLLPVKKPGTNDYRPVQDLREVNKRVEDIHPTVPNPYNLLSGLPPSHQWYTVLDLKDAFFCLRLHPTSQPLFAFEWRDPGMGISGQLTWTRLPQGFKNSPTLFNEALHRDLADFRIQHPDLILLQYVDDILLAATSELDCQQGTRALLQTLGDLGYRASAKKAQICQKQVKYLGYLLREGQRWLTEARKETVMGQPVPKTPRQLREFLGKAGFCRLFIPGFAEMAAPLYPLTKPGTLFSWGPDQQKAYQEIKQALLTAPALGLPDLTKPFELFVDEKQGYAKGVLTQKLGPWRRPVAYLSKKLDPVAAGWPPCLRMVAAIAVLTKDAGKLTMGQPLVILAPHAVEALVKQPPDRWLSNARMTHYQAMLLDTDRVQFGPVVALNPATLLPLPEEGAPHDCLEILAETHGTRPDLTDQPIPDADHTWYTDGSSFLQEGQRKAGAAVTTETEVIWAGALPAGTSAQRAELIALTQALKMAEGKRLNVYTDSRYAFATAHIHGEIYRRRGWLTSEGREIKNKSEILALLKALFLPKRLSIIHCLGHQKGDSAEARGNRLADQAAREAAIKTPPDTSTLLIAGKRTADGSEFEKRTADGSEFESPKKKAKVE

SEQ ID NO: 2101 - protein, 2094 aa, synthetic construct
  source 1..2094: note = Description of Artificial Sequence: Synthetic polypeptide
MPAAKRVKLDGGDKKYSIGLDIGTNSVGWAVITDEYKVPSKKFKVLGNTDRHSIKKNLIGALLFDSGETAEATRLKRTARRRYTRRKNRICYLQEIFSNEMAKVDDSFFHRLEESFLVEEDKKHERHPIFGNIVDEVAYHEKYPTIYHLRKKLVDSTDKADLRLIYLALAHMIKFRGHFLIEGDLNPDNSDVDKLFIQLVQTYNQLFEENPINASGVDAKAILSARLSKSRRLENLIAQLPGEKKNGLFGNLIALSLGLTPNFKSNFDLAEDAKLQLSKDTYDDDLDNLLAQIGDQYADLFLAAKNLSDAILLSDILRVNTEITKAPLSASMIKRYDEHHQDLTLLKALVRQQLPEKYKEIFFDQSKNGYAGYIDGGASQEEFYKFIKPILEKMDGTEELLVKLNREDLLRKQRTFDNGSIPHQIHLGELHAILRRQEDFYPFLKDNREKIEKILTFRIPYYVGPLARGNSRFAWMTRKSEETITPWNFEEVVDKGASAQSFIERMTNFDKNLPNEKVLPKHSLLYEYFTVYNELTKVKYVTEGMRKPAFLSGEQKKAIVDLLFKTNRKVTVKQLKEDYFKKIECFDSVEISGVEDRFNASLGTYHDLLKIIKDKDFLDNEENEDILEDIVLTLTLFEDREMIEERLKTYAHLFDDKVMKQLKRRRYTGWGRLSRKLINGIRDKQSGKTILDFLKSDGFANRNFMQLIHDDSLTFKEDIQKAQVSGQGDSLHEHIANLAGSPAIKKGILQTVKVVDELVKVMGRHKPENIVIEMARENQTTQKGQKNSRERMKRIEEGIKELGSQILKEHPVENTQLQNEKLYLYYLQNGRDMYVDQELDINRLSDYDVDHIVPQSFLKDDSIDNKVLTRSDKARGKSDNVPSEEVVKKMKNYWRQLLNAKLITQRKFDNLTKAERGGLSELDKAGFIKRQLVETRQITKHVAQILDSRMNTKYDENDKLIREVKVITLKSKLVSDFRKDFQFYKVREINNYHHAHDAYLNAVVGTALIKKYPKLESEFVYGDYKVYDVRKMIAKSEQEIGKATAKYFFYSNIMNFFKTEITLANGEIRKRPLIETNGETGEIVWDKGRDFATVRKVLSMPQVNIVKKTEVQTGGFSKESILPKRNSDKLIARKKDWDPKKYGGFDSPTVAYSVLVVAKVEKGKSKKLKSVKELLGITIMERSSFEKNPIDFLEAKGYKEVKKDLIIKLPKYSLFELENGRKRMLASAGELQKGNELALPSKYVNFLYLASHYEKLKGSPEDNEQKQLFVEQHKHYLDEIIEQISEFSKRVILADANLDKVLSAYNKHRDKPIREQAENIIHLFTLTNLGAPAAFKYFDTTIDRKRYTSTKEVLDATLIHQSITGLYETRIDLSQLGGDGGPAPGGGGSSGGLGIEDEYRLHETSTEPDVSLGSTWLSDFPQAWAETGGMGLAVRQAPLIIPLKATSTPVSIQQYPMSHEARLGIKPHIQRLLDQGILVPCQSPWNTPLLPVKKPGTNDYRPVQDLREVNKRVEDIHPTVPNPYNLLSGLPPSHQWYTVLDLKDAFFCLRLHPTSQPLFAFEWRDPGMGISGQLTWTRLPQGFKNSPTLFNEALHRDLADFRIQHPDLILLQYVDDILLAATSELDCQQGTRALLQTLGDLGYRASAKKAQICQKQVKYLGYLLREGQRWLTEARKETVMGQPVPKTPRQLREFLGKAGFCRLFIPGFAEMAAPLYPLTKPGTLFSWGPDQQKAYQEIKQALLTAPALGLPDLTKPFELFVDEKQGYAKGVLTQKLGPWRRPVAYLSKKLDPVAAGWPPCLRMVAAIAVLTKDAGKLTMGQPLVILAPHAVEALVKQPPDRWLSNARMTHYQAMLLDTDRVQFGPVVALNPATLLPLPEEGAPHDCLEILAETHGTRPDLTDQPIPDADHTWYTDGSSFLQEGQRKAGAAVTTETEVIWAGALPAGTSAQRAELIALTQALKMAEGKRLNVYTDSRYAFATAHIHGEIYRRRGWLTSEGREIKNKSEILALLKALFLPKRLSIIHCLGHQKGDSAEARGNRLADQAAREAAIKTPPDTSTLLIAGKRTADGSEFEKRTADGSEFESPKKKAKVE

SEQ ID NO: 2102 - protein, 2096 aa, synthetic construct
  source 1..2096: note = Description of Artificial Sequence: Synthetic polypeptide
MPAAKRVKLDGGDKKYSIGLDIGTNSVGWAVITDEYKVPSKKFKVLGNTDRHSIKKNLIGALLFDSGETAEATRLKRTARRRYTRRKNRICYLQEIFSNEMAKVDDSFFHRLEESFLVEEDKKHERHPIFGNIVDEVAYHEKYPTIYHLRKKLVDSTDKADLRLIYLALAHMIKFRGHFLIEGDLNPDNSDVDKLFIQLVQTYNQLFEENPINASGVDAKAILSARLSKSRRLENLIAQLPGEKKNGLFGNLIALSLGLTPNFKSNFDLAEDAKLQLSKDTYDDDLDNLLAQIGDQYADLFLAAKNLSDAILLSDILRVNTEITKAPLSASMIKRYDEHHQDLTLLKALVRQQLPEKYKEIFFDQSKNGYAGYIDGGASQEEFYKFIKPILEKMDGTEELLVKLNREDLLRKQRTFDNGSIPHQIHLGELHAILRRQEDFYPFLKDNREKIEKILTFRIPYYVGPLARGNSRFAWMTRKSEETITPWNFEEVVDKGASAQSFIERMTNFDKNLPNEKVLPKHSLLYEYFTVYNELTKVKYVTEGMRKPAFLSGEQKKAIVDLLFKTNRKVTVKQLKEDYFKKIECFDSVEISGVEDRFNASLGTYHDLLKIIKDKDFLDNEENEDILEDIVLTLTLFEDREMIEERLKTYAHLFDDKVMKQLKRRRYTGWGRLSRKLINGIRDKQSGKTILDFLKSDGFANRNFMQLIHDDSLTFKEDIQKAQVSGQGDSLHEHIANLAGSPAIKKGILQTVKVVDELVKVMGRHKPENIVIEMARENQTTQKGQKNSRERMKRIEEGIKELGSQILKEHPVENTQLQNEKLYLYYLQNGRDMYVDQELDINRLSDYDVDHIVPQSFLKDDSIDNKVLTRSDKARGKSDNVPSEEVVKKMKNYWRQLLNAKLITQRKFDNLTKAERGGLSELDKAGFIKRQLVETRQITKHVAQILDSRMNTKYDENDKLIREVKVITLKSKLVSDFRKDFQFYKVREINNYHHAHDAYLNAVVGTALIKKYPKLESEFVYGDYKVYDVRKMIAKSEQEIGKATAKYFFYSNIMNFFKTEITLANGEIRKRPLIETNGETGEIVWDKGRDFATVRKVLSMPQVNIVKKTEVQTGGFSKESILPKRNSDKLIARKKDWDPKKYGGFDSPTVAYSVLVVAKVEKGKSKKLKSVKELLGITIMERSSFEKNPIDFLEAKGYKEVKKDLIIKLPKYSLFELENGRKRMLASAGELQKGNELALPSKYVNFLYLASHYEKLKGSPEDNEQKQLFVEQHKHYLDEIIEQISEFSKRVILADANLDKVLSAYNKHRDKPIREQAENIIHLFTLTNLGAPAAFKYFDTTIDRKRYTSTKEVLDATLIHQSITGLYETRIDLSQLGGDGGGGSEAAAKGGGGGLGIEDEYRLHETSTEPDVSLGSTWLSDFPQAWAETGGMGLAVRQAPLIIPLKATSTPVSIQQYPMSHEARLGIKPHIQRLLDQGILVPCQSPWNTPLLPVKKPGTNDYRPVQDLREVNKRVEDIHPTVPNPYNLLSGLPPSHQWYTVLDLKDAFFCLRLHPTSQPLFAFEWRDPGMGISGQLTWTRLPQGFKNSPTLFNEALHRDLADFRIQHPDLILLQYVDDILLAATSELDCQQGTRALLQTLGDLGYRASAKKAQICQKQVKYLGYLLREGQRWLTEARKETVMGQPVPKTPRQLREFLGKAGFCRLFIPGFAEMAAPLYPLTKPGTLFSWGPDQQKAYQEIKQALLTAPALGLPDLTKPFELFVDEKQGYAKGVLTQKLGPWRRPVAYLSKKLDPVAAGWPPCLRMVAAIAVLTKDAGKLTMGQPLVILAPHAVEALVKQPPDRWLSNARMTHYQAMLLDTDRVQFGPVVALNPATLLPLPEEGAPHDCLEILAETHGTRPDLTDQPIPDADHTWYTDGSSFLQEGQRKAGAAVTTETEVIWAGALPAGTSAQRAELIALTQALKMAEGKRLNVYTDSRYAFATAHIHGEIYRRRGWLTSEGREIKNKSEILALLKALFLPKRLSIIHCLGHQKGDSAEARGNRLADQAAREAAIKTPPDTSTLLIAGKRTADGSEFEKRTADGSEFESPKKKAKVE

SEQ ID NO: 2103 - protein, 2088 aa, synthetic construct
  source 1..2088: note = Description of Artificial Sequence: Synthetic polypeptide
MPAAKRVKLDGGDKKYSIGLDIGTNSVGWAVITDEYKVPSKKFKVLGNTDRHSIKKNLIGALLFDSGETAEATRLKRTARRRYTRRKNRICYLQEIFSNEMAKVDDSFFHRLEESFLVEEDKKHERHPIFGNIVDEVAYHEKYPTIYHLRKKLVDSTDKADLRLIYLALAHMIKFRGHFLIEGDLNPDNSDVDKLFIQLVQTYNQLFEENPINASGVDAKAILSARLSKSRRLENLIAQLPGEKKNGLFGNLIALSLGLTPNFKSNFDLAEDAKLQLSKDTYDDDLDNLLAQIGDQYADLFLAAKNLSDAILLSDILRVNTEITKAPLSASMIKRYDEHHQDLTLLKALVRQQLPEKYKEIFFDQSKNGYAGYIDGGASQEEFYKFIKPILEKMDGTEELLVKLNREDLLRKQRTFDNGSIPHQIHLGELHAILRRQEDFYPFLKDNREKIEKILTFRIPYYVGPLARGNSRFAWMTRKSEETITPWNFEEVVDKGASAQSFIERMTNFDKNLPNEKVLPKHSLLYEYFTVYNELTKVKYVTEGMRKPAFLSGEQKKAIVDLLFKTNRKVTVKQLKEDYFKKIECFDSVEISGVEDRFNASLGTYHDLLKIIKDKDFLDNEENEDILEDIVLTLTLFEDREMIEERLKTYAHLFDDKVMKQLKRRRYTGWGRLSRKLINGIRDKQSGKTILDFLKSDGFANRNFMQLIHDDSLTFKEDIQKAQVSGQGDSLHEHIANLAGSPAIKKGILQTVKVVDELVKVMGRHKPENIVIEMARENQTTQKGQKNSRERMKRIEEGIKELGSQILKEHPVENTQLQNEKLYLYYLQNGRDMYVDQELDINRLSDYDVDHIVPQSFLKDDSIDNKVLTRSDKARGKSDNVPSEEVVKKMKNYWRQLLNAKLITQRKFDNLTKAERGGLSELDKAGFIKRQLVETRQITKHVAQILDSRMNTKYDENDKLIREVKVITLKSKLVSDFRKDFQFYKVREINNYHHAHDAYLNAVVGTALIKKYPKLESEFVYGDYKVYDVRKMIAKSEQEIGKATAKYFFYSNIMNFFKTEITLANGEIRKRPLIETNGETGEIVWDKGRDFATVRKVLSMPQVNIVKKTEVQTGGFSKESILPKRNSDKLIARKKDWDPKKYGGFDSPTVAYSVLVVAKVEKGKSKKLKSVKELLGITIMERSSFEKNPIDFLEAKGYKEVKKDLIIKLPKYSLFELENGRKRMLASAGELQKGNELALPSKYVNFLYLASHYEKLKGSPEDNEQKQLFVEQHKHYLDEIIEQISEFSKRVILADANLDKVLSAYNKHRDKPIREQAENIIHLFTLTNLGAPAAFKYFDTTIDRKRYTSTKEVLDATLIHQSITGLYETRIDLSQLGGDGGPAPGGLGIEDEYRLHETSTEPDVSLGSTWLSDFPQAWAETGGMGLAVRQAPLIIPLKATSTPVSIQQYPMSHEARLGIKPHIQRLLDQGILVPCQSPWNTPLLPVKKPGTNDYRPVQDLREVNKRVEDIHPTVPNPYNLLSGLPPSHQWYTVLDLKDAFFCLRLHPTSQPLFAFEWRDPGMGISGQLTWTRLPQGFKNSPTLFNEALHRDLADFRIQHPDLILLQYVDDILLAATSELDCQQGTRALLQTLGDLGYRASAKKAQICQKQVKYLGYLLREGQRWLTEARKETVMGQPVPKTPRQLREFLGKAGFCRLFIPGFAEMAAPLYPLTKPGTLFSWGPDQQKAYQEIKQALLTAPALGLPDLTKPFELFVDEKQGYAKGVLTQKLGPWRRPVAYLSKKLDPVAAGWPPCLRMVAAIAVLTKDAGKLTMGQPLVILAPHAVEALVKQPPDRWLSNARMTHYQAMLLDTDRVQFGPVVALNPATLLPLPEEGAPHDCLEILAETHGTRPDLTDQPIPDADHTWYTDGSSFLQEGQRKAGAAVTTETEVIWAGALPAGTSAQRAELIALTQALKMAEGKRLNVYTDSRYAFATAHIHGEIYRRRGWLTSEGREIKNKSEILALLKALFLPKRLSIIHCLGHQKGDSAEARGNRLADQAAREAAIKTPPDTSTLLIAGKRTADGSEFEKRTADGSEFESPKKKAKVE

SEQ ID NO: 2104 - protein, 2093 aa, synthetic construct
  source 1..2093: note = Description of Artificial Sequence: Synthetic polypeptide
MPAAKRVKLDGGDKKYSIGLDIGTNSVGWAVITDEYKVPSKKFKVLGNTDRHSIKKNLIGALLFDSGETAEATRLKRTARRRYTRRKNRICYLQEIFSNEMAKVDDSFFHRLEESFLVEEDKKHERHPIFGNIVDEVAYHEKYPTIYHLRKKLVDSTDKADLRLIYLALAHMIKFRGHFLIEGDLNPDNSDVDKLFIQLVQTYNQLFEENPINASGVDAKAILSARLSKSRRLENLIAQLPGEKKNGLFGNLIALSLGLTPNFKSNFDLAEDAKLQLSKDTYDDDLDNLLAQIGDQYADLFLAAKNLSDAILLSDILRVNTEITKAPLSASMIKRYDEHHQDLTLLKALVRQQLPEKYKEIFFDQSKNGYAGYIDGGASQEEFYKFIKPILEKMDGTEELLVKLNREDLLRKQRTFDNGSIPHQIHLGELHAILRRQEDFYPFLKDNREKIEKILTFRIPYYVGPLARGNSRFAWMTRKSEETITPWNFEEVVDKGASAQSFIERMTNFDKNLPNEKVLPKHSLLYEYFTVYNELTKVKYVTEGMRKPAFLSGEQKKAIVDLLFKTNRKVTVKQLKEDYFKKIECFDSVEISGVEDRFNASLGTYHDLLKIIKDKDFLDNEENEDILEDIVLTLTLFEDREMIEERLKTYAHLFDDKVMKQLKRRRYTGWGRLSRKLINGIRDKQSGKTILDFLKSDGFANRNFMQLIHDDSLTFKEDIQKAQVSGQGDSLHEHIANLAGSPAIKKGILQTVKVVDELVKVMGRHKPENIVIEMARENQTTQKGQKNSRERMKRIEEGIKELGSQILKEHPVENTQLQNEKLYLYYLQNGRDMYVDQELDINRLSDYDVDHIVPQSFLKDDSIDNKVLTRSDKARGKSDNVPSEEVVKKMKNYWRQLLNAKLITQRKFDNLTKAERGGLSELDKAGFIKRQLVETRQITKHVAQILDSRMNTKYDENDKLIREVKVITLKSKLVSDFRKDFQFYKVREINNYHHAHDAYLNAVVGTALIKKYPKLESEFVYGDYKVYDVRKMIAKSEQEIGKATAKYFFYSNIMNFFKTEITLANGEIRKRPLIETNGETGEIVWDKGRDFATVRKVLSMPQVNIVKKTEVQTGGFSKESILPKRNSDKLIARKKDWDPKKYGGFDSPTVAYSVLVVAKVEKGKSKKLKSVKELLGITIMERSSFEKNPIDFLEAKGYKEVKKDLIIKLPKYSLFELENGRKRMLASAGELQKGNELALPSKYVNFLYLASHYEKLKGSPEDNEQKQLFVEQHKHYLDEIIEQISEFSKRVILADANLDKVLSAYNKHRDKPIREQAENIIHLFTLTNLGAPAAFKYFDTTIDRKRYTSTKEVLDATLIHQSITGLYETRIDLSQLGGDGGEAAAKGGSGGLGIEDEYRLHETSTEPDVSLGSTWLSDFPQAWAETGGMGLAVRQAPLIIPLKATSTPVSIQQYPMSHEARLGIKPHIQRLLDQGILVPCQSPWNTPLLPVKKPGTNDYRPVQDLREVNKRVEDIHPTVPNPYNLLSGLPPSHQWYTVLDLKDAFFCLRLHPTSQPLFAFEWRDPGMGISGQLTWTRLPQGFKNSPTLFNEALHRDLADFRIQHPDLILLQYVDDILLAATSELDCQQGTRALLQTLGDLGYRASAKKAQICQKQVKYLGYLLREGQRWLTEARKETVMGQPVPKTPRQLREFLGKAGFCRLFIPGFAEMAAPLYPLTKPGTLFSWGPDQQKAYQEIKQALLTAPALGLPDLTKPFELFVDEKQGYAKGVLTQKLGPWRRPVAYLSKKLDPVAAGWPPCLRMVAAIAVLTKDAGKLTMGQPLVILAPHAVEALVKQPPDRWLSNARMTHYQAMLLDTDRVQFGPVVALNPATLLPLPEEGAPHDCLEILAETHGTRPDLTDQPIPDADHTWYTDGSSFLQEGQRKAGAAVTTETEVIWAGALPAGTSAQRAELIALTQALKMAEGKRLNVYTDSRYAFATAHIHGEIYRRRGWLTSEGREIKNKSEILALLKALFLPKRLSIIHCLGHQKGDSAEARGNRLADQAAREAAIKTPPDTSTLLIAGKRTADGSEFEKRTADGSEFESPKKKAKVE

SEQ ID NO: 2105 - protein, 2093 aa, synthetic construct
  source 1..2093: note = Description of Artificial Sequence: Synthetic polypeptide
MPAAKRVKLDGGDKKYSIGLDIGTNSVGWAVITDEYKVPSKKFKVLGNTDRHSIKKNLIGALLFDSGETAEATRLKRTARRRYTRRKNRICYLQEIFSNEMAKVDDSFFHRLEESFLVEEDKKHERHPIFGNIVDEVAYHEKYPTIYHLRKKLVDSTDKADLRLIYLALAHMIKFRGHFLIEGDLNPDNSDVDKLFIQLVQTYNQLFEENPINASGVDAKAILSARLSKSRRLENLIAQLPGEKKNGLFGNLIALSLGLTPNFKSNFDLAEDAKLQLSKDTYDDDLDNLLAQIGDQYADLFLAAKNLSDAILLSDILRVNTEITKAPLSASMIKRYDEHHQDLTLLKALVRQQLPEKYKEIFFDQSKNGYAGYIDGGASQEEFYKFIKPILEKMDGTEELLVKLNREDLLRKQRTFDNGSIPHQIHLGELHAILRRQEDFYPFLKDNREKIEKILTFRIPYYVGPLARGNSRFAWMTRKSEETITPWNFEEVVDKGASAQSFIERMTNFDKNLPNEKVLPKHSLLYEYFTVYNELTKVKYVTEGMRKPAFLSGEQKKAIVDLLFKTNRKVTVKQLKEDYFKKIECFDSVEISGVEDRFNASLGTYHDLLKIIKDKDFLDNEENEDILEDIVLTLTLFEDREMIEERLKTYAHLFDDKVMKQLKRRRYTGWGRLSRKLINGIRDKQSGKTILDFLKSDGFANRNFMQLIHDDSLTFKEDIQKAQVSGQGDSLHEHIANLAGSPAIKKGILQTVKVVDELVKVMGRHKPENIVIEMARENQTTQKGQKNSRERMKRIEEGIKELGSQILKEHPVENTQLQNEKLYLYYLQNGRDMYVDQELDINRLSDYDVDHIVPQSFLKDDSIDNKVLTRSDKARGKSDNVPSEEVVKKMKNYWRQLLNAKLITQRKFDNLTKAERGGLSELDKAGFIKRQLVETRQITKHVAQILDSRMNTKYDENDKLIREVKVITLKSKLVSDFRKDFQFYKVREINNYHHAHDAYLNAVVGTALIKKYPKLESEFVYGDYKVYDVRKMIAKSEQEIGKATAKYFFYSNIMNFFKTEITLANGEIRKRPLIETNGETGEIVWDKGRDFATVRKVLSMPQVNIVKKTEVQTGGFSKESILPKRNSDKLIARKKDWDPKKYGGFDSPTVAYSVLVVAKVEKGKSKKLKSVKELLGITIMERSSFEKNPIDFLEAKGYKEVKKDLIIKLPKYSLFELENGRKRMLASAGELQKGNELALPSKYVNFLYLASHYEKLKGSPEDNEQKQLFVEQHKHYLDEIIEQISEFSKRVILADANLDKVLSAYNKHRDKPIREQAENIIHLFTLTNLGAPAAFKYFDTTIDRKRYTSTKEVLDATLIHQSITGLYETRIDLSQLGGDGGGGSEAAAKGGLGIEDEYRLHETSTEPDVSLGSTWLSDFPQAWAETGGMGLAVRQAPLIIPLKATSTPVSIQQYPMSHEARLGIKPHIQRLLDQGILVPCQSPWNTPLLPVKKPGTNDYRPVQDLREVNKRVEDIHPTVPNPYNLLSGLPPSHQWYTVLDLKDAFFCLRLHPTSQPLFAFEWRDPGMGISGQLTWTRLPQGFKNSPTLFNEALHRDLADFRIQHPDLILLQYVDDILLAATSELDCQQGTRALLQTLGDLGYRASAKKAQICQKQVKYLGYLLREGQRWLTEARKETVMGQPVPKTPRQLREFLGKAGFCRLFIPGFAEMAAPLYPLTKPGTLFSWGPDQQKAYQEIKQALLTAPALGLPDLTKPFELFVDEKQGYAKGVLTQKLGPWRRPVAYLSKKLDPVAAGWPPCLRMVAAIAVLTKDAGKLTMGQPLVILAPHAVEALVKQPPDRWLSNARMTHYQAMLLDTDRVQFGPVVALNPATLLPLPEEGAPHDCLEILAETHGTRPDLTDQPIPDADHTWYTDGSSFLQEGQRKAGAAVTTETEVIWAGALPAGTSAQRAELIALTQALKMAEGKRLNVYTDSRYAFATAHIHGEIYRRRGWLTSEGREIKNKSEILALLKALFLPKRLSIIHCLGHQKGDSAEARGNRLADQAAREAAIKTPPDTSTLLIAGKRTADGSEFEKRTADGSEFESPKKKAKVE

SEQ ID NO: 2106 - protein, 2100 aa, synthetic construct
  source 1..2100: note = Description of Artificial Sequence: Synthetic polypeptide
MPAAKRVKLDGGDKKYSIGLDIGTNSVGWAVITDEYKVPSKKFKVLGNTDRHSIKKNLIGALLFDSGETAEATRLKRTARRRYTRRKNRICYLQEIFSNEMAKVDDSFFHRLEESFLVEEDKKHERHPIFGNIVDEVAYHEKYPTIYHLRKKLVDSTDKADLRLIYLALAHMIKFRGHFLIEGDLNPDNSDVDKLFIQLVQTYNQLFEENPINASGVDAKAILSARLSKSRRLENLIAQLPGEKKNGLFGNLIALSLGLTPNFKSNFDLAEDAKLQLSKDTYDDDLDNLLAQIGDQYADLFLAAKNLSDAILLSDILRVNTEITKAPLSASMIKRYDEHHQDLTLLKALVRQQLPEKYKEIFFDQSKNGYAGYIDGGASQEEFYKFIKPILEKMDGTEELLVKLNREDLLRKQRTFDNGSIPHQIHLGELHAILRRQEDFYPFLKDNREKIEKILTFRIPYYVGPLARGNSRFAWMTRKSEETITPWNFEEVVDKGASAQSFIERMTNFDKNLPNEKVLPKHSLLYEYFTVYNELTKVKYVTEGMRKPAFLSGEQKKAIVDLLFKTNRKVTVKQLKEDYFKKIECFDSVEISGVEDRFNASLGTYHDLLKIIKDKDFLDNEENEDILEDIVLTLTLFEDREMIEERLKTYAHLFDDKVMKQLKRRRYTGWGRLSRKLINGIRDKQSGKTILDFLKSDGFANRNFMQLIHDDSLTFKEDIQKAQVSGQGDSLHEHIANLAGSPAIKKGILQTVKVVDELVKVMGRHKPENIVIEMARENQTTQKGQKNSRERMKRIEEGIKELGSQILKEHPVENTQLQNEKLYLYYLQNGRDMYVDQELDINRLSDYDVDHIVPQSFLKDDSIDNKVLTRSDKARGKSDNVPSEEVVKKMKNYWRQLLNAKLITQRKFDNLTKAERGGLSELDKAGFIKRQLVETRQITKHVAQILDSRMNTKYDENDKLIREVKVITLKSKLVSDFRKDFQFYKVREINNYHHAHDAYLNAVVGTALIKKYPKLESEFVYGDYKVYDVRKMIAKSEQEIGKATAKYFFYSNIMNFFKTEITLANGEIRKRPLIETNGETGEIVWDKGRDFATVRKVLSMPQVNIVKKTEVQTGGFSKESILPKRNSDKLIARKKDWDPKKYGGFDSPTVAYSVLVVAKVEKGKSKKLKSVKELLGITIMERSSFEKNPIDFLEAKGYKEVKKDLIIKLPKYSLFELENGRKRMLASAGELQKGNELALPSKYVNFLYLASHYEKLKGSPEDNEQKQLFVEQHKHYLDEIIEQISEFSKRVILADANLDKVLSAYNKHRDKPIREQAENIIHLFTLTNLGAPAAFKYFDTTIDRKRYTSTKEVLDATLIHQSITGLYETRIDLSQLGGDGGGGGGSEAAAKGGGGSGGLGIEDEYRLHETSTEPDVSLGSTWLSDFPQAWAETGGMGLAVRQAPLIIPLKATSTPVSIQQYPMSHEARLGIKPHIQRLLDQGILVPCQSPWNTPLLPVKKPGTNDYRPVQDLREVNKRVEDIHPTVPNPYNLLSGLPPSHQWYTVLDLKDAFFCLRLHPTSQPLFAFEWRDPGMGISGQLTWTRLPQGFKNSPTLFNEALHRDLADFRIQHPDLILLQYVDDILLAATSELDCQQGTRALLQTLGDLGYRASAKKAQICQKQVKYLGYLLREGQRWLTEARKETVMGQPVPKTPRQLREFLGKAGFCRLFIPGFAEMAAPLYPLTKPGTLFSWGPDQQKAYQEIKQALLTAPALGLPDLTKPFELFVDEKQGYAKGVLTQKLGPWRRPVAYLSKKLDPVAAGWPPCLRMVAAIAVLTKDAGKLTMGQPLVILAPHAVEALVKQPPDRWLSNARMTHYQAMLLDTDRVQFGPVVALNPATLLPLPEEGAPHDCLEILAETHGTRPDLTDQPIPDADHTWYTDGSSFLQEGQRKAGAAVTTETEVIWAGALPAGTSAQRAELIALTQALKMAEGKRLNVYTDSRYAFATAHIHGEIYRRRGWLTSEGREIKNKSEILALLKALFLPKRLSIIHCLGHQKGDSAEARGNRLADQAAREAAIKTPPDTSTLLIAGKRTADGSEFEKRTADGSEFESPKKKAKVE

SEQ ID NO: 2107 - protein, 2094 aa, synthetic construct
  source 1..2094: note = Description of Artificial Sequence: Synthetic polypeptide
MPAAKRVKLDGGDKKYSIGLDIGTNSVGWAVITDEYKVPSKKFKVLGNTDRHSIKKNLIGALLFDSGETAEATRLKRTARRRYTRRKNRICYLQEIFSNEMAKVDDSFFHRLEESFLVEEDKKHERHPIFGNIVDEVAYHEKYPTIYHLRKKLVDSTDKADLRLIYLALAHMIKFRGHFLIEGDLNPDNSDVDKLFIQLVQTYNQLFEENPINASGVDAKAILSARLSKSRRLENLIAQLPGEKKNGLFGNLIALSLGLTPNFKSNFDLAEDAKLQLSKDTYDDDLDNLLAQIGDQYADLFLAAKNLSDAILLSDILRVNTEITKAPLSASMIKRYDEHHQDLTLLKALVRQQLPEKYKEIFFDQSKNGYAGYIDGGASQEEFYKFIKPILEKMDGTEELLVKLNREDLLRKQRTFDNGSIPHQIHLGELHAILRRQEDFYPFLKDNREKIEKILTFRIPYYVGPLARGNSRFAWMTRKSEETITPWNFEEVVDKGASAQSFIERMTNFDKNLPNEKVLPKHSLLYEYFTVYNELTKVKYVTEGMRKPAFLSGEQKKAIVDLLFKTNRKVTVKQLKEDYFKKIECFDSVEISGVEDRFNASLGTYHDLLKIIKDKDFLDNEENEDILEDIVLTLTLFEDREMIEERLKTYAHLFDDKVMKQLKRRRYTGWGRLSRKLINGIRDKQSGKTILDFLKSDGFANRNFMQLIHDDSLTFKEDIQKAQVSGQGDSLHEHIANLAGSPAIKKGILQTVKVVDELVKVMGRHKPENIVIEMARENQTTQKGQKNSRERMKRIEEGIKELGSQILKEHPVENTQLQNEKLYLYYLQNGRDMYVDQELDINRLSDYDVDHIVPQSFLKDDSIDNKVLTRSDKARGKSDNVPSEEVVKKMKNYWRQLLNAKLITQRKFDNLTKAERGGLSELDKAGFIKRQLVETRQITKHVAQILDSRMNTKYDENDKLIREVKVITLKSKLVSDFRKDFQFYKVREINNYHHAHDAYLNAVVGTALIKKYPKLESEFVYGDYKVYDVRKMIAKSEQEIGKATAKYFFYSNIMNFFKTEITLANGEIRKRPLIETNGETGEIVWDKGRDFATVRKVLSMPQVNIVKKTEVQTGGFSKESILPKRNSDKLIARKKDWDPKKYGGFDSPTVAYSVLVVAKVEKGKSKKLKSVKELLGITIMERSSFEKNPIDFLEAKGYKEVKKDLIIKLPKYSLFELENGRKRMLASAGELQKGNELALPSKYVNFLYLASHYEKLKGSPEDNEQKQLFVEQHKHYLDEIIEQISEFSKRVILADANLDKVLSAYNKHRDKPIREQAENIIHLFTLTNLGAPAAFKYFDTTIDRKRYTSTKEVLDATLIHQSITGLYETRIDLSQLGGDGGGGGGSSGGSGGLGIEDEYRLHETSTEPDVSLGSTWLSDFPQAWAETGGMGLAVRQAPLIIPLKATSTPVSIQQYPMSHEARLGIKPHIQRLLDQGILVPCQSPWNTPLLPVKKPGTNDYRPVQDLREVNKRVEDIHPTVPNPYNLLSGLPPSHQWYTVLDLKDAFFCLRLHPTSQPLFAFEWRDPGMGISGQLTWTRLPQGFKNSPTLFNEALHRDLADFRIQHPDLILLQYVDDILLAATSELDCQQGTRALLQTLGDLGYRASAKKAQICQKQVKYLGYLLREGQRWLTEARKETVMGQPVPKTPRQLREFLGKAGFCRLFIPGFAEMAAPLYPLTKPGTLFSWGPDQQKAYQEIKQALLTAPALGLPDLTKPFELFVDEKQGYAKGVLTQKLGPWRRPVAYLSKKLDPVAAGWPPCLRMVAAIAVLTKDAGKLTMGQPLVILAPHAVEALVKQPPDRWLSNARMTHYQAMLLDTDRVQFGPVVALNPATLLPLPEEGAPHDCLEILAETHGTRPDLTDQPIPDADHTWYTDGSSFLQEGQRKAGAAVTTETEVIWAGALPAGTSAQRAELIALTQALKMAEGKRLNVYTDSRYAFATAHIHGEIYRRRGWLTSEGREIKNKSEILALLKALFLPKRLSIIHCLGHQKGDSAEARGNRLADQAAREAAIKTPPDTSTLLIAGKRTADGSEFEKRTADGSEFESPKKKAKVE

SEQ ID NO: 2108 - protein, 2096 aa, synthetic construct
  source 1..2096: note = Description of Artificial Sequence: Synthetic polypeptide
MPAAKRVKLDGGDKKYSIGLDIGTNSVGWAVITDEYKVPSKKFKVLGNTDRHSIKKNLIGALLFDSGETAEATRLKRTARRRYTRRKNRICYLQEIFSNEMAKVDDSFFHRLEESFLVEEDKKHERHPIFGNIVDEVAYHEKYPTIYHLRKKLVDSTDKADLRLIYLALAHMIKFRGHFLIEGDLNPDNSDVDKLFIQLVQTYNQLFEENPINASGVDAKAILSARLSKSRRLENLIAQLPGEKKNGLFGNLIALSLGLTPNFKSNFDLAEDAKLQLSKDTYDDDLDNLLAQIGDQYADLFLAAKNLSDAILLSDILRVNTEITKAPLSASMIKRYDEHHQDLTLLKALVRQQLPEKYKEIFFDQSKNGYAGYIDGGASQEEFYKFIKPILEKMDGTEELLVKLNREDLLRKQRTFDNGSIPHQIHLGELHAILRRQEDFYPFLKDNREKIEKILTFRIPYYVGPLARGNSRFAWMTRKSEETITPWNFEEVVDKGASAQSFIERMTNFDKNLPNEKVLPKHSLLYEYFTVYNELTKVKYVTEGMRKPAFLSGEQKKAIVDLLFKTNRKVTVKQLKEDYFKKIECFDSVEISGVEDRFNASLGTYHDLLKIIKDKDFLDNEENEDILEDIVLTLTLFEDREMIEERLKTYAHLFDDKVMKQLKRRRYTGWGRLSRKLINGIRDKQSGKTILDFLKSDGFANRNFMQLIHDDSLTFKEDIQKAQVSGQGDSLHEHIANLAGSPAIKKGILQTVKVVDELVKVMGRHKPENIVIEMARENQTTQKGQKNSRERMKRIEEGIKELGSQILKEHPVENTQLQNEKLYLYYLQNGRDMYVDQELDINRLSDYDVDHIVPQSFLKDDSIDNKVLTRSDKARGKSDNVPSEEVVKKMKNYWRQLLNAKLITQRKFDNLTKAERGGLSELDKAGFIKRQLVETRQITKHVAQILDSRMNTKYDENDKLIREVKVITLKSKLVSDFRKDFQFYKVREINNYHHAHDAYLNAVVGTALIKKYPKLESEFVYGDYKVYDVRKMIAKSEQEIGKATAKYFFYSNIMNFFKTEITLANGEIRKRPLIETNGETGEIVWDKGRDFATVRKVLSMPQVNIVKKTEVQTGGFSKESILPKRNSDKLIARKKDWDPKKYGGFDSPTVAYSVLVVAKVEKGKSKKLKSVKELLGITIMERSSFEKNPIDFLEAKGYKEVKKDLIIKLPKYSLFELENGRKRMLASAGELQKGNELALPSKYVNFLYLASHYEKLKGSPEDNEQKQLFVEQHKHYLDEIIEQISEFSKRVILADANLDKVLSAYNKHRDKPIREQAENIIHLFTLTNLGAPAAFKYFDTTIDRKRYTSTKEVLDATLIHQSITGLYETRIDLSQLGGDGGGSSGGGEAAAKGGLGIEDEYRLHETSTEPDVSLGSTWLSDFPQAWAETGGMGLAVRQAPLIIPLKATSTPVSIQQYPMSHEARLGIKPHIQRLLDQGILVPCQSPWNTPLLPVKKPGTNDYRPVQDLREVNKRVEDIHPTVPNPYNLLSGLPPSHQWYTVLDLKDAFFCLRLHPTSQPLFAFEWRDPGMGISGQLTWTRLPQGFKNSPTLFNEALHRDLADFRIQHPDLILLQYVDDILLAATSELDCQQGTRALLQTLGDLGYRASAKKAQICQKQVKYLGYLLREGQRWLTEARKETVMGQPVPKTPRQLREFLGKAGFCRLFIPGFAEMAAPLYPLTKPGTLFSWGPDQQKAYQEIKQALLTAPALGLPDLTKPFELFVDEKQGYAKGVLTQKLGPWRRPVAYLSKKLDPVAAGWPPCLRMVAAIAVLTKDAGKLTMGQPLVILAPHAVEALVKQPPDRWLSNARMTHYQAMLLDTDRVQFGPVVALNPATLLPLPEEGAPHDCLEILAETHGTRPDLTDQPIPDADHTWYTDGSSFLQEGQRKAGAAVTTETEVIWAGALPAGTSAQRAELIALTQALKMAEGKRLNVYTDSRYAFATAHIHGEIYRRRGWLTSEGREIKNKSEILALLKALFLPKRLSIIHCLGHQKGDSAEARGNRLADQAAREAAIKTPPDTSTLLIAGKRTADGSEFEKRTADGSEFESPKKKAKVE

SEQ ID NO: 2109 - protein, 2096 aa, synthetic construct
  source 1..2096: note = Description of Artificial Sequence: Synthetic polypeptide
MPAAKRVKLDGGDKKYSIGLDIGTNSVGWAVITDEYKVPSKKFKVLGNTDRHSIKKNLIGALLFDSGETAEATRLKRTARRRYTRRKNRICYLQEIFSNEMAKVDDSFFHRLEESFLVEEDKKHERHPIFGNIVDEVAYHEKYPTIYHLRKKLVDSTDKADLRLIYLALAHMIKFRGHFLIEGDLNPDNSDVDKLFIQLVQTYNQLFEENPINASGVDAKAILSARLSKSRRLENLIAQLPGEKKNGLFGNLIALSLGLTPNFKSNFDLAEDAKLQLSKDTYDDDLDNLLAQIGDQYADLFLAAKNLSDAILLSDILRVNTEITKAPLSASMIKRYDEHHQDLTLLKALVRQQLPEKYKEIFFDQSKNGYAGYIDGGASQEEFYKFIKPILEKMDGTEELLVKLNREDLLRKQRTFDNGSIPHQIHLGELHAILRRQEDFYPFLKDNREKIEKILTFRIPYYVGPLARGNSRFAWMTRKSEETITPWNFEEVVDKGASAQSFIERMTNFDKNLPNEKVLPKHSLLYEYFTVYNELTKVKYVTEGMRKPAFLSGEQKKAIVDLLFKTNRKVTVKQLKEDYFKKIECFDSVEISGVEDRFNASLGTYHDLLKIIKDKDFLDNEENEDILEDIVLTLTLFEDREMIEERLKTYAHLFDDKVMKQLKRRRYTGWGRLSRKLINGIRDKQSGKTILDFLKSDGFANRNFMQLIHDDSLTFKEDIQKAQVSGQGDSLHEHIANLAGSPAIKKGILQTVKVVDELVKVMGRHKPENIVIEMARENQTTQKGQKNSRERMKRIEEGIKELGSQILKEHPVENTQLQNEKLYLYYLQNGRDMYVDQELDINRLSDYDVDHIVPQSFLKDDSIDNKVLTRSDKARGKSDNVPSEEVVKKMKNYWRQLLNAKLITQRKFDNLTKAERGGLSELDKAGFIKRQLVETRQITKHVAQILDSRMNTKYDENDKLIREVKVITLKSKLVSDFRKDFQFYKVREINNYHHAHDAYLNAVVGTALIKKYPKLESEFVYGDYKVYDVRKMIAKSEQEIGKATAKYFFYSNIMNFFKTEITLANGEIRKRPLIETNGETGEIVWDKGRDFATVRKVLSMPQVNIVKKTEVQTGGFSKESILPKRNSDKLIARKKDWDPKKYGGFDSPTVAYSVLVVAKVEKGKSKKLKSVKELLGITIMERSSFEKNPIDFLEAKGYKEVKKDLIIKLPKYSLFELENGRKRMLASAGELQKGNELALPSKYVNFLYLASHYEKLKGSPEDNEQKQLFVEQHKHYLDEIIEQISEFSKRVILADANLDKVLSAYNKHRDKPIREQAENIIHLFTLTNLGAPAAFKYFDTTIDRKRYTSTKEVLDATLIHQSITGLYETRIDLSQLGGDGGGSSEAAAKPAPGGLGIEDEYRLHETSTEPDVSLGSTWLSDFPQAWAETGGMGLAVRQAPLIIPLKATSTPVSIQQYPMSHEARLGIKPHIQRLLDQGILVPCQSPWNTPLLPVKKPGTNDYRPVQDLREVNKRVEDIHPTVPNPYNLLSGLPPSHQWYTVLDLKDAFFCLRLHPTSQPLFAFEWRDPGMGISGQLTWTRLPQGFKNSPTLFNEALHRDLADFRIQHPDLILLQYVDDILLAATSELDCQQGTRALLQTLGDLGYRASAKKAQICQKQVKYLGYLLREGQRWLTEARKETVMGQPVPKTPRQLREFLGKAGFCRLFIPGFAEMAAPLYPLTKPGTLFSWGPDQQKAYQEIKQALLTAPALGLPDLTKPFELFVDEKQGYAKGVLTQKLGPWRRPVAYLSKKLDPVAAGWPPCLRMVAAIAVLTKDAGKLTMGQPLVILAPHAVEALVKQPPDRWLSNARMTHYQAMLLDTDRVQFGPVVALNPATLLPLPEEGAPHDCLEILAETHGTRPDLTDQPIPDADHTWYTDGSSFLQEGQRKAGAAVTTETEVIWAGALPAGTSAQRAELIALTQALKMAEGKRLNVYTDSRYAFATAHIHGEIYRRRGWLTSEGREIKNKSEILALLKALFLPKRLSIIHCLGHQKGDSAEARGNRLADQAAREAAIKTPPDTSTLLIAGKRTADGSEFEKRTADGSEFESPKKKAKVE

SEQ ID NO: 2110 - protein, 2092 aa, synthetic construct
  source 1..2092: note = Description of Artificial Sequence: Synthetic polypeptide
MPAAKRVKLDGGDKKYSIGLDIGTNSVGWAVITDEYKVPSKKFKVLGNTDRHSIKKNLIGALLFDSGETAEATRLKRTARRRYTRRKNRICYLQEIFSNEMAKVDDSFFHRLEESFLVEEDKKHERHPIFGNIVDEVAYHEKYPTIYHLRKKLVDSTDKADLRLIYLALAHMIKFRGHFLIEGDLNPDNSDVDKLFIQLVQTYNQLFEENPINASGVDAKAILSARLSKSRRLENLIAQLPGEKKNGLFGNLIALSLGLTPNFKSNFDLAEDAKLQLSKDTYDDDLDNLLAQIGDQYADLFLAAKNLSDAILLSDILRVNTEITKAPLSASMIKRYDEHHQDLTLLKALVRQQLPEKYKEIFFDQSKNGYAGYIDGGASQEEFYKFIKPILEKMDGTEELLVKLNREDLLRKQRTFDNGSIPHQIHLGELHAILRRQEDFYPFLKDNREKIEKILTFRIPYYVGPLARGNSRFAWMTRKSEETITPWNFEEVVDKGASAQSFIERMTNFDKNLPNEKVLPKHSLLYEYFTVYNELTKVKYVTEGMRKPAFLSGEQKKAIVDLLFKTNRKVTVKQLKEDYFKKIECFDSVEISGVEDRFNASLGTYHDLLKIIKDKDFLDNEENEDILEDIVLTLTLFEDREMIEERLKTYAHLFDDKVMKQLKRRRYTGWGRLSRKLINGIRDKQSGKTILDFLKSDGFANRNFMQLIHDDSLTFKEDIQKAQVSGQGDSLHEHIANLAGSPAIKKGILQTVKVVDELVKVMGRHKPENIVIEMARENQTTQKGQKNSRERMKRIEEGIKELGSQILKEHPVENTQLQNEKLYLYYLQNGRDMYVDQELDINRLSDYDVDHIVPQSFLKDDSIDNKVLTRSDKARGKSDNVPSEEVVKKMKNYWRQLLNAKLITQRKFDNLTKAERGGLSELDKAGFIKRQLVETRQITKHVAQILDSRMNTKYDENDKLIREVKVITLKSKLVSDFRKDFQFYKVREINNYHHAHDAYLNAVVGTALIKKYPKLESEFVYGDYKVYDVRKMIAKSEQEIGKATAKYFFYSNIMNFFKTEITLANGEIRKRPLIETNGETGEIVWDKGRDFATVRKVLSMPQVNIVKKTEVQTGGFSKESILPKRNSDKLIARKKDWDPKKYGGFDSPTVAYSVLVVAKVEKGKSKKLKSVKELLGITIMERSSFEKNPIDFLEAKGYKEVKKDLIIKLPKYSLFELENGRKRMLASAGELQKGNELALPSKYVNFLYLASHYEKLKGSPEDNEQKQLFVEQHKHYLDEIIEQISEFSKRVILADANLDKVLSAYNKHRDKPIREQAENIIHLFTLTNLGAPAAFKYFDTTIDRKRYTSTKEVLDATLIHQSITGLYETRIDLSQLGGDGGGGGGGGGGGLGIEDEYRLHETSTEPDVSLGSTWLSDFPQAWAETGGMGLAVRQAPLIIPLKATSTPVSIQQYPMSHEARLGIKPHIQRLLDQGILVPCQSPWNTPLLPVKKPGTNDYRPVQDLREVNKRVEDIHPTVPNPYNLLSGLPPSHQWYTVLDLKDAFFCLRLHPTSQPLFAFEWRDPGMGISGQLTWTRLPQGFKNSPTLFNEALHRDLADFRIQHPDLILLQYVDDILLAATSELDCQQGTRALLQTLGDLGYRASAKKAQICQKQVKYLGYLLREGQRWLTEARKETVMGQPVPKTPRQLREFLGKAGFCRLFIPGFAEMAAPLYPLTKPGTLFSWGPDQQKAYQEIKQALLTAPALGLPDLTKPFELFVDEKQGYAKGVLTQKLGPWRRPVAYLSKKLDPVAAGWPPCLRMVAAIAVLTKDAGKLTMGQPLVILAPHAVEALVKQPPDRWLSNARMTHYQAMLLDTDRVQFGPVVALNPATLLPLPEEGAPHDCLEILAETHGTRPDLTDQPIPDADHTWYTDGSSFLQEGQRKAGAAVTTETEVIWAGALPAGTSAQRAELIALTQALKMAEGKRLNVYTDSRYAFATAHIHGEIYRRRGWLTSEGREIKNKSEILALLKALFLPKRLSIIHCLGHQKGDSAEARGNRLADQAAREAAIKTPPDTSTLLIAGKRTADGSEFEKRTADGSEFESPKKKAKVE

SEQ ID NO: 2111 - protein, 2091 aa, synthetic construct
  source 1..2091: note = Description of Artificial Sequence: Synthetic polypeptide
MPAAKRVKLDGGDKKYSIGLDIGTNSVGWAVITDEYKVPSKKFKVLGNTDRHSIKKNLIGALLFDSGETAEATRLKRTARRRYTRRKNRICYLQEIFSNEMAKVDDSFFHRLEESFLVEEDKKHERHPIFGNIVDEVAYHEKYPTIYHLRKKLVDSTDKADLRLIYLALAHMIKFRGHFLIEGDLNPDNSDVDKLFIQLVQTYNQLFEENPINASGVDAKAILSARLSKSRRLENLIAQLPGEKKNGLFGNLIALSLGLTPNFKSNFDLAEDAKLQLSKDTYDDDLDNLLAQIGDQYADLFLAAKNLSDAILLSDILRVNTEITKAPLSASMIKRYDEHHQDLTLLKALVRQQLPEKYKEIFFDQSKNGYAGYIDGGASQEEFYKFIKPILEKMDGTEELLVKLNREDLLRKQRTFDNGSIPHQIHLGELHAILRRQEDFYPFLKDNREKIEKILTFRIPYYVGPLARGNSRFAWMTRKSEETITPWNFEEVVDKGASAQSFIERMTNFDKNLPNEKVLPKHSLLYEYFTVYNELTKVKYVTEGMRKPAFLSGEQKKAIVDLLFKTNRKVTVKQLKEDYFKKIECFDSVEISGVEDRFNASLGTYHDLLKIIKDKDFLDNEENEDILEDIVLTLTLFEDREMIEERLKTYAHLFDDKVMKQLKRRRYTGWGRLSRKLINGIRDKQSGKTILDFLKSDGFANRNFMQLIHDDSLTFKEDIQKAQVSGQGDSLHEHIANLAGSPAIKKGILQTVKVVDELVKVMGRHKPENIVIEMARENQTTQKGQKNSRERMKRIEEGIKELGSQILKEHPVENTQLQNEKLYLYYLQNGRDMYVDQELDINRLSDYDVDHIVPQSFLKDDSIDNKVLTRSDKARGKSDNVPSEEVVKKMKNYWRQLLNAKLITQRKFDNLTKAERGGLSELDKAGFIKRQLVETRQITKHVAQILDSRMNTKYDENDKLIREVKVITLKSKLVSDFRKDFQFYKVREINNYHHAHDAYLNAVVGTALIKKYPKLESEFVYGDYKVYDVRKMIAKSEQEIGKATAKYFFYSNIMNFFKTEITLANGEIRKRPLIETNGETGEIVWDKGRDFATVRKVLSMPQVNIVKKTEVQTGGFSKESILPKRNSDKLIARKKDWDPKKYGGFDSPTVAYSVLVVAKVEKGKSKKLKSVKELLGITIMERSSFEKNPIDFLEAKGYKEVKKDLIIKLPKYSLFELENGRKRMLASAGELQKGNELALPSKYVNFLYLASHYEKLKGSPEDNEQKQLFVEQHKHYLDEIIEQISEFSKRVILADANLDKVLSAYNKHRDKPIREQAENIIHLFTLTNLGAPAAFKYFDTTIDRKRYTSTKEVLDATLIHQSITGLYETRIDLSQLGGDGGGGGGGGGGLGIEDEYRLHETSTEPDVSLGSTWLSDFPQAWAETGGMGLAVRQAPLIIPLKATSTPVSIQQYPMSHEARLGIKPHIQRLLDQGILVPCQSPWNTPLLPVKKPGTNDYRPVQDLREVNKRVEDIHPTVPNPYNLLSGLPPSHQWYTVLDLKDAFFCLRLHPTSQPLFAFEWRDPGMGISGQLTWTRLPQGFKNSPTLFNEALHRDLADFRIQHPDLILLQYVDDILLAATSELDCQQGTRALLQTLGDLGYRASAKKAQICQKQVKYLGYLLREGQRWLTEARKETVMGQPVPKTPRQLREFLGKAGFCRLFIPGFAEMAAPLYPLTKPGTLFSWGPDQQKAYQEIKQALLTAPALGLPDLTKPFELFVDEKQGYAKGVLTQKLGPWRRPVAYLSKKLDPVAAGWPPCLRMVAAIAVLTKDAGKLTMGQPLVILAPHAVEALVKQPPDRWLSNARMTHYQAMLLDTDRVQFGPVVALNPATLLPLPEEGAPHDCLEILAETHGTRPDLTDQPIPDADHTWYTDGSSFLQEGQRKAGAAVTTETEVIWAGALPAGTSAQRAELIALTQALKMAEGKRLNVYTDSRYAFATAHIHGEIYRRRGWLTSEGREIKNKSEILALLKALFLPKRLSIIHCLGHQKGDSAEARGNRLADQAAREAAIKTPPDTSTLLIAGKRTADGSEFEKRTADGSEFESPKKKAKVE

SEQ ID NO: 2112 - protein, 2096 aa, synthetic construct
  source 1..2096: note = Description of Artificial Sequence: Synthetic polypeptide
MPAAKRVKLDGGDKKYSIGLDIGTNSVGWAVITDEYKVPSKKFKVLGNTDRHSIKKNLIGALLFDSGETAEATRLKRTARRRYTRRKNRICYLQEIFSNEMAKVDDSFFHRLEESFLVEEDKKHERHPIFGNIVDEVAYHEKYPTIYHLRKKLVDSTDKADLRLIYLALAHMIKFRGHFLIEGDLNPDNSDVDKLFIQLVQTYNQLFEENPINASGVDAKAILSARLSKSRRLENLIAQLPGEKKNGLFGNLIALSLGLTPNFKSNFDLAEDAKLQLSKDTYDDDLDNLLAQIGDQYADLFLAAKNLSDAILLSDILRVNTEITKAPLSASMIKRYDEHHQDLTLLKALVRQQLPEKYKEIFFDQSKNGYAGYIDGGASQEEFYKFIKPILEKMDGTEELLVKLNREDLLRKQRTFDNGSIPHQIHLGELHAILRRQEDFYPFLKDNREKIEKILTFRIPYYVGPLARGNSRFAWMTRKSEETITPWNFEEVVDKGASAQSFIERMTNFDKNLPNEKVLPKHSLLYEYFTVYNELTKVKYVTEGMRKPAFLSGEQKKAIVDLLFKTNRKVTVKQLKEDYFKKIECFDSVEISGVEDRFNASLGTYHDLLKIIKDKDFLDNEENEDILEDIVLTLTLFEDREMIEERLKTYAHLFDDKVMKQLKRRRYTGWGRLSRKLINGIRDKQSGKTILDFLKSDGFANRNFMQLIHDDSLTFKEDIQKAQVSGQGDSLHEHIANLAGSPAIKKGILQTVKVVDELVKVMGRHKPENIVIEMARENQTTQKGQKNSRERMKRIEEGIKELGSQILKEHPVENTQLQNEKLYLYYLQNGRDMYVDQELDINRLSDYDVDHIVPQSFLKDDSIDNKVLTRSDKARGKSDNVPSEEVVKKMKNYWRQLLNAKLITQRKFDNLTKAERGGLSELDKAGFIKRQLVETRQITKHVAQILDSRMNTKYDENDKLIREVKVITLKSKLVSDFRKDFQFYKVREINNYHHAHDAYLNAVVGTALIKKYPKLESEFVYGDYKVYDVRKMIAKSEQEIGKATAKYFFYSNIMNFFKTEITLANGEIRKRPLIETNGETGEIVWDKGRDFATVRKVLSMPQVNIVKKTEVQTGGFSKESILPKRNSDKLIARKKDWDPKKYGGFDSPTVAYSVLVVAKVEKGKSKKLKSVKELLGITIMERSSFEKNPIDFLEAKGYKEVKKDLIIKLPKYSLFELENGRKRMLASAGELQKGNELALPSKYVNFLYLASHYEKLKGSPEDNEQKQLFVEQHKHYLDEIIEQISEFSKRVILADANLDKVLSAYNKHRDKPIREQAENIIHLFTLTNLGAPAAFKYFDTTIDRKRYTSTKEVLDATLIHQSITGLYETRIDLSQLGGDGGEAAAKGGSPAPGGLGIEDEYRLHETSTEPDVSLGSTWLSDFPQAWAETGGMGLAVRQAPLIIPLKATSTPVSIQQYPMSHEARLGIKPHIQRLLDQGILVPCQSPWNTPLLPVKKPGTNDYRPVQDLREVNKRVEDIHPTVPNPYNLLSGLPPSHQWYTVLDLKDAFFCLRLHPTSQPLFAFEWRDPGMGISGQLTWTRLPQGFKNSPTLFNEALHRDLADFRIQHPDLILLQYVDDILLAATSELDCQQGTRALLQTLGDLGYRASAKKAQICQKQVKYLGYLLREGQRWLTEARKETVMGQPVPKTPRQLREFLGKAGFCRLFIPGFAEMAAPLYPLTKPGTLFSWGPDQQKAYQEIKQALLTAPALGLPDLTKPFELFVDEKQGYAKGVLTQKLGPWRRPVAYLSKKLDPVAAGWPPCLRMVAAIAVLTKDAGKLTMGQPLVILAPHAVEALVKQPPDRWLSNARMTHYQAMLLDTDRVQFGPVVALNPATLLPLPEEGAPHDCLEILAETHGTRPDLTDQPIPDADHTWYTDGSSFLQEGQRKAGAAVTTETEVIWAGALPAGTSAQRAELIALTQALKMAEGKRLNVYTDSRYAFATAHIHGEIYRRRGWLTSEGREIKNKSEILALLKALFLPKRLSIIHCLGHQKGDSAEARGNRLADQAAREAAIKTPPDTSTLLIAGKRTADGSEFEKRTADGSEFESPKKKAKVE

SEQ ID NO: 2113 - protein, 2088 aa, synthetic construct; identical to SEQ ID NO: 2053
  source 1..2088: note = Description of Artificial Sequence: Synthetic polypeptide

SEQ ID NO: 2114 - protein, 2094 aa, synthetic construct; identical to SEQ ID NO: 2060
  source 1..2094: note = Description of Artificial Sequence: Synthetic polypeptide

SEQ ID NO: 2115 - protein, 2093 aa, synthetic construct
  source 1..2093: note = Description of Artificial Sequence: Synthetic polypeptide
MPAAKRVKLDGGDKKYSIGLDIGTNSVGWAVITDEYKVPSKKFKVLGNTDRHSIKKNLIGALLFDSGETAEATRLKRTARRRYTRRKNRICYLQEIFSNEMAKVDDSFFHRLEESFLVEEDKKHERHPIFGNIVDEVAYHEKYPTIYHLRKKLVDSTDKADLRLIYLALAHMIKFRGHFLIEGDLNPDNSDVDKLFIQLVQTYNQLFEENPINASGVDAKAILSARLSKSRRLENLIAQLPGEKKNGLFGNLIALSLGLTPNFKSNFDLAEDAKLQLSKDTYDDDLDNLLAQIGDQYADLFLAAKNLSDAILLSDILRVNTEITKAPLSASMIKRYDEHHQDLTLLKALVRQQLPEKYKEIFFDQSKNGYAGYIDGGASQEEFYKFIKPILEKMDGTEELLVKLNREDLLRKQRTFDNGSIPHQIHLGELHAILRRQEDFYPFLKDNREKIEKILTFRIPYYVGPLARGNSRFAWMTRKSEETITPWNFEEVVDKGASAQSFIERMTNFDKNLPNEKVLPKHSLLYEYFTVYNELTKVKYVTEGMRKPAFLSGEQKKAIVDLLFKTNRKVTVKQLKEDYFKKIECFDSVEISGVEDRFNASLGTYHDLLKIIKDKDFLDNEENEDILEDIVLTLTLFEDREMIEERLKTYAHLFDDKVMKQLKRRRYTGWGRLSRKLINGIRDKQSGKTILDFLKSDGFANRNFMQLIHDDSLTFKEDIQKAQVSGQGDSLHEHIANLAGSPAIKKGILQTVKVVDELVKVMGRHKPENIVIEMARENQTTQKGQKNSRERMKRIEEGIKELGSQILKEHPVENTQLQNEKLYLYYLQNGRDMYVDQELDINRLSDYDVDHIVPQSFLKDDSIDNKVLTRSDKARGKSDNVPSEEVVKKMKNYWRQLLNAKLITQRKFDNLTKAERGGLSELDKAGFIKRQLVETRQITKHVAQILDSRMNTKYDENDKLIREVKVITLKSKLVSDFRKDFQFYKVREINNYHHAHDAYLNAVVGTALIKKYPKLESEFVYGDYKVYDVRKMIAKSEQEIGKATAKYFFYSNIMNFFKTEITLANGEIRKRPLIETNGETGEIVWDKGRDFATVRKVLSMPQVNIVKKTEVQTGGFSKESILPKRNSDKLIARKKDWDPKKYGGFDSPTVAYSVLVVAKVEKGKSKKLKSVKELLGITIMERSSFEKNPIDFLEAKGYKEVKKDLIIKLPKYSLFELENGRKRMLASAGELQKGNELALPSKYVNFLYLASHYEKLKGSPEDNEQKQLFVEQHKHYLDEIIEQISEFSKRVILADANLDKVLSAYNKHRDKPIREQAENIIHLFTLTNLGAPAAFKYFDTTIDRKRYTSTKEVLDATLIHQSITGLYETRIDLSQLGGDGGGSSEAAAKGGLGIEDEYRLHETSTEPDVSLGSTWLSDFPQAWAETGGMGLAVRQAPLIIPLKATSTPVSIQQYPMSHEARLGIKPHIQRLLDQGILVPCQSPWNTPLLPVKKPGTNDYRPVQDLREVNKRVEDIHPTVPNPYNLLSGLPPSHQWYTVLDLKDAFFCLRLHPTSQPLFAFEWRDPGMGISGQLTWTRLPQGFKNSPTLFNEALHRDLADFRIQHPDLILLQYVDDILLAATSELDCQQGTRALLQTLGDLGYRASAKKAQICQKQVKYLGYLLREGQRWLTEARKETVMGQPVPKTPRQLREFLGKAGFCRLFIPGFAEMAAPLYPLTKPGTLFSWGPDQQKAYQEIKQALLTAPALGLPDLTKPFELFVDEKQGYAKGVLTQKLGPWRRPVAYLSKKLDPVAAGWPPCLRMVAAIAVLTKDAGKLTMGQPLVILAPHAVEALVKQPPDRWLSNARMTHYQAMLLDTDRVQFGPVVALNPATLLPLPEEGAPHDCLEILAETHGTRPDLTDQPIPDADHTWYTDGSSFLQEGQRKAGAAVTTETEVIWAGALPAGTSAQRAELIALTQALKMAEGKRLNVYTDSRYAFATAHIHGEIYRRRGWLTSEGREIKNKSEILALLKALFLPKRLSIIHCLGHQKGDSAEARGNRLADQAAREAAIKTPPDTSTLLIAGKRTADGSEFEKRTADGSEFESPKKKAKVE

SEQ ID NO: 2116 - protein, 2100 aa, synthetic construct
  source 1..2100: note = Description of Artificial Sequence: Synthetic polypeptide
MPAAKRVKLDGGDKKYSIGLDIGTNSVGWAVITDEYKVPSKKFKVLGNTDRHSIKKNLIGALLFDSGETAEATRLKRTARRRYTRRKNRICYLQEIFSNEMAKVDDSFFHRLEESFLVEEDKKHERHPIFGNIVDEVAYHEKYPTIYHLRKKLVDSTDKADLRLIYLALAHMIKFRGHFLIEGDLNPDNSDVDKLFIQLVQTYNQLFEENPINASGVDAKAILSARLSKSRRLENLIAQLPGEKKNGLFGNLIALSLGLTPNFKSNFDLAEDAKLQLSKDTYDDDLDNLLAQIGDQYADLFLAAKNLSDAILLSDILRVNTEITKAPLSASMIKRYDEHHQDLTLLKALVRQQLPEKYKEIFFDQSKNGYAGYIDGGASQEEFYKFIKPILEKMDGTEELLVKLNREDLLRKQRTFDNGSIPHQIHLGELHAILRRQEDFYPFLKDNREKIEKILTFRIPYYVGPLARGNSRFAWMTRKSEETITPWNFEEVVDKGASAQSFIERMTNFDKNLPNEKVLPKHSLLYEYFTVYNELTKVKYVTEGMRKPAFLSGEQKKAIVDLLFKTNRKVTVKQLKEDYFKKIECFDSVEISGVEDRFNASLGTYHDLLKIIKDKDFLDNEENEDILEDIVLTLTLFEDREMIEERLKTYAHLFDDKVMKQLKRRRYTGWGRLSRKLINGIRDKQSGKTILDFLKSDGFANRNFMQLIHDDSLTFKEDIQKAQVSGQGDSLHEHIANLAGSPAIKKGILQTVKVVDELVKVMGRHKPENIVIEMARENQTTQKGQKNSRERMKRIEEGIKELGSQILKEHPVENTQLQNEKLYLYYLQNGRDMYVDQELDINRLSDYDVDHIVPQSFLKDDSIDNKVLTRSDKARGKSDNVPSEEVVKKMKNYWRQLLNAKLITQRKFDNLTKAERGGLSELDKAGFIKRQLVETRQITKHVAQILDSRMNTKYDENDKLIREVKVITLKSKLVSDFRKDFQFYKVREINNYHHAHDAYLNAVVGTALIKKYPKLESEFVYGDYKVYDVRKMIAKSEQEIGKATAKYFFYSNIMNFFKTEITLANGEIRKRPLIETNGETGEIVWDKGRDFATVRKVLSMPQVNIVKKTEVQTGGFSKESILPKRNSDKLIARKKDWDPKKYGGFDSPTVAYSVLVVAKVEKGKSKKLKSVKELLGITIMERSSFEKNPIDFLEAKGYKEVKKDLIIKLPKYSLFELENGRKRMLASAGELQKGNELALPSKYVNFLYLASHYEKLKGSPEDNEQKQLFVEQHKHYLDEIIEQISEFSKRVILADANLDKVLSAYNKHRDKPIREQAENIIHLFTLTNLGAPAAFKYFDTTIDRKRYTSTKEVLDATLIHQSITGLYETRIDLSQLGGDGGGGGGSGGGGSGGGGSGGLGIEDEYRLHETSTEPDVSLGSTWLSDFPQAWAETGGMGLAVRQAPLIIPLKATSTPVSIQQYPMSHEARLGIKPHIQRLLDQGILVPCQSPWNTPLLPVKKPGTNDYRPVQDLREVNKRVEDIHPTVPNPYNLLSGLPPSHQWYTVLDLKDAFFCLRLHPTSQPLFAFEWRDPGMGISGQLTWTRLPQGFKNSPTLFNEALHRDLADFRIQHPDLILLQYVDDILLAATSELDCQQGTRALLQTLGDLGYRASAKKAQICQKQVKYLGYLLREGQRWLTEARKETVMGQPVPKTPRQLREFLGKAGFCRLFIPGFAEMAAPLYPLTKPGTLFSWGPDQQKAYQEIKQALLTAPALGLPDLTKPFELFVDEKQGYAKGVLTQKLGPWRRPVAYLSKKLDPVAAGWPPCLRMVAAIAVLTKDAGKLTMGQPLVILAPHAVEALVKQPPDRWLSNARMTHYQAMLLDTDRVQFGPVVALNPATLLPLPEEGAPHDCLEILAETHGTRPDLTDQPIPDADHTWYTDGSSFLQEGQRKAGAAVTTETEVIWAGALPAGTSAQRAELIALTQALKMAEGKRLNVYTDSRYAFATAHIHGEIYRRRGWLTSEGREIKNKSEILALLKALFLPKRLSIIHCLGHQKGDSAEARGNRLADQAAREAAIKTPPDTSTLLIAGKRTADGSEFEKRTADGSEFESPKKKAKVE

SEQ ID NO: 2117 - protein, 2096 aa, synthetic construct
  source 1..2096: note = Description of Artificial Sequence: Synthetic polypeptide
MPAAKRVKLDGGDKKYSIGLDIGTNSVGWAVITDEYKVPSKKFKVLGNTDRHSIKKNLIGALLFDSGETAEATRLKRTARRRYTRRKNRICYLQEIFSNEMAKVDDSFFHRLEESFLVEEDKKHERHPIFGNIVDEVAYHEKYPTIYHLRKKLVDSTDKADLRLIYLALAHMIKFRGHFLIEGDLNPDNSDVDKLFIQLVQTYNQLFEENPINASGVDAKAILSARLSKSRRLENLIAQLPGEKKNGLFGNLIALSLGLTPNFKSNFDLAEDAKLQLSKDTYDDDLDNLLAQIGDQYADLFLAAKNLSDAILLSDILRVNTEITKAPLSASMIKRYDEHHQDLTLLKALVRQQLPEKYKEIFFDQSKNGYAGYIDGGASQEEFYKFIKPILEKMDGTEELLVKLNREDLLRKQRTFDNGSIPHQIHLGELHAILRRQEDFYPFLKDNREKIEKILTFRIPYYVGPLARGNSRFAWMTRKSEETITPWNFEEVVDKGASAQSFIERMTNFDKNLPNEKVLPKHSLLYEYFTVYNELTKVKYVTEGMRKPAFLSGEQKKAIVDLLFKTNRKVTVKQLKEDYFKKIECFDSVEISGVEDRFNASLGTYHDLLKIIKDKDFLDNEENEDILEDIVLTLTLFEDREMIEERLKTYAHLFDDKVMKQLKRRRYTGWGRLSRKLINGIRDKQSGKTILDFLKSDGFANRNFMQLIHDDSLTFKEDIQKAQVSGQGDSLHEHIANLAGSPAIKKGILQTVKVVDELVKVMGRHKPENIVIEMARENQTTQKGQKNSRERMKRIEEGIKELGSQILKEHPVENTQLQNEKLYLYYLQNGRDMYVDQELDINRLSDYDVDHIVPQSFLKDDSIDNKVLTRSDKARGKSDNVPSEEVVKKMKNYWRQLLNAKLITQRKFDNLTKAERGGLSELDKAGFIKRQLVETRQITKHVAQILDSRMNTKYDENDKLIREVKVITLKSKLVSDFRKDFQFYKVREINNYHHAHDAYLNAVVGTALIKKYPKLESEFVYGDYKVYDVRKMIAKSEQEIGKATAKYFFYSNIMNFFKTEITLANGEIRKRPLIETNGETGEIVWDKGRDFATVRKVLSMPQVNIVKKTEVQTGGFSKESILPKRNSDKLIARKKDWDPKKYGGFDSPTVAYSVLVVAKVEKGKSKKLKSVKELLGITIMERSSFEKNPIDFLEAKGYKEVKKDLIIKLPKYSLFELENGRKRMLASAGELQKGNELALPSKYVNFLYLASHYEKLKGSPEDNEQKQLFVEQHKHYLDEIIEQISEFSKRVILADANLDKVLSAYNKHRDKPIREQAENIIHLFTLTNLGAPAAFKYFDTTIDRKRYTSTKEVLDATLIHQSITGLYETRIDLSQLGGDGGGSSGGSEAAAKGGLGIEDEYRLHETSTEPDVSLGSTWLSDFPQAWAETGGMGLAVRQAPLIIPLKATSTPVSIQQYPMSHEARLGIKPHIQRLLDQGILVPCQSPWNTPLLPVKKPGTNDYRPVQDLREVNKRVEDIHPTVPNPYNLLSGLPPSHQWYTVLDLKDAFFCLRLHPTSQPLFAFEWRDPGMGISGQLTWTRLPQGFKNSPTLFNEALHRDLADFRIQHPDLILLQYVDDILLAATSELDCQQGTRALLQTLGDLGYRASAKKAQICQKQVKYLGYLLREGQRWLTEARKETVMGQPVPKTPRQLREFLGKAGFCRLFIPGFAEMAAPLYPLTKPGTLFSWGPDQQKAYQEIKQALLTAPALGLPDLTKPFELFVDEKQGYAKGVLTQKLGPWRRPVAYLSKKLDPVAAGWPPCLRMVAAIAVLTKDAGKLTMGQPLVILAPHAVEALVKQPPDRWLSNARMTHYQAMLLDTDRVQFGPVVALNPATLLPLPEEGAPHDCLEILAETHGTRPDLTDQPIPDADHTWYTDGSSFLQEGQRKAGAAVTTETEVIWAGALPAGTSAQRAELIALTQALKMAEGKRLNVYTDSRYAFATAHIHGEIYRRRGWLTSEGREIKNKSEILALLKALFLPKRLSIIHCLGHQKGDSAEARGNRLADQAAREAAIKTPPDTSTLLIAGKRTADGSEFEKRTADGSEFESPKKKAKVE

SEQ ID NO: 2118 - protein, 2100 aa, synthetic construct
  source 1..2100: note = Description of Artificial Sequence: Synthetic polypeptide
MPAAKRVKLDGGDKKYSIGLDIGTNSVGWAVITDEYKVPSKKFKVLGNTDRHSIKKNLIGALLFDSGETAEATRLKRTARRRYTRRKNRICYLQEIFSNEMAKVDDSFFHRLEESFLVEEDKKHERHPIFGNIVDEVAYHEKYPTIYHLRKKLVDSTDKADLRLIYLALAHMIKFRGHFLIEGDLNPDNSDVDKLFIQLVQTYNQLFEENPINASGVDAKAILSARLSKSRRLENLIAQLPGEKKNGLFGNLIALSLGLTPNFKSNFDLAEDAKLQLSKDTYDDDLDNLLAQIGDQYADLFLAAKNLSDAILLSDILRVNTEITKAPLSASMIKRYDEHHQDLTLLKALVRQQLPEKYKEIFFDQSKNGYAGYIDGGASQEEFYKFIKPILEKMDGTEELLVKLNREDLLRKQRTFDNGSIPHQIHLGELHAILRRQEDFYPFLKDNREKIEKILTFRIPYYVGPLARGNSRFAWMTRKSEETITPWNFEEVVDKGASAQSFIERMTNFDKNLPNEKVLPKHSLLYEYFTVYNELTKVKYVTEGMRKPAFLSGEQKKAIVDLLFKTNRKVTVKQLKEDYFKKIECFDSVEISGVEDRFNASLGTYHDLLKIIKDKDFLDNEENEDILEDIVLTLTLFEDREMIEERLKTYAHLFDDKVMKQLKRRRYTGWGRLSRKLINGIRDKQSGKTILDFLKSDGFANRNFMQLIHDDSLTFKEDIQKAQVSGQGDSLHEHIANLAGSPAIKKGILQTVKVVDELVKVMGRHKPENIVIEMARENQTTQKGQKNSRERMKRIEEGIKELGSQILKEHPVENTQLQNEKLYLYYLQNGRDMYVDQELDINRLSDYDVDHIVPQSFLKDDSIDNKVLTRSDKARGKSDNVPSEEVVKKMKNYWRQLLNAKLITQRKFDNLTKAERGGLSELDKAGFIKRQLVETRQITKHVAQILDSRMNTKYDENDKLIREVKVITLKSKLVSDFRKDFQFYKVREINNYHHAHDAYLNAVVGTALIKKYPKLESEFVYGDYKVYDVRKMIAKSEQEIGKATAKYFFYSNIMNFFKTEITLANGEIRKRPLIETNGETGEIVWDKGRDFATVRKVLSMPQVNIVKKTEVQTGGFSKESILPKRNSDKLIARKKDWDPKKYGGFDSPTVAYSVLVVAKVEKGKSKKLKSVKELLGITIMERSSFEKNPIDFLEAKGYKEVKKDLIIKLPKYSLFELENGRKRMLASAGELQKGNELALPSKYVNFLYLASHYEKLKGSPEDNEQKQLFVEQHKHYLDEIIEQISEFSKRVILADANLDKVLSAYNKHRDKPIREQAENIIHLFTLTNLGAPAAFKYFDTTIDRKRYTSTKEVLDATLIHQSITGLYETRIDLSQLGGDGGGGSGGSGGSGGSGGSGGLGIEDEYRLHETSTEPDVSLGSTWLSDFPQAWAETGGMGLAVRQAPLIIPLKATSTPVSIQQYPMSHEARLGIKPHIQRLLDQGILVPCQSPWNTPLLPVKKPGTNDYRPVQDLREVNKRVEDIHPTVPNPYNLLSGLPPSHQWYTVLDLKDAFFCLRLHPTSQPLFAFEWRDPGMGISGQLTWTRLPQGFKNSPTLFNEALHRDLADFRIQHPDLILLQYVDDILLAATSELDCQQGTRALLQTLGDLGYRASAKKAQICQKQVKYLGYLLREGQRWLTEARKETVMGQPVPKTPRQLREFLGKAGFCRLFIPGFAEMAAPLYPLTKPGTLFSWGPDQQKAYQEIKQALLTAPALGLPDLTKPFELFVDEKQGYAKGVLTQKLGPWRRPVAYLSKKLDPVAAGWPPCLRMVAAIAVLTKDAGKLTMGQPLVILAPHAVEALVKQPPDRWLSNARMTHYQAMLLDTDRVQFGPVVALNPATLLPLPEEGAPHDCLEILAETHGTRPDLTDQPIPDADHTWYTDGSSFLQEGQRKAGAAVTTETEVIWAGALPAGTSAQRAELIALTQALKMAEGKRLNVYTDSRYAFATAHIHGEIYRRRGWLTSEGREIKNKSEILALLKALFLPKRLSIIHCLGHQKGDSAEARGNRLADQAAREAAIKTPPDTSTLLIAGKRTADGSEFEKRTADGSEFESPKKKAKVE

SEQ ID NO: 2119 - protein, 2096 aa, synthetic construct
  source 1..2096: note = Description of Artificial Sequence: Synthetic polypeptide
MPAAKRVKLDGGDKKYSIGLDIGTNSVGWAVITDEYKVPSKKFKVLGNTDRHSIKKNLIGALLFDSGETAEATRLKRTARRRYTRRKNRICYLQEIFSNEMAKVDDSFFHRLEESFLVEEDKKHERHPIFGNIVDEVAYHEKYPTIYHLRKKLVDSTDKADLRLIYLALAHMIKFRGHFLIEGDLNPDNSDVDKLFIQLVQTYNQLFEENPINASGVDAKAILSARLSKSRRLENLIAQLPGEKKNGLFGNLIALSLGLTPNFKSNFDLAEDAKLQLSKDTYDDDLDNLLAQIGDQYADLFLAAKNLSDAILLSDILRVNTEITKAPLSASMIKRYDEHHQDLTLLKALVRQQLPEKYKEIFFDQSKNGYAGYIDGGASQEEFYKFIKPILEKMDGTEELLVKLNREDLLRKQRTFDNGSIPHQIHLGELHAILRRQEDFYPFLKDNREKIEKILTFRIPYYVGPLARGNSRFAWMTRKSEETITPWNFEEVVDKGASAQSFIERMTNFDKNLPNEKVLPKHSLLYEYFTVYNELTKVKYVTEGMRKPAFLSGEQKKAIVDLLFKTNRKVTVKQLKEDYFKKIECFDSVEISGVEDRFNASLGTYHDLLKIIKDKDFLDNEENEDILEDIVLTLTLFEDREMIEERLKTYAHLFDDKVMKQLKRRRYTGWGRLSRKLINGIRDKQSGKTILDFLKSDGFANRNFMQLIHDDSLTFKEDIQKAQVSGQGDSLHEHIANLAGSPAIKKGILQTVKVVDELVKVMGRHKPENIVIEMARENQTTQKGQKNSRERMKRIEEGIKELGSQILKEHPVENTQLQNEKLYLYYLQNGRDMYVDQELDINRLSDYDVDHIVPQSFLKDDSIDNKVLTRSDKARGKSDNVPSEEVVKKMKNYWRQLLNAKLITQRKFDNLTKAERGGLSELDKAGFIKRQLVETRQITKHVAQILDSRMNTKYDENDKLIREVKVITLKSKLVSDFRKDFQFYKVREINNYHHAHDAYLNAVVGTALIKKYPKLESEFVYGDYKVYDVRKMIAKSEQEIGKATAKYFFYSNIMNFFKTEITLANGEIRKRPLIETNGETGEIVWDKGRDFATVRKVLSMPQVNIVKKTEVQTGGFSKESILPKRNSDKLIARKKDWDPKKYGGFDSPTVAYSVLVVAKVEKGKSKKLKSVKELLGITIMERSSFEKNPIDFLEAKGYKEVKKDLIIKLPKYSLFELENGRKRMLASAGELQKGNELALPSKYVNFLYLASHYEKLKGSPEDNEQKQLFVEQHKHYLDEIIEQISEFSKRVILADANLDKVLSAYNKHRDKPIREQAENIIHLFTLTNLGAPAAFKYFDTTIDRKRYTSTKEVLDATLIHQSITGLYETRIDLSQLGGDGGEAAAKGSSGGSGGLGIEDEYRLHETSTEPDVSLGSTWLSDFPQAWAETGGMGLAVRQAPLIIPLKATSTPVSIQQYPMSHEARLGIKPHIQRLLDQGILVPCQSPWNTPLLPVKKPGTNDYRPVQDLREVNKRVEDIHPTVPNPYNLLSGLPPSHQWYTVLDLKDAFFCLRLHPTSQPLFAFEWRDPGMGISGQLTWTRLPQGFKNSPTLFNEALHRDLADFRIQHPDLILLQYVDDILLAATSELDCQQGTRALLQTLGDLGYRASAKKAQICQKQVKYLGYLLREGQRWLTEARKETVMGQPVPKTPRQLREFLGKAGFCRLFIPGFAEMAAPLYPLTKPGTLFSWGPDQQKAYQEIKQALLTAPALGLPDLTKPFELFVDEKQGYAKGVLTQKLGPWRRPVAYLSKKLDPVAAGWPPCLRMVAAIAVLTKDAGKLTMGQPLVILAPHAVEALVKQPPDRWLSNARMTHYQAMLLDTDRVQFGPVVALNPATLLPLPEEGAPHDCLEILAETHGTRPDLTDQPIPDADHTWYTDGSSFLQEGQRKAGAAVTTETEVIWAGALPAGTSAQRAELIALTQALKMAEGKRLNVYTDSRYAFATAHIHGEIYRRRGWLTSEGREIKNKSEILALLKALFLPKRLSIIHCLGHQKGDSAEARGNRLADQAAREAAIKTPPDTSTLLIAGKRTADGSEFEKRTADGSEFESPKKKAKVE

SEQ ID NO: 2120 - protein, 2096 aa, synthetic construct
  source 1..2096: note = Description of Artificial Sequence: Synthetic polypeptide
MPAAKRVKLDGGDKKYSIGLDIGTNSVGWAVITDEYKVPSKKFKVLGNTDRHSIKKNLIGALLFDSGETAEATRLKRTARRRYTRRKNRICYLQEIFSNEMAKVDDSFFHRLEESFLVEEDKKHERHPIFGNIVDEVAYHEKYPTIYHLRKKLVDSTDKADLRLIYLALAHMIKFRGHFLIEGDLNPDNSDVDKLFIQLVQTYNQLFEENPINASGVDAKAILSARLSKSRRLENLIAQLPGEKKNGLFGNLIALSLGLTPNFKSNFDLAEDAKLQLSKDTYDDDLDNLLAQIGDQYADLFLAAKNLSDAILLSDILRVNTEITKAPLSASMIKRYDEHHQDLTLLKALVRQQLPEKYKEIFFDQSKNGYAGYIDGGASQEEFYKFIKPILEKMDGTEELLVKLNREDLLRKQRTFDNGSIPHQIHLGELHAILRRQEDFYPFLKDNREKIEKILTFRIPYYVGPLARGNSRFAWMTRKSEETITPWNFEEVVDKGASAQSFIERMTNFDKNLPNEKVLPKHSLLYEYFTVYNELTKVKYVTEGMRKPAFLSGEQKKAIVDLLFKTNRKVTVKQLKEDYFKKIECFDSVEISGVEDRFNASLGTYHDLLKIIKDKDFLDNEENEDILEDIVLTLTLFEDREMIEERLKTYAHLFDDKVMKQLKRRRYTGWGRLSRKLINGIRDKQSGKTILDFLKSDGFANRNFMQLIHDDSLTFKEDIQKAQVSGQGDSLHEHIANLAGSPAIKKGILQTVKVVDELVKVMGRHKPENIVIEMARENQTTQKGQKNSRERMKRIEEGIKELGSQILKEHPVENTQLQNEKLYLYYLQNGRDMYVDQELDINRLSDYDVDHIVPQSFLKDDSIDNKVLTRSDKARGKSDNVPSEEVVKKMKNYWRQLLNAKLITQRKFDNLTKAERGGLSELDKAGFIKRQLVETRQITKHVAQILDSRMNTKYDENDKLIREVKVITLKSKLVSDFRKDFQFYKVREINNYHHAHDAYLNAVVGTALIKKYPKLESEFVYGDYKVYDVRKMIAKSEQEIGKATAKYFFYSNIMNFFKTEITLANGEIRKRPLIETNGETGEIVWDKGRDFATVRKVLSMPQVNIVKKTEVQTGGFSKESILPKRNSDKLIARKKDWDPKKYGGFDSPTVAYSVLVVAKVEKGKSKKLKSVKELLGITIMERSSFEKNPIDFLEAKGYKEVKKDLIIKLPKYSLFELENGRKRMLASAGELQKGNELALPSKYVNFLYLASHYEKLKGSPEDNEQKQLFVEQHKHYLDEIIEQISEFSKRVILADANLDKVLSAYNKHRDKPIREQAENIIHLFTLTNLGAPAAFKYFDTTIDRKRYTSTKEVLDATLIHQSITGLYETRIDLSQLGGDGGPAPEAAAKGGGGGLGIEDEYRLHETSTEPDVSLGSTWLSDFPQAWAETGGMGLAVRQAPLIIPLKATSTPVSIQQYPMSHEARLGIKPHIQRLLDQGILVPCQSPWNTPLLPVKKPGTNDYRPVQDLREVNKRVEDIHPTVPNPYNLLSGLPPSHQWYTVLDLKDAFFCLRLHPTSQPLFAFEWRDPGMGISGQLTWTRLPQGFKNSPTLFNEALHRDLADFRIQHPDLILLQYVDDILLAATSELDCQQGTRALLQTLGDLGYRASAKKAQICQKQVKYLGYLLREGQRWLTEARKETVMGQPVPKTPRQLREFLGKAGFCRLFIPGFAEMAAPLYPLTKPGTLFSWGPDQQKAYQEIKQALLTAPALGLPDLTKPFELFVDEKQGYAKGVLTQKLGPWRRPVAYLSKKLDPVAAGWPPCLRMVAAIAVLTKDAGKLTMGQPLVILAPHAVEALVKQPPDRWLSNARMTHYQAMLLDTDRVQFGPVVALNPATLLPLPEEGAPHDCLEILAETHGTRPDLTDQPIPDADHTWYTDGSSFLQEGQRKAGAAVTTETEVIWAGALPAGTSAQRAELIALTQALKMAEGKRLNVYTDSRYAFATAHIHGEIYRRRGWLTSEGREIKNKSEILALLKALFLPKRLSIIHCLGHQKGDSAEARGNRLADQAAREAAIKTPPDTSTLLIAGKRTADGSEFEKRTADGSEFESPKKKAKVE

SEQ ID NO: 2121 - protein, 2101 aa, synthetic construct
  source 1..2101: note = Description of Artificial Sequence: Synthetic polypeptide
MPAAKRVKLDGGDKKYSIGLDIGTNSVGWAVITDEYKVPSKKFKVLGNTDRHSIKKNLIGALLFDSGETAEATRLKRTARRRYTRRKNRICYLQEIFSNEMAKVDDSFFHRLEESFLVEEDKKHERHPIFGNIVDEVAYHEKYPTIYHLRKKLVDSTDKADLRLIYLALAHMIKFRGHFLIEGDLNPDNSDVDKLFIQLVQTYNQLFEENPINASGVDAKAILSARLSKSRRLENLIAQLPGEKKNGLFGNLIALSLGLTPNFKSNFDLAEDAKLQLSKDTYDDDLDNLLAQIGDQYADLFLAAKNLSDAILLSDILRVNTEITKAPLSASMIKRYDEHHQDLTLLKALVRQQLPEKYKEIFFDQSKNGYAGYIDGGASQEEFYKFIKPILEKMDGTEELLVKLNREDLLRKQRTFDNGSIPHQIHLGELHAILRRQEDFYPFLKDNREKIEKILTFRIPYYVGPLARGNSRFAWMTRKSEETITPWNFEEVVDKGASAQSFIERMTNFDKNLPNEKVLPKHSLLYEYFTVYNELTKVKYVTEGMRKPAFLSGEQKKAIVDLLFKTNRKVTVKQLKEDYFKKIECFDSVEISGVEDRFNASLGTYHDLLKIIKDKDFLDNEENEDILEDIVLTLTLFEDREMIEERLKTYAHLFDDKVMKQLKRRRYTGWGRLSRKLINGIRDKQSGKTILDFLKSDGFANRNFMQLIHDDSLTFKEDIQKAQVSGQGDSLHEHIANLAGSPAIKKGILQTVKVVDELVKVMGRHKPENIVIEMARENQTTQKGQKNSRERMKRIEEGIKELGSQILKEHPVENTQLQNEKLYLYYLQNGRDMYVDQELDINRLSDYDVDHIVPQSFLKDDSIDNKVLTRSDKARGKSDNVPSEEVVKKMKNYWRQLLNAKLITQRKFDNLTKAERGGLSELDKAGFIKRQLVETRQITKHVAQILDSRMNTKYDENDKLIREVKVITLKSKLVSDFRKDFQFYKVREINNYHHAHDAYLNAVVGTALIKKYPKLESEFVYGDYKVYDVRKMIAKSEQEIGKATAKYFFYSNIMNFFKTEITLANGEIRKRPLIETNGETGEIVWDKGRDFATVRKVLSMPQVNIVKKTEVQTGGFSKESILPKRNSDKLIARKKDWDPKKYGGFDSPTVAYSVLVVAKVEKGKSKKLKSVKELLGITIMERSSFEKNPIDFLEAKGYKEVKKDLIIKLPKYSLFELENGRKRMLASAGELQKGNELALPSKYVNFLYLASHYEKLKGSPEDNEQKQLFVEQHKHYLDEIIEQISEFSKRVILADANLDKVLSAYNKHRDKPIREQAENIIHLFTLTNLGAPAAFKYFDTTIDRKRYTSTKEVLDATLIHQSITGLYETRIDLSQLGGDGGSGSETPGTSESATPESGGLGIEDEYRLHETSTEPDVSLGSTWLSDFPQAWAETGGMGLAVRQAPLIIPLKATSTPVSIQQYPMSHEARLGIKPHIQRLLDQGILVPCQSPWNTPLLPVKKPGTNDYRPVQDLREVNKRVEDIHPTVPNPYNLLSGLPPSHQWYTVLDLKDAFFCLRLHPTSQPLFAFEWRDPGMGISGQLTWTRLPQGFKNSPTLFNEALHRDLADFRIQHPDLILLQYVDDILLAATSELDCQQGTRALLQTLGDLGYRASAKKAQICQKQVKYLGYLLREGQRWLTEARKETVMGQPVPKTPRQLREFLGKAGFCRLFIPGFAEMAAPLYPLTKPGTLFSWGPDQQKAYQEIKQALLTAPALGLPDLTKPFELFVDEKQGYAKGVLTQKLGPWRRPVAYLSKKLDPVAAGWPPCLRMVAAIAVLTKDAGKLTMGQPLVILAPHAVEALVKQPPDRWLSNARMTHYQAMLLDTDRVQFGPVVALNPATLLPLPEEGAPHDCLEILAETHGTRPDLTDQPIPDADHTWYTDGSSFLQEGQRKAGAAVTTETEVIWAGALPAGTSAQRAELIALTQALKMAEGKRLNVYTDSRYAFATAHIHGEIYRRRGWLTSEGREIKNKSEILALLKALFLPKRLSIIHCLGHQKGDSAEARGNRLADQAAREAAIKTPPDTSTLLIAGKRTADGSEFEKRTADGSEFESPKKKAKVE

SEQ ID NO: 2122 - protein, 2094 aa, synthetic construct; identical to SEQ ID NO: 2058
  source 1..2094: note = Description of Artificial Sequence: Synthetic polypeptide

SEQ ID NO: 2123 - protein, 2096 aa, synthetic construct; identical to SEQ ID NO: 2054
  source 1..2096: note = Description of Artificial Sequence: Synthetic polypeptide

SEQ ID NO: 2124 - protein, 2091 aa, synthetic construct
  source 1..2091: note = Description of Artificial Sequence: Synthetic polypeptide
MPAAKRVKLDGGDKKYSIGLDIGTNSVGWAVITDEYKVPSKKFKVLGNTDRHSIKKNLIGALLFDSGETAEATRLKRTARRRYTRRKNRICYLQEIFSNEMAKVDDSFFHRLEESFLVEEDKKHERHPIFGNIVDEVAYHEKYPTIYHLRKKLVDSTDKADLRLIYLALAHMIKFRGHFLIEGDLNPDNSDVDKLFIQLVQTYNQLFEENPINASGVDAKAILSARLSKSRRLENLIAQLPGEKKNGLFGNLIALSLGLTPNFKSNFDLAEDAKLQLSKDTYDDDLDNLLAQIGDQYADLFLAAKNLSDAILLSDILRVNTEITKAPLSASMIKRYDEHHQDLTLLKALVRQQLPEKYKEIFFDQSKNGYAGYIDGGASQEEFYKFIKPILEKMDGTEELLVKLNREDLLRKQRTFDNGSIPHQIHLGELHAILRRQEDFYPFLKDNREKIEKILTFRIPYYVGPLARGNSRFAWMTRKSEETITPWNFEEVVDKGASAQSFIERMTNFDKNLPNEKVLPKHSLLYEYFTVYNELTKVKYVTEGMRKPAFLSGEQKKAIVDLLFKTNRKVTVKQLKEDYFKKIECFDSVEISGVEDRFNASLGTYHDLLKIIKDKDFLDNEENEDILEDIVLTLTLFEDREMIEERLKTYAHLFDDKVMKQLKRRRYTGWGRLSRKLINGIRDKQSGKTILDFLKSDGFANRNFMQLIHDDSLTFKEDIQKAQVSGQGDSLHEHIANLAGSPAIKKGILQTVKVVDELVKVMGRHKPENIVIEMARENQTTQKGQKNSRERMKRIEEGIKELGSQILKEHPVENTQLQNEKLYLYYLQNGRDMYVDQELDINRLSDYDVDHIVPQSFLKDDSIDNKVLTRSDKARGKSDNVPSEEVVKKMKNYWRQLLNAKLITQRKFDNLTKAERGGLSELDKAGFIKRQLVETRQITKHVAQILDSRMNTKYDENDKLIREVKVITLKSKLVSDFRKDFQFYKVREINNYHHAHDAYLNAVVGTALIKKYPKLESEFVYGDYKVYDVRKMIAKSEQEIGKATAKYFFYSNIMNFFKTEITLANGEIRKRPLIETNGETGEIVWDKGRDFATVRKVLSMPQVNIVKKTEVQTGGFSKESILPKRNSDKLIARKKDWDPKKYGGFDSPTVAYSVLVVAKVEKGKSKKLKSVKELLGITIMERSSFEKNPIDFLEAKGYKEVKKDLIIKLPKYSLFELENGRKRMLASAGELQKGNELALPSKYVNFLYLASHYEKLKGSPEDNEQKQLFVEQHKHYLDEIIEQISEFSKRVILADANLDKVLSAYNKHRDKPIREQAENIIHLFTLTNLGAPAAFKYFDTTIDRKRYTSTKEVLDATLIHQSITGLYETRIDLSQLGGDGGGSSPAPGGLGIEDEYRLHETSTEPDVSLGSTWLSDFPQAWAETGGMGLAVRQAPLIIPLKATSTPVSIQQYPMSHEARLGIKPHIQRLLDQGILVPCQSPWNTPLLPVKKPGTNDYRPVQDLREVNKRVEDIHPTVPNPYNLLSGLPPSHQWYTVLDLKDAFFCLRLHPTSQPLFAFEWRDPGMGISGQLTWTRLPQGFKNSPTLFNEALHRDLADFRIQHPDLILLQYVDDILLAATSELDCQQGTRALLQTLGDLGYRASAKKAQICQKQVKYLGYLLREGQRWLTEARKETVMGQPVPKTPRQLREFLGKAGFCRLFIPGFAEMAAPLYPLTKPGTLFSWGPDQQKAYQEIKQALLTAPALGLPDLTKPFELFVDEKQGYAKGVLTQKLGPWRRPVAYLSKKLDPVAAGWPPCLRMVAAIAVLTKDAGKLTMGQPLVILAPHAVEALVKQPPDRWLSNARMTHYQAMLLDTDRVQFGPVVALNPATLLPLPEEGAPHDCLEILAETHGTRPDLTDQPIPDADHTWYTDGSSFLQEGQRKAGAAVTTETEVIWAGALPAGTSAQRAELIALTQALKMAEGKRLNVYTDSRYAFATAHIHGEIYRRRGWLTSEGREIKNKSEILALLKALFLPKRLSIIHCLGHQKGDSAEARGNRLADQAAREAAIKTPPDTSTLLIAGKRTADGSEFEKRTADGSEFESPKKKAKVE

SEQ ID NO: 2125 - protein, 2090 aa, synthetic construct
  source 1..2090: note = Description of Artificial Sequence: Synthetic polypeptide
MPAAKRVKLDGGDKKYSIGLDIGTNSVGWAVITDEYKVPSKKFKVLGNTDRHSIKKNLIGALLFDSGETAEATRLKRTARRRYTRRKNRICYLQEIFSNEMAKVDDSFFHRLEESFLVEEDKKHERHPIFGNIVDEVAYHEKYPTIYHLRKKLVDSTDKADLRLIYLALAHMIKFRGHFLIEGDLNPDNSDVDKLFIQLVQTYNQLFEENPINASGVDAKAILSARLSKSRRLENLIAQLPGEKKNGLFGNLIALSLGLTPNFKSNFDLAEDAKLQLSKDTYDDDLDNLLAQIGDQYADLFLAAKNLSDAILLSDILRVNTEITKAPLSASMIKRYDEHHQDLTLLKALVRQQLPEKYKEIFFDQSKNGYAGYIDGGASQEEFYKFIKPILEKMDGTEELLVKLNREDLLRKQRTFDNGSIPHQIHLGELHAILRRQEDFYPFLKDNREKIEKILTFRIPYYVGPLARGNSRFAWMTRKSEETITPWNFEEVVDKGASAQSFIERMTNFDKNLPNEKVLPKHSLLYEYFTVYNELTKVKYVTEGMRKPAFLSGEQKKAIVDLLFKTNRKVTVKQLKEDYFKKIECFDSVEISGVEDRFNASLGTYHDLLKIIKDKDFLDNEENEDILEDIVLTLTLFEDREMIEERLKTYAHLFDDKVMKQLKRRRYTGWGRLSRKLINGIRDKQSGKTILDFLKSDGFANRNFMQLIHDDSLTFKEDIQKAQVSGQGDSLHEHIANLAGSPAIKKGILQTVKVVDELVKVMGRHKPENIVIEMARENQTTQKGQKNSRERMKRIEEGIKELGSQILKEHPVENTQLQNEKLYLYYLQNGRDMYVDQELDINRLSDYDVDHIVPQSFLKDDSIDNKVLTRSDKARGKSDNVPSEEVVKKMKNYWRQLLNAKLITQRKFDNLTKAERGGLSELDKAGFIKRQLVETRQITKHVAQILDSRMNTKYDENDKLIREVKVITLKSKLVSDFRKDFQFYKVREINNYHHAHDAYLNAVVGTALIKKYPKLESEFVYGDYKVYDVRKMIAKSEQEIGKATAKYFFYSNIMNFFKTEITLANGEIRKRPLIETNGETGEIVWDKGRDFATVRKVLSMPQVNIVKKTEVQTGGFSKESILPKRNSDKLIARKKDWDPKKYGGFDSPTVAYSVLVVAKVEKGKSKKLKSVKELLGITIMERSSFEKNPIDFLEAKGYKEVKKDLIIKLPKYSLFELENGRKRMLASAGELQKGNELALPSKYVNFLYLASHYEKLKGSPEDNEQKQLFVEQHKHYLDEIIEQISEFSKRVILADANLDKVLSAYNKHRDKPIREQAENIIHLFTLTNLGAPAAFKYFDTTIDRKRYTSTKEVLDATLIHQSITGLYETRIDLSQLGGDGGGGGGSGGLGIEDEYRLHETSTEPDVSLGSTWLSDFPQAWAETGGMGLAVRQAPLIIPLKATSTPVSIQQYPMSHEARLGIKPHIQRLLDQGILVPCQSPWNTPLLPVKKPGTNDYRPVQDLREVNKRVEDIHPTVPNPYNLLSGLPPSHQWYTVLDLKDAFFCLRLHPTSQPLFAFEWRDPGMGISGQLTWTRLPQGFKNSPTLFNEALHRDLADFRIQHPDLILLQYVDDILLAATSELDCQQGTRALLQTLGDLGYRASAKKAQICQKQVKYLGYLLREGQRWLTEARKETVMGQPVPKTPRQLREFLGKAGFCRLFIPGFAEMAAPLYPLTKPGTLFSWGPDQQKAYQEIKQALLTAPALGLPDLTKPFELFVDEKQGYAKGVLTQKLGPWRRPVAYLSKKLDPVAAGWPPCLRMVAAIAVLTKDAGKLTMGQPLVILAPHAVEALVKQPPDRWLSNARMTHYQAMLLDTDRVQFGPVVALNPATLLPLPEEGAPHDCLEILAETHGTRPDLTDQPIPDADHTWYTDGSSFLQEGQRKAGAAVTTETEVIWAGALPAGTSAQRAELIALTQALKMAEGKRLNVYTDSRYAFATAHIHGEIYRRRGWLTSEGREIKNKSEILALLKALFLPKRLSIIHCLGHQKGDSAEARGNRLADQAAREAAIKTPPDTSTLLIAGKRTADGSEFEKRTADGSEFESPKKKAKVE

SEQ ID NO: 2126 - protein, 2096 aa, synthetic construct; identical to SEQ ID NO: 2052
  source 1..2096: note = Description of Artificial Sequence: Synthetic polypeptide

SEQ ID NO: 2127 - protein, 2091 aa, synthetic construct
  source 1..2091: note = Description of Artificial Sequence: Synthetic polypeptide
MPAAKRVKLDGGDKKYSIGLDIGTNSVGWAVITDEYKVPSKKFKVLGNTDRHSIKKNLIGALLFDSGETAEATRLKRTARRRYTRRKNRICYLQEIFSNEMAKVDDSFFHRLEESFLVEEDKKHERHPIFGNIVDEVAYHEKYPTIYHLRKKLVDSTDKADLRLIYLALAHMIKFRGHFLIEGDLNPDNSDVDKLFIQLVQTYNQLFEENPINASGVDAKAILSARLSKSRRLENLIAQLPGEKKNGLFGNLIALSLGLTPNFKSNFDLAEDAKLQLSKDTYDDDLDNLLAQIGDQYADLFLAAKNLSDAILLSDILRVNTEITKAPLSASMIKRYDEHHQDLTLLKALVRQQLPEKYKEIFFDQSKNGYAGYIDGGASQEEFYKFIKPILEKMDGTEELLVKLNREDLLRKQRTFDNGSIPHQIHLGELHAILRRQEDFYPFLKDNREKIEKILTFRIPYYVGPLARGNSRFAWMTRKSEETITPWNFEEVVDKGASAQSFIERMTNFDKNLPNEKVLPKHSLLYEYFTVYNELTKVKYVTEGMRKPAFLSGEQKKAIVDLLFKTNRKVTVKQLKEDYFKKIECFDSVEISGVEDRFNASLGTYHDLLKIIKDKDFLDNEENEDILEDIVLTLTLFEDREMIEERLKTYAHLFDDKVMKQLKRRRYTGWGRLSRKLINGIRDKQSGKTILDFLKSDGFANRNFMQLIHDDSLTFKEDIQKAQVSGQGDSLHEHIANLAGSPAIKKGILQTVKVVDELVKVMGRHKPENIVIEMARENQTTQKGQKNSRERMKRIEEGIKELGSQILKEHPVENTQLQNEKLYLYYLQNGRDMYVDQELDINRLSDYDVDHIVPQSFLKDDSIDNKVLTRSDKARGKSDNVPSEEVVKKMKNYWRQLLNAKLITQRKFDNLTKAERGGLSELDKAGFIKRQLVETRQITKHVAQILDSRMNTKYDENDKLIREVKVITLKSKLVSDFRKDFQFYKVREINNYHHAHDAYLNAVVGTALIKKYPKLESEFVYGDYKVYDVRKMIAKSEQEIGKATAKYFFYSNIMNFFKTEITLANGEIRKRPLIETNGETGEIVWDKGRDFATVRKVLSMPQVNIVKKTEVQTGGFSKESILPKRNSDKLIARKKDWDPKKYGGFDSPTVAYSVLVVAKVEKGKSKKLKSVKELLGITIMERSSFEKNPIDFLEAKGYKEVKKDLIIKLPKYSLFELENGRKRMLASAGELQKGNELALPSKYVNFLYLASHYEKLKGSPEDNEQKQLFVEQHKHYLDEIIEQISEFSKRVILADANLDKVLSAYNKHRDKPIREQAENIIHLFTLTNLGAPAAFKYFDTTIDRKRYTSTKEVLDATLIHQSITGLYETRIDLSQLGGDGGGGGPAPGGLGIEDEYRLHETSTEPDVSLGSTWLSDFPQAWAETGGMGLAVRQAPLIIPLKATSTPVSIQQYPMSHEARLGIKPHIQRLLDQGILVPCQSPWNTPLLPVKKPGTNDYRPVQDLREVNKRVEDIHPTVPNPYNLLSGLPPSHQWYTVLDLKDAFFCLRLHPTSQPLFAFEWRDPGMGISGQLTWTRLPQGFKNSPTLFNEALHRDLADFRIQHPDLILLQYVDDILLAATSELDCQQGTRALLQTLGDLGYRASAKKAQICQKQVKYLGYLLREGQRWLTEARKETVMGQPVPKTPRQLREFLGKAGFCRLFIPGFAEMAAPLYPLTKPGTLFSWGPDQQKAYQEIKQALLTAPALGLPDLTKPFELFVDEKQGYAKGVLTQKLGPWRRPVAYLSKKLDPVAAGWPPCLRMVAAIAVLTKDAGKLTMGQPLVILAPHAVEALVKQPPDRWLSNARMTHYQAMLLDTDRVQFGPVVALNPATLLPLPEEGAPHDCLEILAETHGTRPDLTDQPIPDADHTWYTDGSSFLQEGQRKAGAAVTTETEVIWAGALPAGTSAQRAELIALTQALKMAEGKRLNVYTDSRYAFATAHIHGEIYRRRGWLTSEGREIKNKSEILALLKALFLPKRLSIIHCLGHQKGDSAEARGNRLADQAAREAAIKTPPDTSTLLIAGKRTADGSEFEKRTADGSEFESPKKKAKVE

SEQ ID NO: 2128 - protein, 2095 aa, synthetic construct
  source 1..2095: note = Description of Artificial Sequence: Synthetic polypeptide
MPAAKRVKLDGGDKKYSIGLDIGTNSVGWAVITDEYKVPSKKFKVLGNTDRHSIKKNLIGALLFDSGETAEATRLKRTARRRYTRRKNRICYLQEIFSNEMAKVDDSFFHRLEESFLVEEDKKHERHPIFGNIVDEVAYHEKYPTIYHLRKKLVDSTDKADLRLIYLALAHMIKFRGHFLIEGDLNPDNSDVDKLFIQLVQTYNQLFEENPINASGVDAKAILSARLSKSRRLENLIAQLPGEKKNGLFGNLIALSLGLTPNFKSNFDLAEDAKLQLSKDTYDDDLDNLLAQIGDQYADLFLAAKNLSDAILLSDILRVNTEITKAPLSASMIKRYDEHHQDLTLLKALVRQQLPEKYKEIFFDQSKNGYAGYIDGGASQEEFYKFIKPILEKMDGTEELLVKLNREDLLRKQRTFDNGSIPHQIHLGELHAILRRQEDFYPFLKDNREKIEKILTFRIPYYVGPLARGNSRFAWMTRKSEETITPWNFEEVVDKGASAQSFIERMTNFDKNLPNEKVLPKHSLLYEYFTVYNELTKVKYVTEGMRKPAFLSGEQKKAIVDLLFKTNRKVTVKQLKEDYFKKIECFDSVEISGVEDRFNASLGTYHDLLKIIKDKDFLDNEENEDILEDIVLTLTLFEDREMIEERLKTYAHLFDDKVMKQLKRRRYTGWGRLSRKLINGIRDKQSGKTILDFLKSDGFANRNFMQLIHDDSLTFKEDIQKAQVSGQGDSLHEHIANLAGSPAIKKGILQTVKVVDELVKVMGRHKPENIVIEMARENQTTQKGQKNSRERMKRIEEGIKELGSQILKEHPVENTQLQNEKLYLYYLQNGRDMYVDQELDINRLSDYDVDHIVPQSFLKDDSIDNKVLTRSDKARGKSDNVPSEEVVKKMKNYWRQLLNAKLITQRKFDNLTKAERGGLSELDKAGFIKRQLVETRQITKHVAQILDSRMNTKYDENDKLIREVKVITLKSKLVSDFRKDFQFYKVREINNYHHAHDAYLNAVVGTALIKKYPKLESEFVYGDYKVYDVRKMIAKSEQEIGKATAKYFFYSNIMNFFKTEITLANGEIRKRPLIETNGETGEIVWDKGRDFATVRKVLSMPQVNIVKKTEVQTGGFSKESILPKRNSDKLIARKKDWDPKKYGGFDSPTVAYSVLVVAKVEKGKSKKLKSVKELLGITIMERSSFEKNPIDFLEAKGYKEVKKDLIIKLPKYSLFELENGRKRMLASAGELQKGNELALPSKYVNFLYLASHYEKLKGSPEDNEQKQLFVEQHKHYLDEIIEQISEFSKRVILADANLDKVLSAYNKHRDKPIREQAENIIHLFTLTNLGAPAAFKYFDTTIDRKRYTSTKEVLDATLIHQSITGLYETRIDLSQLGGDGGEAAAKEAAAKGGLGIEDEYRLHETSTEPDVSLGSTWLSDFPQAWAETGGMGLAVRQAPLIIPLKATSTPVSIQQYPMSHEARLGIKPHIQRLLDQGILVPCQSPWNTPLLPVKKPGTNDYRPVQDLREVNKRVEDIHPTVPNPYNLLSGLPPSHQWYTVLDLKDAFFCLRLHPTSQPLFAFEWRDPGMGISGQLTWTRLPQGFKNSPTLFNEALHRDLADFRIQHPDLILLQYVDDILLAATSELDCQQGTRALLQTLGDLGYRASAKKAQICQKQVKYLGYLLREGQRWLTEARKETVMGQPVPKTPRQLREFLGKAGFCRLFIPGFAEMAAPLYPLTKPGTLFSWGPDQQKAYQEIKQALLTAPALGLPDLTKPFELFVDEKQGYAKGVLTQKLGPWRRPVAYLSKKLDPVAAGWPPCLRMVAAIAVLTKDAGKLTMGQPLVILAPHAVEALVKQPPDRWLSNARMTHYQAMLLDTDRVQFGPVVALNPATLLPLPEEGAPHDCLEILAETHGTRPDLTDQPIPDADHTWYTDGSSFLQEGQRKAGAAVTTETEVIWAGALPAGTSAQRAELIALTQALKMAEGKRLNVYTDSRYAFATAHIHGEIYRRRGWLTSEGREIKNKSEILALLKALFLPKRLSIIHCLGHQKGDSAEARGNRLADQAAREAAIKTPPDTSTLLIAGKRTADGSEFEKRTADGSEFESPKKKAKVE

SEQ ID NO: 2129 - protein, 2096 aa, synthetic construct; identical to SEQ ID NO: 2059
  source 1..2096: note = Description of Artificial Sequence: Synthetic polypeptide

SEQ ID NO: 2130 - protein, 2096 aa, synthetic construct
  source 1..2096: note = Description of Artificial Sequence: Synthetic polypeptide
MPAAKRVKLDGGDKKYSIGLDIGTNSVGWAVITDEYKVPSKKFKVLGNTDRHSIKKNLIGALLFDSGETAEATRLKRTARRRYTRRKNRICYLQEIFSNEMAKVDDSFFHRLEESFLVEEDKKHERHPIFGNIVDEVAYHEKYPTIYHLRKKLVDSTDKADLRLIYLALAHMIKFRGHFLIEGDLNPDNSDVDKLFIQLVQTYNQLFEENPINASGVDAKAILSARLSKSRRLENLIAQLPGEKKNGLFGNLIALSLGLTPNFKSNFDLAEDAKLQLSKDTYDDDLDNLLAQIGDQYADLFLAAKNLSDAILLSDILRVNTEITKAPLSASMIKRYDEHHQDLTLLKALVRQQLPEKYKEIFFDQSKNGYAGYIDGGASQEEFYKFIKPILEKMDGTEELLVKLNREDLLRKQRTFDNGSIPHQIHLGELHAILRRQEDFYPFLKDNREKIEKILTFRIPYYVGPLARGNSRFAWMTRKSEETITPWNFEEVVDKGASAQSFIERMTNFDKNLPNEKVLPKHSLLYEYFTVYNELTKVKYVTEGMRKPAFLSGEQKKAIVDLLFKTNRKVTVKQLKEDYFKKIECFDSVEISGVEDRFNASLGTYHDLLKIIKDKDFLDNEENEDILEDIVLTLTLFEDREMIEERLKTYAHLFDDKVMKQLKRRRYTGWGRLSRKLINGIRDKQSGKTILDFLKSDGFANRNFMQLIHDDSLTFKEDIQKAQVSGQGDSLHEHIANLAGSPAIKKGILQTVKVVDELVKVMGRHKPENIVIEMARENQTTQKGQKNSRERMKRIEEGIKELGSQILKEHPVENTQLQNEKLYLYYLQNGRDMYVDQELDINRLSDYDVDHIVPQSFLKDDSIDNKVLTRSDKARGKSDNVPSEEVVKKMKNYWRQLLNAKLITQRKFDNLTKAERGGLSELDKAGFIKRQLVETRQITKHVAQILDSRMNTKYDENDKLIREVKVITLKSKLVSDFRKDFQFYKVREINNYHHAHDAYLNAVVGTALIKKYPKLESEFVYGDYKVYDVRKMIAKSEQEIGKATAKYFFYSNIMNFFKTEITLANGEIRKRPLIETNGETGEIVWDKGRDFATVRKVLSMPQVNIVKKTEVQTGGFSKESILPKRNSDKLIARKKDWDPKKYGGFDSPTVAYSVLVVAKVEKGKSKKLKSVKELLGITIMERSSFEKNPIDFLEAKGYKEVKKDLIIKLPKYSLFELENGRKRMLASAGELQKGNELALPSKYVNFLYLASHYEKLKGSPEDNEQKQLFVEQHKHYLDEIIEQISEFSKRVILADANLDKVLSAYNKHRDKPIREQAENIIHLFTLTNLGAPAAFKYFDTTIDRKRYTSTKEVLDATLIHQSITGLYETRIDLSQLGGDGGEAAAKPAPGGGGGLGIEDEYRLHETSTEPDVSLGSTWLSDFPQAWAETGGMGLAVRQAPLIIPLKATSTPVSIQQYPMSHEARLGIKPHIQRLLDQGILVPCQSPWNTPLLPVKKPGTNDYRPVQDLREVNKRVEDIHPTVPNPYNLLSGLPPSHQWYTVLDLKDAFFCLRLHPTSQPLFAFEWRDPGMGISGQLTWTRLPQGFKNSPTLFNEALHRDLADFRIQHPDLILLQYVDDILLAATSELDCQQGTRALLQTLGDLGYRASAKKAQICQKQVKYLGYLLREGQRWLTEARKETVMGQPVPKTPRQLREFLGKAGFCRLFIPGFAEMAAPLYPLTKPGTLFSWGPDQQKAYQEIKQALLTAPALGLPDLTKPFELFVDEKQGYAKGVLTQKLGPWRRPVAYLSKKLDPVAAGWPPCLRMVAAIAVLTKDAGKLTMGQPLVILAPHAVEALVKQPPDRWLSNARMTHYQAMLLDTDRVQFGPVVALNPATLLPLPEEGAPHDCLEILAETHGTRPDLTDQPIPDADHTWYTDGSSFLQEGQRKAGAAVTTETEVIWAGALPAGTSAQRAELIALTQALKMAEGKRLNVYTDSRYAFATAHIHGEIYRRRGWLTSEGREIKNKSEILALLKALFLPKRLSIIHCLGHQKGDSAEARGNRLADQAAREAAIKTPPDTSTLLIAGKRTADGSEFEKRTADGSEFESPKKKAKVE

SEQ ID NO: 2131 - protein, 2088 aa, synthetic construct
  source 1..2088: note = Description of Artificial Sequence: Synthetic polypeptide
MPAAKRVKLDGGDKKYSIGLDIGTNSVGWAVITDEYKVPSKKFKVLGNTDRHSIKKNLIGALLFDSGETAEATRLKRTARRRYTRRKNRICYLQEIFSNEMAKVDDSFFHRLEESFLVEEDKKHERHPIFGNIVDEVAYHEKYPTIYHLRKKLVDSTDKADLRLIYLALAHMIKFRGHFLIEGDLNPDNSDVDKLFIQLVQTYNQLFEENPINASGVDAKAILSARLSKSRRLENLIAQLPGEKKNGLFGNLIALSLGLTPNFKSNFDLAEDAKLQLSKDTYDDDLDNLLAQIGDQYADLFLAAKNLSDAILLSDILRVNTEITKAPLSASMIKRYDEHHQDLTLLKALVRQQLPEKYKEIFFDQSKNGYAGYIDGGASQEEFYKFIKPILEKMDGTEELLVKLNREDLLRKQRTFDNGSIPHQIHLGELHAILRRQEDFYPFLKDNREKIEKILTFRIPYYVGPLARGNSRFAWMTRKSEETITPWNFEEVVDKGASAQSFIERMTNFDKNLPNEKVLPKHSLLYEYFTVYNELTKVKYVTEGMRKPAFLSGEQKKAIVDLLFKTNRKVTVKQLKEDYFKKIECFDSVEISGVEDRFNASLGTYHDLLKIIKDKDFLDNEENEDILEDIVLTLTLFEDREMIEERLKTYAHLFDDKVMKQLKRRRYTGWGRLSRKLINGIRDKQSGKTILDFLKSDGFANRNFMQLIHDDSLTFKEDIQKAQVSGQGDSLHEHIANLAGSPAIKKGILQTVKVVDELVKVMGRHKPENIVIEMARENQTTQKGQKNSRERMKRIEEGIKELGSQILKEHPVENTQLQNEKLYLYYLQNGRDMYVDQELDINRLSDYDVDHIVPQSFLKDDSIDNKVLTRSDKARGKSDNVPSEEVVKKMKNYWRQLLNAKLITQRKFDNLTKAERGGLSELDKAGFIKRQLVETRQITKHVAQILDSRMNTKYDENDKLIREVKVITLKSKLVSDFRKDFQFYKVREINNYHHAHDAYLNAVVGTALIKKYPKLESEFVYGDYKVYDVRKMIAKSEQEIGKATAKYFFYSNIMNFFKTEITLANGEIRKRPLIETNGETGEIVWDKGRDFATVRKVLSMPQVNIVKKTEVQTGGFSKESILPKRNSDKLIARKKDWDPKKYGGFDSPTVAYSVLVVAKVEKGKSKKLKSVKELLGITIMERSSFEKNPIDFLEAKGYKEVKKDLIIKLPKYSLFELENGRKRMLASAGELQKGNELALPSKYVNFLYLASHYEKLKGSPEDNEQKQLFVEQHKHYLDEIIEQISEFSKRVILADANLDKVLSAYNKHRDKPIREQAENIIHLFTLTNLGAPAAFKYFDTTIDRKRYTSTKEVLDATLIHQSITGLYETRIDLSQLGGDGGGGSGGLGIEDEYRLHETSTEPDVSLGSTWLSDFPQAWAETGGMGLAVRQAPLIIPLKATSTPVSIQQYPMSHEARLGIKPHIQRLLDQGILVPCQSPWNTPLLPVKKPGTNDYRPVQDLREVNKRVEDIHPTVPNPYNLLSGLPPSHQWYTVLDLKDAFFCLRLHPTSQPLFAFEWRDPGMGISGQLTWTRLPQGFKNSPTLFNEALHRDLADFRIQHPDLILLQYVDDILLAATSELDCQQGTRALLQTLGDLGYRASAKKAQICQKQVKYLGYLLREGQRWLTEARKETVMGQPVPKTPRQLREFLGKAGFCRLFIPGFAEMAAPLYPLTKPGTLFSWGPDQQKAYQEIKQALLTAPALGLPDLTKPFELFVDEKQGYAKGVLTQKLGPWRRPVAYLSKKLDPVAAGWPPCLRMVAAIAVLTKDAGKLTMGQPLVILAPHAVEALVKQPPDRWLSNARMTHYQAMLLDTDRVQFGPVVALNPATLLPLPEEGAPHDCLEILAETHGTRPDLTDQPIPDADHTWYTDGSSFLQEGQRKAGAAVTTETEVIWAGALPAGTSAQRAELIALTQALKMAEGKRLNVYTDSRYAFATAHIHGEIYRRRGWLTSEGREIKNKSEILALLKALFLPKRLSIIHCLGHQKGDSAEARGNRLADQAAREAAIKTPPDTSTLLIAGKRTADGSEFEKRTADGSEFESPKKKAKVE

SEQ ID NO: 2132 - protein, 2096 aa, synthetic construct
  source 1..2096: note = Description of Artificial Sequence: Synthetic polypeptide
MPAAKRVKLDGGDKKYSIGLDIGTNSVGWAVITDEYKVPSKKFKVLGNTDRHSIKKNLIGALLFDSGETAEATRLKRTARRRYTRRKNRICYLQEIFSNEMAKVDDSFFHRLEESFLVEEDKKHERHPIFGNIVDEVAYHEKYPTIYHLRKKLVDSTDKADLRLIYLALAHMIKFRGHFLIEGDLNPDNSDVDKLFIQLVQTYNQLFEENPINASGVDAKAILSARLSKSRRLENLIAQLPGEKKNGLFGNLIALSLGLTPNFKSNFDLAEDAKLQLSKDTYDDDLDNLLAQIGDQYADLFLAAKNLSDAILLSDILRVNTEITKAPLSASMIKRYDEHHQDLTLLKALVRQQLPEKYKEIFFDQSKNGYAGYIDGGASQEEFYKFIKPILEKMDGTEELLVKLNREDLLRKQRTFDNGSIPHQIHLGELHAILRRQEDFYPFLKDNREKIEKILTFRIPYYVGPLARGNSRFAWMTRKSEETITPWNFEEVVDKGASAQSFIERMTNFDKNLPNEKVLPKHSLLYEYFTVYNELTKVKYVTEGMRKPAFLSGEQKKAIVDLLFKTNRKVTVKQLKEDYFKKIECFDSVEISGVEDRFNASLGTYHDLLKIIKDKDFLDNEENEDILEDIVLTLTLFEDREMIEERLKTYAHLFDDKVMKQLKRRRYTGWGRLSRKLINGIRDKQSGKTILDFLKSDGFANRNFMQLIHDDSLTFKEDIQKAQVSGQGDSLHEHIANLAGSPAIKKGILQTVKVVDELVKVMGRHKPENIVIEMARENQTTQKGQKNSRERMKRIEEGIKELGSQILKEHPVENTQLQNEKLYLYYLQNGRDMYVDQELDINRLSDYDVDHIVPQSFLKDDSIDNKVLTRSDKARGKSDNVPSEEVVKKMKNYWRQLLNAKLITQRKFDNLTKAERGGLSELDKAGFIKRQLVETRQITKHVAQILDSRMNTKYDENDKLIREVKVITLKSKLVSDFRKDFQFYKVREINNYHHAHDAYLNAVVGTALIKKYPKLESEFVYGDYKVYDVRKMIAKSEQEIGKATAKYFFYSNIMNFFKTEITLANGEIRKRPLIETNGETGEIVWDKGRDFATVRKVLSMPQVNIVKKTEVQTGGFSKESILPKRNSDKLIARKKDWDPKKYGGFDSPTVAYSVLVVAKVEKGKSKKLKSVKELLGITIMERSSFEKNPIDFLEAKGYKEVKKDLIIKLPKYSLFELENGRKRMLASAGELQKGNELALPSKYVNFLYLASHYEKLKGSPEDNEQKQLFVEQHKHYLDEIIEQISEFSKRVILADANLDKVLSAYNKHRDKPIREQAENIIHLFTLTNLGAPAAFKYFDTTIDRKRYTSTKEVLDATLIHQSITGLYETRIDLSQLGGDGGGGGEAAAKGGSGGLGIEDEYRLHETSTEPDVSLGSTWLSDFPQAWAETGGMGLAVRQAPLIIPLKATSTPVSIQQYPMSHEARLGIKPHIQRLLDQGILVPCQSPWNTPLLPVKKPGTNDYRPVQDLREVNKRVEDIHPTVPNPYNLLSGLPPSHQWYTVLDLKDAFFCLRLHPTSQPLFAFEWRDPGMGISGQLTWTRLPQGFKNSPTLFNEALHRDLADFRIQHPDLILLQYVDDILLAATSELDCQQGTRALLQTLGDLGYRASAKKAQICQKQVKYLGYLLREGQRWLTEARKETVMGQPVPKTPRQLREFLGKAGFCRLFIPGFAEMAAPLYPLTKPGTLFSWGPDQQKAYQEIKQALLTAPALGLPDLTKPFELFVDEKQGYAKGVLTQKLGPWRRPVAYLSKKLDPVAAGWPPCLRMVAAIAVLTKDAGKLTMGQPLVILAPHAVEALVKQPPDRWLSNARMTHYQAMLLDTDRVQFGPVVALNPATLLPLPEEGAPHDCLEILAETHGTRPDLTDQPIPDADHTWYTDGSSFLQEGQRKAGAAVTTETEVIWAGALPAGTSAQRAELIALTQALKMAEGKRLNVYTDSRYAFATAHIHGEIYRRRGWLTSEGREIKNKSEILALLKALFLPKRLSIIHCLGHQKGDSAEARGNRLADQAAREAAIKTPPDTSTLLIAGKRTADGSEFEKRTADGSEFESPKKKAKVE

SEQ ID NO: 2133 - protein, 2094 aa, synthetic construct
  source 1..2094: note = Description of Artificial Sequence: Synthetic polypeptide
MPAAKRVKLDGGDKKYSIGLDIGTNSVGWAVITDEYKVPSKKFKVLGNTDRHSIKKNLIGALLFDSGETAEATRLKRTARRRYTRRKNRICYLQEIFSNEMAKVDDSFFHRLEESFLVEEDKKHERHPIFGNIVDEVAYHEKYPTIYHLRKKLVDSTDKADLRLIYLALAHMIKFRGHFLIEGDLNPDNSDVDKLFIQLVQTYNQLFEENPINASGVDAKAILSARLSKSRRLENLIAQLPGEKKNGLFGNLIALSLGLTPNFKSNFDLAEDAKLQLSKDTYDDDLDNLLAQIGDQYADLFLAAKNLSDAILLSDILRVNTEITKAPLSASMIKRYDEHHQDLTLLKALVRQQLPEKYKEIFFDQSKNGYAGYIDGGASQEEFYKFIKPILEKMDGTEELLVKLNREDLLRKQRTFDNGSIPHQIHLGELHAILRRQEDFYPFLKDNREKIEKILTFRIPYYVGPLARGNSRFAWMTRKSEETITPWNFEEVVDKGASAQSFIERMTNFDKNLPNEKVLPKHSLLYEYFTVYNELTKVKYVTEGMRKPAFLSGEQKKAIVDLLFKTNRKVTVKQLKEDYFKKIECFDSVEISGVEDRFNASLGTYHDLLKIIKDKDFLDNEENEDILEDIVLTLTLFEDREMIEERLKTYAHLFDDKVMKQLKRRRYTGWGRLSRKLINGIRDKQSGKTILDFLKSDGFANRNFMQLIHDDSLTFKEDIQKAQVSGQGDSLHEHIANLAGSPAIKKGILQTVKVVDELVKVMGRHKPENIVIEMARENQTTQKGQKNSRERMKRIEEGIKELGSQILKEHPVENTQLQNEKLYLYYLQNGRDMYVDQELDINRLSDYDVDHIVPQSFLKDDSIDNKVLTRSDKARGKSDNVPSEEVVKKMKNYWRQLLNAKLITQRKFDNLTKAERGGLSELDKAGFIKRQLVETRQITKHVAQILDSRMNTKYDENDKLIREVKVITLKSKLVSDFRKDFQFYKVREINNYHHAHDAYLNAVVGTALIKKYPKLESEFVYGDYKVYDVRKMIAKSEQEIGKATAKYFFYSNIMNFFKTEITLANGEIRKRPLIETNGETGEIVWDKGRDFATVRKVLSMPQVNIVKKTEVQTGGFSKESILPKRNSDKLIARKKDWDPKKYGGFDSPTVAYSVLVVAKVEKGKSKKLKSVKELLGITIMERSSFEKNPIDFLEAKGYKEVKKDLIIKLPKYSLFELENGRKRMLASAGELQKGNELALPSKYVNFLYLASHYEKLKGSPEDNEQKQLFVEQHKHYLDEIIEQISEFSKRVILADANLDKVLSAYNKHRDKPIREQAENIIHLFTLTNLGAPAAFKYFDTTIDRKRYTSTKEVLDATLIHQSITGLYETRIDLSQLGGDGGGGGGGSPAPGGLGIEDEYRLHETSTEPDVSLGSTWLSDFPQAWAETGGMGLAVRQAPLIIPLKATSTPVSIQQYPMSHEARLGIKPHIQRLLDQGILVPCQSPWNTPLLPVKKPGTNDYRPVQDLREVNKRVEDIHPTVPNPYNLLSGLPPSHQWYTVLDLKDAFFCLRLHPTSQPLFAFEWRDPGMGISGQLTWTRLPQGFKNSPTLFNEALHRDLADFRIQHPDLILLQYVDDILLAATSELDCQQGTRALLQTLGDLGYRASAKKAQICQKQVKYLGYLLREGQRWLTEARKETVMGQPVPKTPRQLREFLGKAGFCRLFIPGFAEMAAPLYPLTKPGTLFSWGPDQQKAYQEIKQALLTAPALGLPDLTKPFELFVDEKQGYAKGVLTQKLGPWRRPVAYLSKKLDPVAAGWPPCLRMVAAIAVLTKDAGKLTMGQPLVILAPHAVEALVKQPPDRWLSNARMTHYQAMLLDTDRVQFGPVVALNPATLLPLPEEGAPHDCLEILAETHGTRPDLTDQPIPDADHTWYTDGSSFLQEGQRKAGAAVTTETEVIWAGALPAGTSAQRAELIALTQALKMAEGKRLNVYTDSRYAFATAHIHGEIYRRRGWLTSEGREIKNKSEILALLKALFLPKRLSIIHCLGHQKGDSAEARGNRLADQAAREAAIKTPPDTSTLLIAGKRTADGSEFEKRTADGSEFESPKKKAKVE

SEQ ID NO: 2134 - protein, 2091 aa, synthetic construct
  source 1..2091: note = Description of Artificial Sequence: Synthetic polypeptide
MPAAKRVKLDGGDKKYSIGLDIGTNSVGWAVITDEYKVPSKKFKVLGNTDRHSIKKNLIGALLFDSGETAEATRLKRTARRRYTRRKNRICYLQEIFSNEMAKVDDSFFHRLEESFLVEEDKKHERHPIFGNIVDEVAYHEKYPTIYHLRKKLVDSTDKADLRLIYLALAHMIKFRGHFLIEGDLNPDNSDVDKLFIQLVQTYNQLFEENPINASGVDAKAILSARLSKSRRLENLIAQLPGEKKNGLFGNLIALSLGLTPNFKSNFDLAEDAKLQLSKDTYDDDLDNLLAQIGDQYADLFLAAKNLSDAILLSDILRVNTEITKAPLSASMIKRYDEHHQDLTLLKALVRQQLPEKYKEIFFDQSKNGYAGYIDGGASQEEFYKFIKPILEKMDGTEELLVKLNREDLLRKQRTFDNGSIPHQIHLGELHAILRRQEDFYPFLKDNREKIEKILTFRIPYYVGPLARGNSRFAWMTRKSEETITPWNFEEVVDKGASAQSFIERMTNFDKNLPNEKVLPKHSLLYEYFTVYNELTKVKYVTEGMRKPAFLSGEQKKAIVDLLFKTNRKVTVKQLKEDYFKKIECFDSVEISGVEDRFNASLGTYHDLLKIIKDKDFLDNEENEDILEDIVLTLTLFEDREMIEERLKTYAHLFDDKVMKQLKRRRYTGWGRLSRKLINGIRDKQSGKTILDFLKSDGFANRNFMQLIHDDSLTFKEDIQKAQVSGQGDSLHEHIANLAGSPAIKKGILQTVKVVDELVKVMGRHKPENIVIEMARENQTTQKGQKNSRERMKRIEEGIKELGSQILKEHPVENTQLQNEKLYLYYLQNGRDMYVDQELDINRLSDYDVDHIVPQSFLKDDSIDNKVLTRSDKARGKSDNVPSEEVVKKMKNYWRQLLNAKLITQRKFDNLTKAERGGLSELDKAGFIKRQLVETRQITKHVAQILDSRMNTKYDENDKLIREVKVITLKSKLVSDFRKDFQFYKVREINNYHHAHDAYLNAVVGTALIKKYPKLESEFVYGDYKVYDVRKMIAKSEQEIGKATAKYFFYSNIMNFFKTEITLANGEIRKRPLIETNGETGEIVWDKGRDFATVRKVLSMPQVNIVKKTEVQTGGFSKESILPKRNSDKLIARKKDWDPKKYGGFDSPTVAYSVLVVAKVEKGKSKKLKSVKELLGITIMERSSFEKNPIDFLEAKGYKEVKKDLIIKLPKYSLFELENGRKRMLASAGELQKGNELALPSKYVNFLYLASHYEKLKGSPEDNEQKQLFVEQHKHYLDEIIEQISEFSKRVILADANLDKVLSAYNKHRDKPIREQAENIIHLFTLTNLGAPAAFKYFDTTIDRKRYTSTKEVLDATLIHQSITGLYETRIDLSQLGGDGGPAPGGGGGLGIEDEYRLHETSTEPDVSLGSTWLSDFPQAWAETGGMGLAVRQAPLIIPLKATSTPVSIQQYPMSHEARLGIKPHIQRLLDQGILVPCQSPWNTPLLPVKKPGTNDYRPVQDLREVNKRVEDIHPTVPNPYNLLSGLPPSHQWYTVLDLKDAFFCLRLHPTSQPLFAFEWRDPGMGISGQLTWTRLPQGFKNSPTLFNEALHRDLADFRIQHPDLILLQYVDDILLAATSELDCQQGTRALLQTLGDLGYRASAKKAQICQKQVKYLGYLLREGQRWLTEARKETVMGQPVPKTPRQLREFLGKAGFCRLFIPGFAEMAAPLYPLTKPGTLFSWGPDQQKAYQEIKQALLTAPALGLPDLTKPFELFVDEKQGYAKGVLTQKLGPWRRPVAYLSKKLDPVAAGWPPCLRMVAAIAVLTKDAGKLTMGQPLVILAPHAVEALVKQPPDRWLSNARMTHYQAMLLDTDRVQFGPVVALNPATLLPLPEEGAPHDCLEILAETHGTRPDLTDQPIPDADHTWYTDGSSFLQEGQRKAGAAVTTETEVIWAGALPAGTSAQRAELIALTQALKMAEGKRLNVYTDSRYAFATAHIHGEIYRRRGWLTSEGREIKNKSEILALLKALFLPKRLSIIHCLGHQKGDSAEARGNRLADQAAREAAIKTPPDTSTLLIAGKRTADGSEFEKRTADGSEFESPKKKAKVE

SEQ ID NO: 2135 - protein, 2096 aa, synthetic construct
  source 1..2096: note = Description of Artificial Sequence: Synthetic polypeptide
MPAAKRVKLDGGDKKYSIGLDIGTNSVGWAVITDEYKVPSKKFKVLGNTDRHSIKKNLIGALLFDSGETAEATRLKRTARRRYTRRKNRICYLQEIFSNEMAKVDDSFFHRLEESFLVEEDKKHERHPIFGNIVDEVAYHEKYPTIYHLRKKLVDSTDKADLRLIYLALAHMIKFRGHFLIEGDLNPDNSDVDKLFIQLVQTYNQLFEENPINASGVDAKAILSARLSKSRRLENLIAQLPGEKKNGLFGNLIALSLGLTPNFKSNFDLAEDAKLQLSKDTYDDDLDNLLAQIGDQYADLFLAAKNLSDAILLSDILRVNTEITKAPLSASMIKRYDEHHQDLTLLKALVRQQLPEKYKEIFFDQSKNGYAGYIDGGASQEEFYKFIKPILEKMDGTEELLVKLNREDLLRKQRTFDNGSIPHQIHLGELHAILRRQEDFYPFLKDNREKIEKILTFRIPYYVGPLARGNSRFAWMTRKSEETITPWNFEEVVDKGASAQSFIERMTNFDKNLPNEKVLPKHSLLYEYFTVYNELTKVKYVTEGMRKPAFLSGEQKKAIVDLLFKTNRKVTVKQLKEDYFKKIECFDSVEISGVEDRFNASLGTYHDLLKIIKDKDFLDNEENEDILEDIVLTLTLFEDREMIEERLKTYAHLFDDKVMKQLKRRRYTGWGRLSRKLINGIRDKQSGKTILDFLKSDGFANRNFMQLIHDDSLTFKEDIQKAQVSGQGDSLHEHIANLAGSPAIKKGILQTVKVVDELVKVMGRHKPENIVIEMARENQTTQKGQKNSRERMKRIEEGIKELGSQILKEHPVENTQLQNEKLYLYYLQNGRDMYVDQELDINRLSDYDVDHIVPQSFLKDDSIDNKVLTRSDKARGKSDNVPSEEVVKKMKNYWRQLLNAKLITQRKFDNLTKAERGGLSELDKAGFIKRQLVETRQITKHVAQILDSRMNTKYDENDKLIREVKVITLKSKLVSDFRKDFQFYKVREINNYHHAHDAYLNAVVGTALIKKYPKLESEFVYGDYKVYDVRKMIAKSEQEIGKATAKYFFYSNIMNFFKTEITLANGEIRKRPLIETNGETGEIVWDKGRDFATVRKVLSMPQVNIVKKTEVQTGGFSKESILPKRNSDKLIARKKDWDPKKYGGFDSPTVAYSVLVVAKVEKGKSKKLKSVKELLGITIMERSSFEKNPIDFLEAKGYKEVKKDLIIKLPKYSLFELENGRKRMLASAGELQKGNELALPSKYVNFLYLASHYEKLKGSPEDNEQKQLFVEQHKHYLDEIIEQISEFSKRVILADANLDKVLSAYNKHRDKPIREQAENIIHLFTLTNLGAPAAFKYFDTTIDRKRYTSTKEVLDATLIHQSITGLYETRIDLSQLGGDGGGGGEAAAKPAPGGLGIEDEYRLHETSTEPDVSLGSTWLSDFPQAWAETGGMGLAVRQAPLIIPLKATSTPVSIQQYPMSHEARLGIKPHIQRLLDQGILVPCQSPWNTPLLPVKKPGTNDYRPVQDLREVNKRVEDIHPTVPNPYNLLSGLPPSHQWYTVLDLKDAFFCLRLHPTSQPLFAFEWRDPGMGISGQLTWTRLPQGFKNSPTLFNEALHRDLADFRIQHPDLILLQYVDDILLAATSELDCQQGTRALLQTLGDLGYRASAKKAQICQKQVKYLGYLLREGQRWLTEARKETVMGQPVPKTPRQLREFLGKAGFCRLFIPGFAEMAAPLYPLTKPGTLFSWGPDQQKAYQEIKQALLTAPALGLPDLTKPFELFVDEKQGYAKGVLTQKLGPWRRPVAYLSKKLDPVAAGWPPCLRMVAAIAVLTKDAGKLTMGQPLVILAPHAVEALVKQPPDRWLSNARMTHYQAMLLDTDRVQFGPVVALNPATLLPLPEEGAPHDCLEILAETHGTRPDLTDQPIPDADHTWYTDGSSFLQEGQRKAGAAVTTETEVIWAGALPAGTSAQRAELIALTQALKMAEGKRLNVYTDSRYAFATAHIHGEIYRRRGWLTSEGREIKNKSEILALLKALFLPKRLSIIHCLGHQKGDSAEARGNRLADQAAREAAIKTPPDTSTLLIAGKRTADGSEFEKRTADGSEFESPKKKAKVE

SEQ ID NO: 2136 - protein, 2091 aa, synthetic construct
  source 1..2091: note = Description of Artificial Sequence: Synthetic polypeptide
MPAAKRVKLDGGDKKYSIGLDIGTNSVGWAVITDEYKVPSKKFKVLGNTDRHSIKKNLIGALLFDSGETAEATRLKRTARRRYTRRKNRICYLQEIFSNEMAKVDDSFFHRLEESFLVEEDKKHERHPIFGNIVDEVAYHEKYPTIYHLRKKLVDSTDKADLRLIYLALAHMIKFRGHFLIEGDLNPDNSDVDKLFIQLVQTYNQLFEENPINASGVDAKAILSARLSKSRRLENLIAQLPGEKKNGLFGNLIALSLGLTPNFKSNFDLAEDAKLQLSKDTYDDDLDNLLAQIGDQYADLFLAAKNLSDAILLSDILRVNTEITKAPLSASMIKRYDEHHQDLTLLKALVRQQLPEKYKEIFFDQSKNGYAGYIDGGASQEEFYKFIKPILEKMDGTEELLVKLNREDLLRKQRTFDNGSIPHQIHLGELHAILRRQEDFYPFLKDNREKIEKILTFRIPYYVGPLARGNSRFAWMTRKSEETITPWNFEEVVDKGASAQSFIERMTNFDKNLPNEKVLPKHSLLYEYFTVYNELTKVKYVTEGMRKPAFLSGEQKKAIVDLLFKTNRKVTVKQLKEDYFKKIECFDSVEISGVEDRFNASLGTYHDLLKIIKDKDFLDNEENEDILEDIVLTLTLFEDREMIEERLKTYAHLFDDKVMKQLKRRRYTGWGRLSRKLINGIRDKQSGKTILDFLKSDGFANRNFMQLIHDDSLTFKEDIQKAQVSGQGDSLHEHIANLAGSPAIKKGILQTVKVVDELVKVMGRHKPENIVIEMARENQTTQKGQKNSRERMKRIEEGIKELGSQILKEHPVENTQLQNEKLYLYYLQNGRDMYVDQELDINRLSDYDVDHIVPQSFLKDDSIDNKVLTRSDKARGKSDNVPSEEVVKKMKNYWRQLLNAKLITQRKFDNLTKAERGGLSELDKAGFIKRQLVETRQITKHVAQILDSRMNTKYDENDKLIREVKVITLKSKLVSDFRKDFQFYKVREINNYHHAHDAYLNAVVGTALIKKYPKLESEFVYGDYKVYDVRKMIAKSEQEIGKATAKYFFYSNIMNFFKTEITLANGEIRKRPLIETNGETGEIVWDKGRDFATVRKVLSMPQVNIVKKTEVQTGGFSKESILPKRNSDKLIARKKDWDPKKYGGFDSPTVAYSVLVVAKVEKGKSKKLKSVKELLGITIMERSSFEKNPIDFLEAKGYKEVKKDLIIKLPKYSLFELENGRKRMLASAGELQKGNELALPSKYVNFLYLASHYEKLKGSPEDNEQKQLFVEQHKHYLDEIIEQISEFSKRVILADANLDKVLSAYNKHRDKPIREQAENIIHLFTLTNLGAPAAFKYFDTTIDRKRYTSTKEVLDATLIHQSITGLYETRIDLSQLGGDGGGGSPAPGGLGIEDEYRLHETSTEPDVSLGSTWLSDFPQAWAETGGMGLAVRQAPLIIPLKATSTPVSIQQYPMSHEARLGIKPHIQRLLDQGILVPCQSPWNTPLLPVKKPGTNDYRPVQDLREVNKRVEDIHPTVPNPYNLLSGLPPSHQWYTVLDLKDAFFCLRLHPTSQPLFAFEWRDPGMGISGQLTWTRLPQGFKNSPTLFNEALHRDLADFRIQHPDLILLQYVDDILLAATSELDCQQGTRALLQTLGDLGYRASAKKAQICQKQVKYLGYLLREGQRWLTEARKETVMGQPVPKTPRQLREFLGKAGFCRLFIPGFAEMAAPLYPLTKPGTLFSWGPDQQKAYQEIKQALLTAPALGLPDLTKPFELFVDEKQGYAKGVLTQKLGPWRRPVAYLSKKLDPVAAGWPPCLRMVAAIAVLTKDAGKLTMGQPLVILAPHAVEALVKQPPDRWLSNARMTHYQAMLLDTDRVQFGPVVALNPATLLPLPEEGAPHDCLEILAETHGTRPDLTDQPIPDADHTWYTDGSSFLQEGQRKAGAAVTTETEVIWAGALPAGTSAQRAELIALTQALKMAEGKRLNVYTDSRYAFATAHIHGEIYRRRGWLTSEGREIKNKSEILALLKALFLPKRLSIIHCLGHQKGDSAEARGNRLADQAAREAAIKTPPDTSTLLIAGKRTADGSEFEKRTADGSEFESPKKKAKVE

SEQ ID NO: 2137 - protein, 2097 aa, synthetic construct
  source 1..2097: note = Description of Artificial Sequence: Synthetic polypeptide
MPAAKRVKLDGGDKKYSIGLDIGTNSVGWAVITDEYKVPSKKFKVLGNTDRHSIKKNLIGALLFDSGETAEATRLKRTARRRYTRRKNRICYLQEIFSNEMAKVDDSFFHRLEESFLVEEDKKHERHPIFGNIVDEVAYHEKYPTIYHLRKKLVDSTDKADLRLIYLALAHMIKFRGHFLIEGDLNPDNSDVDKLFIQLVQTYNQLFEENPINASGVDAKAILSARLSKSRRLENLIAQLPGEKKNGLFGNLIALSLGLTPNFKSNFDLAEDAKLQLSKDTYDDDLDNLLAQIGDQYADLFLAAKNLSDAILLSDILRVNTEITKAPLSASMIKRYDEHHQDLTLLKALVRQQLPEKYKEIFFDQSKNGYAGYIDGGASQEEFYKFIKPILEKMDGTEELLVKLNREDLLRKQRTFDNGSIPHQIHLGELHAILRRQEDFYPFLKDNREKIEKILTFRIPYYVGPLARGNSRFAWMTRKSEETITPWNFEEVVDKGASAQSFIERMTNFDKNLPNEKVLPKHSLLYEYFTVYNELTKVKYVTEGMRKPAFLSGEQKKAIVDLLFKTNRKVTVKQLKEDYFKKIECFDSVEISGVEDRFNASLGTYHDLLKIIKDKDFLDNEENEDILEDIVLTLTLFEDREMIEERLKTYAHLFDDKVMKQLKRRRYTGWGRLSRKLINGIRDKQSGKTILDFLKSDGFANRNFMQLIHDDSLTFKEDIQKAQVSGQGDSLHEHIANLAGSPAIKKGILQTVKVVDELVKVMGRHKPENIVIEMARENQTTQKGQKNSRERMKRIEEGIKELGSQILKEHPVENTQLQNEKLYLYYLQNGRDMYVDQELDINRLSDYDVDHIVPQSFLKDDSIDNKVLTRSDKARGKSDNVPSEEVVKKMKNYWRQLLNAKLITQRKFDNLTKAERGGLSELDKAGFIKRQLVETRQITKHVAQILDSRMNTKYDENDKLIREVKVITLKSKLVSDFRKDFQFYKVREINNYHHAHDAYLNAVVGTALIKKYPKLESEFVYGDYKVYDVRKMIAKSEQEIGKATAKYFFYSNIMNFFKTEITLANGEIRKRPLIETNGETGEIVWDKGRDFATVRKVLSMPQVNIVKKTEVQTGGFSKESILPKRNSDKLIARKKDWDPKKYGGFDSPTVAYSVLVVAKVEKGKSKKLKSVKELLGITIMERSSFEKNPIDFLEAKGYKEVKKDLIIKLPKYSLFELENGRKRMLASAGELQKGNELALPSKYVNFLYLASHYEKLKGSPEDNEQKQLFVEQHKHYLDEIIEQISEFSKRVILADANLDKVLSAYNKHRDKPIREQAENIIHLFTLTNLGAPAAFKYFDTTIDRKRYTSTKEVLDATLIHQSITGLYETRIDLSQLGGDGGGGSGGSGGSGGSGGLGIEDEYRLHETSTEPDVSLGSTWLSDFPQAWAETGGMGLAVRQAPLIIPLKATSTPVSIQQYPMSHEARLGIKPHIQRLLDQGILVPCQSPWNTPLLPVKKPGTNDYRPVQDLREVNKRVEDIHPTVPNPYNLLSGLPPSHQWYTVLDLKDAFFCLRLHPTSQPLFAFEWRDPGMGISGQLTWTRLPQGFKNSPTLFNEALHRDLADFRIQHPDLILLQYVDDILLAATSELDCQQGTRALLQTLGDLGYRASAKKAQICQKQVKYLGYLLREGQRWLTEARKETVMGQPVPKTPRQLREFLGKAGFCRLFIPGFAEMAAPLYPLTKPGTLFSWGPDQQKAYQEIKQALLTAPALGLPDLTKPFELFVDEKQGYAKGVLTQKLGPWRRPVAYLSKKLDPVAAGWPPCLRMVAAIAVLTKDAGKLTMGQPLVILAPHAVEALVKQPPDRWLSNARMTHYQAMLLDTDRVQFGPVVALNPATLLPLPEEGAPHDCLEILAETHGTRPDLTDQPIPDADHTWYTDGSSFLQEGQRKAGAAVTTETEVIWAGALPAGTSAQRAELIALTQALKMAEGKRLNVYTDSRYAFATAHIHGEIYRRRGWLTSEGREIKNKSEILALLKALFLPKRLSIIHCLGHQKGDSAEARGNRLADQAAREAAIKTPPDTSTLLIAGKRTADGSEFEKRTADGSEFESPKKKAKVE

SEQ ID NO: 2138 - protein, 2094 aa, synthetic construct; identical to SEQ ID NO: 2061
  source 1..2094: note = Description of Artificial Sequence: Synthetic polypeptide

SEQ ID NO: 2139 - protein, 2096 aa, synthetic construct
  source 1..2096: note = Description of Artificial Sequence: Synthetic polypeptide
MPAAKRVKLDGGDKKYSIGLDIGTNSVGWAVITDEYKVPSKKFKVLGNTDRHSIKKNLIGALLFDSGETAEATRLKRTARRRYTRRKNRICYLQEIFSNEMAKVDDSFFHRLEESFLVEEDKKHERHPIFGNIVDEVAYHEKYPTIYHLRKKLVDSTDKADLRLIYLALAHMIKFRGHFLIEGDLNPDNSDVDKLFIQLVQTYNQLFEENPINASGVDAKAILSARLSKSRRLENLIAQLPGEKKNGLFGNLIALSLGLTPNFKSNFDLAEDAKLQLSKDTYDDDLDNLLAQIGDQYADLFLAAKNLSDAILLSDILRVNTEITKAPLSASMIKRYDEHHQDLTLLKALVRQQLPEKYKEIFFDQSKNGYAGYIDGGASQEEFYKFIKPILEKMDGTEELLVKLNREDLLRKQRTFDNGSIPHQIHLGELHAILRRQEDFYPFLKDNREKIEKILTFRIPYYVGPLARGNSRFAWMTRKSEETITPWNFEEVVDKGASAQSFIERMTNFDKNLPNEKVLPKHSLLYEYFTVYNELTKVKYVTEGMRKPAFLSGEQKKAIVDLLFKTNRKVTVKQLKEDYFKKIECFDSVEISGVEDRFNASLGTYHDLLKIIKDKDFLDNEENEDILEDIVLTLTLFEDREMIEERLKTYAHLFDDKVMKQLKRRRYTGWGRLSRKLINGIRDKQSGKTILDFLKSDGFANRNFMQLIHDDSLTFKEDIQKAQVSGQGDSLHEHIANLAGSPAIKKGILQTVKVVDELVKVMGRHKPENIVIEMARENQTTQKGQKNSRERMKRIEEGIKELGSQILKEHPVENTQLQNEKLYLYYLQNGRDMYVDQELDINRLSDYDVDHIVPQSFLKDDSIDNKVLTRSDKARGKSDNVPSEEVVKKMKNYWRQLLNAKLITQRKFDNLTKAERGGLSELDKAGFIKRQLVETRQITKHVAQILDSRMNTKYDENDKLIREVKVITLKSKLVSDFRKDFQFYKVREINNYHHAHDAYLNAVVGTALIKKYPKLESEFVYGDYKVYDVRKMIAKSEQEIGKATAKYFFYSNIMNFFKTEITLANGEIRKRPLIETNGETGEIVWDKGRDFATVRKVLSMPQVNIVKKTEVQTGGFSKESILPKRNSDKLIARKKDWDPKKYGGFDSPTVAYSVLVVAKVEKGKSKKLKSVKELLGITIMERSSFEKNPIDFLEAKGYKEVKKDLIIKLPKYSLFELENGRKRMLASAGELQKGNELALPSKYVNFLYLASHYEKLKGSPEDNEQKQLFVEQHKHYLDEIIEQISEFSKRVILADANLDKVLSAYNKHRDKPIREQAENIIHLFTLTNLGAPAAFKYFDTTIDRKRYTSTKEVLDATLIHQSITGLYETRIDLSQLGGDGGGGSPAPEAAAKGGLGIEDEYRLHETSTEPDVSLGSTWLSDFPQAWAETGGMGLAVRQAPLIIPLKATSTPVSIQQYPMSHEARLGIKPHIQRLLDQGILVPCQSPWNTPLLPVKKPGTNDYRPVQDLREVNKRVEDIHPTVPNPYNLLSGLPPSHQWYTVLDLKDAFFCLRLHPTSQPLFAFEWRDPGMGISGQLTWTRLPQGFKNSPTLFNEALHRDLADFRIQHPDLILLQYVDDILLAATSELDCQQGTRALLQTLGDLGYRASAKKAQICQKQVKYLGYLLREGQRWLTEARKETVMGQPVPKTPRQLREFLGKAGFCRLFIPGFAEMAAPLYPLTKPGTLFSWGPDQQKAYQEIKQALLTAPALGLPDLTKPFELFVDEKQGYAKGVLTQKLGPWRRPVAYLSKKLDPVAAGWPPCLRMVAAIAVLTKDAGKLTMGQPLVILAPHAVEALVKQPPDRWLSNARMTHYQAMLLDTDRVQFGPVVALNPATLLPLPEEGAPHDCLEILAETHGTRPDLTDQPIPDADHTWYTDGSSFLQEGQRKAGAAVTTETEVIWAGALPAGTSAQRAELIALTQALKMAEGKRLNVYTDSRYAFATAHIHGEIYRRRGWLTSEGREIKNKSEILALLKALFLPKRLSIIHCLGHQKGDSAEARGNRLADQAAREAAIKTPPDTSTLLIAGKRTADGSEFEKRTADGSEFESPKKKAKVE

SEQ ID NO: 2140 - protein, 2103 aa, synthetic construct
  source 1..2103: note = Description of Artificial Sequence: Synthetic polypeptide
MPAAKRVKLDGGDKKYSIGLDIGTNSVGWAVITDEYKVPSKKFKVLGNTDRHSIKKNLIGALLFDSGETAEATRLKRTARRRYTRRKNRICYLQEIFSNEMAKVDDSFFHRLEESFLVEEDKKHERHPIFGNIVDEVAYHEKYPTIYHLRKKLVDSTDKADLRLIYLALAHMIKFRGHFLIEGDLNPDNSDVDKLFIQLVQTYNQLFEENPINASGVDAKAILSARLSKSRRLENLIAQLPGEKKNGLFGNLIALSLGLTPNFKSNFDLAEDAKLQLSKDTYDDDLDNLLAQIGDQYADLFLAAKNLSDAILLSDILRVNTEITKAPLSASMIKRYDEHHQDLTLLKALVRQQLPEKYKEIFFDQSKNGYAGYIDGGASQEEFYKFIKPILEKMDGTEELLVKLNREDLLRKQRTFDNGSIPHQIHLGELHAILRRQEDFYPFLKDNREKIEKILTFRIPYYVGPLARGNSRFAWMTRKSEETITPWNFEEVVDKGASAQSFIERMTNFDKNLPNEKVLPKHSLLYEYFTVYNELTKVKYVTEGMRKPAFLSGEQKKAIVDLLFKTNRKVTVKQLKEDYFKKIECFDSVEISGVEDRFNASLGTYHDLLKIIKDKDFLDNEENEDILEDIVLTLTLFEDREMIEERLKTYAHLFDDKVMKQLKRRRYTGWGRLSRKLINGIRDKQSGKTILDFLKSDGFANRNFMQLIHDDSLTFKEDIQKAQVSGQGDSLHEHIANLAGSPAIKKGILQTVKVVDELVKVMGRHKPENIVIEMARENQTTQKGQKNSRERMKRIEEGIKELGSQILKEHPVENTQLQNEKLYLYYLQNGRDMYVDQELDINRLSDYDVDHIVPQSFLKDDSIDNKVLTRSDKARGKSDNVPSEEVVKKMKNYWRQLLNAKLITQRKFDNLTKAERGGLSELDKAGFIKRQLVETRQITKHVAQILDSRMNTKYDENDKLIREVKVITLKSKLVSDFRKDFQFYKVREINNYHHAHDAYLNAVVGTALIKKYPKLESEFVYGDYKVYDVRKMIAKSEQEIGKATAKYFFYSNIMNFFKTEITLANGEIRKRPLIETNGETGEIVWDKGRDFATVRKVLSMPQVNIVKKTEVQTGGFSKESILPKRNSDKLIARKKDWDPKKYGGFDSPTVAYSVLVVAKVEKGKSKKLKSVKELLGITIMERSSFEKNPIDFLEAKGYKEVKKDLIIKLPKYSLFELENGRKRMLASAGELQKGNELALPSKYVNFLYLASHYEKLKGSPEDNEQKQLFVEQHKHYLDEIIEQISEFSKRVILADANLDKVLSAYNKHRDKPIREQAENIIHLFTLTNLGAPAAFKYFDTTIDRKRYTSTKEVLDATLIHQSITGLYETRIDLSQLGGDGGGSSGSSGSSGSSGSSGSSGGLGIEDEYRLHETSTEPDVSLGSTWLSDFPQAWAETGGMGLAVRQAPLIIPLKATSTPVSIQQYPMSHEARLGIKPHIQRLLDQGILVPCQSPWNTPLLPVKKPGTNDYRPVQDLREVNKRVEDIHPTVPNPYNLLSGLPPSHQWYTVLDLKDAFFCLRLHPTSQPLFAFEWRDPGMGISGQLTWTRLPQGFKNSPTLFNEALHRDLADFRIQHPDLILLQYVDDILLAATSELDCQQGTRALLQTLGDLGYRASAKKAQICQKQVKYLGYLLREGQRWLTEARKETVMGQPVPKTPRQLREFLGKAGFCRLFIPGFAEMAAPLYPLTKPGTLFSWGPDQQKAYQEIKQALLTAPALGLPDLTKPFELFVDEKQGYAKGVLTQKLGPWRRPVAYLSKKLDPVAAGWPPCLRMVAAIAVLTKDAGKLTMGQPLVILAPHAVEALVKQPPDRWLSNARMTHYQAMLLDTDRVQFGPVVALNPATLLPLPEEGAPHDCLEILAETHGTRPDLTDQPIPDADHTWYTDGSSFLQEGQRKAGAAVTTETEVIWAGALPAGTSAQRAELIALTQALKMAEGKRLNVYTDSRYAFATAHIHGEIYRRRGWLTSEGREIKNKSEILALLKALFLPKRLSIIHCLGHQKGDSAEARGNRLADQAAREAAIKTPPDTSTLLIAGKRTADGSEFEKRTADGSEFESPKKKAKVE

SEQ ID NO: 2141 - protein, 2096 aa, synthetic construct
  source 1..2096: note = Description of Artificial Sequence: Synthetic polypeptide
MPAAKRVKLDGGDKKYSIGLDIGTNSVGWAVITDEYKVPSKKFKVLGNTDRHSIKKNLIGALLFDSGETAEATRLKRTARRRYTRRKNRICYLQEIFSNEMAKVDDSFFHRLEESFLVEEDKKHERHPIFGNIVDEVAYHEKYPTIYHLRKKLVDSTDKADLRLIYLALAHMIKFRGHFLIEGDLNPDNSDVDKLFIQLVQTYNQLFEENPINASGVDAKAILSARLSKSRRLENLIAQLPGEKKNGLFGNLIALSLGLTPNFKSNFDLAEDAKLQLSKDTYDDDLDNLLAQIGDQYADLFLAAKNLSDAILLSDILRVNTEITKAPLSASMIKRYDEHHQDLTLLKALVRQQLPEKYKEIFFDQSKNGYAGYIDGGASQEEFYKFIKPILEKMDGTEELLVKLNREDLLRKQRTFDNGSIPHQIHLGELHAILRRQEDFYPFLKDNREKIEKILTFRIPYYVGPLARGNSRFAWMTRKSEETITPWNFEEVVDKGASAQSFIERMTNFDKNLPNEKVLPKHSLLYEYFTVYNELTKVKYVTEGMRKPAFLSGEQKKAIVDLLFKTNRKVTVKQLKEDYFKKIECFDSVEISGVEDRFNASLGTYHDLLKIIKDKDFLDNEENEDILEDIVLTLTLFEDREMIEERLKTYAHLFDDKVMKQLKRRRYTGWGRLSRKLINGIRDKQSGKTILDFLKSDGFANRNFMQLIHDDSLTFKEDIQKAQVSGQGDSLHEHIANLAGSPAIKKGILQTVKVVDELVKVMGRHKPENIVIEMARENQTTQKGQKNSRERMKRIEEGIKELGSQILKEHPVENTQLQNEKLYLYYLQNGRDMYVDQELDINRLSDYDVDHIVPQSFLKDDSIDNKVLTRSDKARGKSDNVPSEEVVKKMKNYWRQLLNAKLITQRKFDNLTKAERGGLSELDKAGFIKRQLVETRQITKHVAQILDSRMNTKYDENDKLIREVKVITLKSKLVSDFRKDFQFYKVREINNYHHAHDAYLNAVVGTALIKKYPKLESEFVYGDYKVYDVRKMIAKSEQEIGKATAKYFFYSNIMNFFKTEITLANGEIRKRPLIETNGETGEIVWDKGRDFATVRKVLSMPQVNIVKKTEVQTGGFSKESILPKRNSDKLIARKKDWDPKKYGGFDSPTVAYSVLVVAKVEKGKSKKLKSVKELLGITIMERSSFEKNPIDFLEAKGYKEVKKDLIIKLPKYSLFELENGRKRMLASAGELQKGNELALPSKYVNFLYLASHYEKLKGSPEDNEQKQLFVEQHKHYLDEIIEQISEFSKRVILADANLDKVLSAYNKHRDKPIREQAENIIHLFTLTNLGAPAAFKYFDTTIDRKRYTSTKEVLDATLIHQSITGLYETRIDLSQLGGDGGEAAAKGSSGGGGGLGIEDEYRLHETSTEPDVSLGSTWLSDFPQAWAETGGMGLAVRQAPLIIPLKATSTPVSIQQYPMSHEARLGIKPHIQRLLDQGILVPCQSPWNTPLLPVKKPGTNDYRPVQDLREVNKRVEDIHPTVPNPYNLLSGLPPSHQWYTVLDLKDAFFCLRLHPTSQPLFAFEWRDPGMGISGQLTWTRLPQGFKNSPTLFNEALHRDLADFRIQHPDLILLQYVDDILLAATSELDCQQGTRALLQTLGDLGYRASAKKAQICQKQVKYLGYLLREGQRWLTEARKETVMGQPVPKTPRQLREFLGKAGFCRLFIPGFAEMAAPLYPLTKPGTLFSWGPDQQKAYQEIKQALLTAPALGLPDLTKPFELFVDEKQGYAKGVLTQKLGPWRRPVAYLSKKLDPVAAGWPPCLRMVAAIAVLTKDAGKLTMGQPLVILAPHAVEALVKQPPDRWLSNARMTHYQAMLLDTDRVQFGPVVALNPATLLPLPEEGAPHDCLEILAETHGTRPDLTDQPIPDADHTWYTDGSSFLQEGQRKAGAAVTTETEVIWAGALPAGTSAQRAELIALTQALKMAEGKRLNVYTDSRYAFATAHIHGEIYRRRGWLTSEGREIKNKSEILALLKALFLPKRLSIIHCLGHQKGDSAEARGNRLADQAAREAAIKTPPDTSTLLIAGKRTADGSEFEKRTADGSEFESPKKKAKVE

SEQ ID NO: 2142 - protein, 2094 aa, synthetic construct
  source 1..2094: note = Description of Artificial Sequence: Synthetic polypeptide
MPAAKRVKLDGGDKKYSIGLDIGTNSVGWAVITDEYKVPSKKFKVLGNTDRHSIKKNLIGALLFDSGETAEATRLKRTARRRYTRRKNRICYLQEIFSNEMAKVDDSFFHRLEESFLVEEDKKHERHPIFGNIVDEVAYHEKYPTIYHLRKKLVDSTDKADLRLIYLALAHMIKFRGHFLIEGDLNPDNSDVDKLFIQLVQTYNQLFEENPINASGVDAKAILSARLSKSRRLENLIAQLPGEKKNGLFGNLIALSLGLTPNFKSNFDLAEDAKLQLSKDTYDDDLDNLLAQIGDQYADLFLAAKNLSDAILLSDILRVNTEITKAPLSASMIKRYDEHHQDLTLLKALVRQQLPEKYKEIFFDQSKNGYAGYIDGGASQEEFYKFIKPILEKMDGTEELLVKLNREDLLRKQRTFDNGSIPHQIHLGELHAILRRQEDFYPFLKDNREKIEKILTFRIPYYVGPLARGNSRFAWMTRKSEETITPWNFEEVVDKGASAQSFIERMTNFDKNLPNEKVLPKHSLLYEYFTVYNELTKVKYVTEGMRKPAFLSGEQKKAIVDLLFKTNRKVTVKQLKEDYFKKIECFDSVEISGVEDRFNASLGTYHDLLKIIKDKDFLDNEENEDILEDIVLTLTLFEDREMIEERLKTYAHLFDDKVMKQLKRRRYTGWGRLSRKLINGIRDKQSGKTILDFLKSDGFANRNFMQLIHDDSLTFKEDIQKAQVSGQGDSLHEHIANLAGSPAIKKGILQTVKVVDELVKVMGRHKPENIVIEMARENQTTQKGQKNSRERMKRIEEGIKELGSQILKEHPVENTQLQNEKLYLYYLQNGRDMYVDQELDINRLSDYDVDHIVPQSFLKDDSIDNKVLTRSDKARGKSDNVPSEEVVKKMKNYWRQLLNAKLITQRKFDNLTKAERGGLSELDKAGFIKRQLVETRQITKHVAQILDSRMNTKYDENDKLIREVKVITLKSKLVSDFRKDFQFYKVREINNYHHAHDAYLNAVVGTALIKKYPKLESEFVYGDYKVYDVRKMIAKSEQEIGKATAKYFFYSNIMNFFKTEITLANGEIRKRPLIETNGETGEIVWDKGRDFATVRKVLSMPQVNIVKKTEVQTGGFSKESILPKRNSDKLIARKKDWDPKKYGGFDSPTVAYSVLVVAKVEKGKSKKLKSVKELLGITIMERSSFEKNPIDFLEAKGYKEVKKDLIIKLPKYSLFELENGRKRMLASAGELQKGNELALPSKYVNFLYLASHYEKLKGSPEDNEQKQLFVEQHKHYLDEIIEQISEFSKRVILADANLDKVLSAYNKHRDKPIREQAENIIHLFTLTNLGAPAAFKYFDTTIDRKRYTSTKEVLDATLIHQSITGLYETRIDLSQLGGDGGGSSGSSGSSGGLGIEDEYRLHETSTEPDVSLGSTWLSDFPQAWAETGGMGLAVRQAPLIIPLKATSTPVSIQQYPMSHEARLGIKPHIQRLLDQGILVPCQSPWNTPLLPVKKPGTNDYRPVQDLREVNKRVEDIHPTVPNPYNLLSGLPPSHQWYTVLDLKDAFFCLRLHPTSQPLFAFEWRDPGMGISGQLTWTRLPQGFKNSPTLFNEALHRDLADFRIQHPDLILLQYVDDILLAATSELDCQQGTRALLQTLGDLGYRASAKKAQICQKQVKYLGYLLREGQRWLTEARKETVMGQPVPKTPRQLREFLGKAGFCRLFIPGFAEMAAPLYPLTKPGTLFSWGPDQQKAYQEIKQALLTAPALGLPDLTKPFELFVDEKQGYAKGVLTQKLGPWRRPVAYLSKKLDPVAAGWPPCLRMVAAIAVLTKDAGKLTMGQPLVILAPHAVEALVKQPPDRWLSNARMTHYQAMLLDTDRVQFGPVVALNPATLLPLPEEGAPHDCLEILAETHGTRPDLTDQPIPDADHTWYTDGSSFLQEGQRKAGAAVTTETEVIWAGALPAGTSAQRAELIALTQALKMAEGKRLNVYTDSRYAFATAHIHGEIYRRRGWLTSEGREIKNKSEILALLKALFLPKRLSIIHCLGHQKGDSAEARGNRLADQAAREAAIKTPPDTSTLLIAGKRTADGSEFEKRTADGSEFESPKKKAKVE

SEQ ID NO: 2143 - protein, 2094 aa, synthetic construct
  source 1..2094: note = Description of Artificial Sequence: Synthetic polypeptide
MPAAKRVKLDGGDKKYSIGLDIGTNSVGWAVITDEYKVPSKKFKVLGNTDRHSIKKNLIGALLFDSGETAEATRLKRTARRRYTRRKNRICYLQEIFSNEMAKVDDSFFHRLEESFLVEEDKKHERHPIFGNIVDEVAYHEKYPTIYHLRKKLVDSTDKADLRLIYLALAHMIKFRGHFLIEGDLNPDNSDVDKLFIQLVQTYNQLFEENPINASGVDAKAILSARLSKSRRLENLIAQLPGEKKNGLFGNLIALSLGLTPNFKSNFDLAEDAKLQLSKDTYDDDLDNLLAQIGDQYADLFLAAKNLSDAILLSDILRVNTEITKAPLSASMIKRYDEHHQDLTLLKALVRQQLPEKYKEIFFDQSKNGYAGYIDGGASQEEFYKFIKPILEKMDGTEELLVKLNREDLLRKQRTFDNGSIPHQIHLGELHAILRRQEDFYPFLKDNREKIEKILTFRIPYYVGPLARGNSRFAWMTRKSEETITPWNFEEVVDKGASAQSFIERMTNFDKNLPNEKVLPKHSLLYEYFTVYNELTKVKYVTEGMRKPAFLSGEQKKAIVDLLFKTNRKVTVKQLKEDYFKKIECFDSVEISGVEDRFNASLGTYHDLLKIIKDKDFLDNEENEDILEDIVLTLTLFEDREMIEERLKTYAHLFDDKVMKQLKRRRYTGWGRLSRKLINGIRDKQSGKTILDFLKSDGFANRNFMQLIHDDSLTFKEDIQKAQVSGQGDSLHEHIANLAGSPAIKKGILQTVKVVDELVKVMGRHKPENIVIEMARENQTTQKGQKNSRERMKRIEEGIKELGSQILKEHPVENTQLQNEKLYLYYLQNGRDMYVDQELDINRLSDYDVDHIVPQSFLKDDSIDNKVLTRSDKARGKSDNVPSEEVVKKMKNYWRQLLNAKLITQRKFDNLTKAERGGLSELDKAGFIKRQLVETRQITKHVAQILDSRMNTKYDENDKLIREVKVITLKSKLVSDFRKDFQFYKVREINNYHHAHDAYLNAVVGTALIKKYPKLESEFVYGDYKVYDVRKMIAKSEQEIGKATAKYFFYSNIMNFFKTEITLANGEIRKRPLIETNGETGEIVWDKGRDFATVRKVLSMPQVNIVKKTEVQTGGFSKESILPKRNSDKLIARKKDWDPKKYGGFDSPTVAYSVLVVAKVEKGKSKKLKSVKELLGITIMERSSFEKNPIDFLEAKGYKEVKKDLIIKLPKYSLFELENGRKRMLASAGELQKGNELALPSKYVNFLYLASHYEKLKGSPEDNEQKQLFVEQHKHYLDEIIEQISEFSKRVILADANLDKVLSAYNKHRDKPIREQAENIIHLFTLTNLGAPAAFKYFDTTIDRKRYTSTKEVLDATLIHQSITGLYETRIDLSQLGGDGGGSSGGSPAPGGLGIEDEYRLHETSTEPDVSLGSTWLSDFPQAWAETGGMGLAVRQAPLIIPLKATSTPVSIQQYPMSHEARLGIKPHIQRLLDQGILVPCQSPWNTPLLPVKKPGTNDYRPVQDLREVNKRVEDIHPTVPNPYNLLSGLPPSHQWYTVLDLKDAFFCLRLHPTSQPLFAFEWRDPGMGISGQLTWTRLPQGFKNSPTLFNEALHRDLADFRIQHPDLILLQYVDDILLAATSELDCQQGTRALLQTLGDLGYRASAKKAQICQKQVKYLGYLLREGQRWLTEARKETVMGQPVPKTPRQLREFLGKAGFCRLFIPGFAEMAAPLYPLTKPGTLFSWGPDQQKAYQEIKQALLTAPALGLPDLTKPFELFVDEKQGYAKGVLTQKLGPWRRPVAYLSKKLDPVAAGWPPCLRMVAAIAVLTKDAGKLTMGQPLVILAPHAVEALVKQPPDRWLSNARMTHYQAMLLDTDRVQFGPVVALNPATLLPLPEEGAPHDCLEILAETHGTRPDLTDQPIPDADHTWYTDGSSFLQEGQRKAGAAVTTETEVIWAGALPAGTSAQRAELIALTQALKMAEGKRLNVYTDSRYAFATAHIHGEIYRRRGWLTSEGREIKNKSEILALLKALFLPKRLSIIHCLGHQKGDSAEARGNRLADQAAREAAIKTPPDTSTLLIAGKRTADGSEFEKRTADGSEFESPKKKAKVE

SEQ ID NO: 2144 - protein, 2090 aa, synthetic construct
  source 1..2090: note = Description of Artificial Sequence: Synthetic polypeptide
MPAAKRVKLDGGDKKYSIGLDIGTNSVGWAVITDEYKVPSKKFKVLGNTDRHSIKKNLIGALLFDSGETAEATRLKRTARRRYTRRKNRICYLQEIFSNEMAKVDDSFFHRLEESFLVEEDKKHERHPIFGNIVDEVAYHEKYPTIYHLRKKLVDSTDKADLRLIYLALAHMIKFRGHFLIEGDLNPDNSDVDKLFIQLVQTYNQLFEENPINASGVDAKAILSARLSKSRRLENLIAQLPGEKKNGLFGNLIALSLGLTPNFKSNFDLAEDAKLQLSKDTYDDDLDNLLAQIGDQYADLFLAAKNLSDAILLSDILRVNTEITKAPLSASMIKRYDEHHQDLTLLKALVRQQLPEKYKEIFFDQSKNGYAGYIDGGASQEEFYKFIKPILEKMDGTEELLVKLNREDLLRKQRTFDNGSIPHQIHLGELHAILRRQEDFYPFLKDNREKIEKILTFRIPYYVGPLARGNSRFAWMTRKSEETITPWNFEEVVDKGASAQSFIERMTNFDKNLPNEKVLPKHSLLYEYFTVYNELTKVKYVTEGMRKPAFLSGEQKKAIVDLLFKTNRKVTVKQLKEDYFKKIECFDSVEISGVEDRFNASLGTYHDLLKIIKDKDFLDNEENEDILEDIVLTLTLFEDREMIEERLKTYAHLFDDKVMKQLKRRRYTGWGRLSRKLINGIRDKQSGKTILDFLKSDGFANRNFMQLIHDDSLTFKEDIQKAQVSGQGDSLHEHIANLAGSPAIKKGILQTVKVVDELVKVMGRHKPENIVIEMARENQTTQKGQKNSRERMKRIEEGIKELGSQILKEHPVENTQLQNEKLYLYYLQNGRDMYVDQELDINRLSDYDVDHIVPQSFLKDDSIDNKVLTRSDKARGKSDNVPSEEVVKKMKNYWRQLLNAKLITQRKFDNLTKAERGGLSELDKAGFIKRQLVETRQITKHVAQILDSRMNTKYDENDKLIREVKVITLKSKLVSDFRKDFQFYKVREINNYHHAHDAYLNAVVGTALIKKYPKLESEFVYGDYKVYDVRKMIAKSEQEIGKATAKYFFYSNIMNFFKTEITLANGEIRKRPLIETNGETGEIVWDKGRDFATVRKVLSMPQVNIVKKTEVQTGGFSKESILPKRNSDKLIARKKDWDPKKYGGFDSPTVAYSVLVVAKVEKGKSKKLKSVKELLGITIMERSSFEKNPIDFLEAKGYKEVKKDLIIKLPKYSLFELENGRKRMLASAGELQKGNELALPSKYVNFLYLASHYEKLKGSPEDNEQKQLFVEQHKHYLDEIIEQISEFSKRVILADANLDKVLSAYNKHRDKPIREQAENIIHLFTLTNLGAPAAFKYFDTTIDRKRYTSTKEVLDATLIHQSITGLYETRIDLSQLGGDGGPAPAPGGLGIEDEYRLHETSTEPDVSLGSTWLSDFPQAWAETGGMGLAVRQAPLIIPLKATSTPVSIQQYPMSHEARLGIKPHIQRLLDQGILVPCQSPWNTPLLPVKKPGTNDYRPVQDLREVNKRVEDIHPTVPNPYNLLSGLPPSHQWYTVLDLKDAFFCLRLHPTSQPLFAFEWRDPGMGISGQLTWTRLPQGFKNSPTLFNEALHRDLADFRIQHPDLILLQYVDDILLAATSELDCQQGTRALLQTLGDLGYRASAKKAQICQKQVKYLGYLLREGQRWLTEARKETVMGQPVPKTPRQLREFLGKAGFCRLFIPGFAEMAAPLYPLTKPGTLFSWGPDQQKAYQEIKQALLTAPALGLPDLTKPFELFVDEKQGYAKGVLTQKLGPWRRPVAYLSKKLDPVAAGWPPCLRMVAAIAVLTKDAGKLTMGQPLVILAPHAVEALVKQPPDRWLSNARMTHYQAMLLDTDRVQFGPVVALNPATLLPLPEEGAPHDCLEILAETHGTRPDLTDQPIPDADHTWYTDGSSFLQEGQRKAGAAVTTETEVIWAGALPAGTSAQRAELIALTQALKMAEGKRLNVYTDSRYAFATAHIHGEIYRRRGWLTSEGREIKNKSEILALLKALFLPKRLSIIHCLGHQKGDSAEARGNRLADQAAREAAIKTPPDTSTLLIAGKRTADGSEFEKRTADGSEFESPKKKAKVE

SEQ ID NO: 2145 - protein, 2096 aa, synthetic construct
  source 1..2096: note = Description of Artificial Sequence: Synthetic polypeptide
MPAAKRVKLDGGDKKYSIGLDIGTNSVGWAVITDEYKVPSKKFKVLGNTDRHSIKKNLIGALLFDSGETAEATRLKRTARRRYTRRKNRICYLQEIFSNEMAKVDDSFFHRLEESFLVEEDKKHERHPIFGNIVDEVAYHEKYPTIYHLRKKLVDSTDKADLRLIYLALAHMIKFRGHFLIEGDLNPDNSDVDKLFIQLVQTYNQLFEENPINASGVDAKAILSARLSKSRRLENLIAQLPGEKKNGLFGNLIALSLGLTPNFKSNFDLAEDAKLQLSKDTYDDDLDNLLAQIGDQYADLFLAAKNLSDAILLSDILRVNTEITKAPLSASMIKRYDEHHQDLTLLKALVRQQLPEKYKEIFFDQSKNGYAGYIDGGASQEEFYKFIKPILEKMDGTEELLVKLNREDLLRKQRTFDNGSIPHQIHLGELHAILRRQEDFYPFLKDNREKIEKILTFRIPYYVGPLARGNSRFAWMTRKSEETITPWNFEEVVDKGASAQSFIERMTNFDKNLPNEKVLPKHSLLYEYFTVYNELTKVKYVTEGMRKPAFLSGEQKKAIVDLLFKTNRKVTVKQLKEDYFKKIECFDSVEISGVEDRFNASLGTYHDLLKIIKDKDFLDNEENEDILEDIVLTLTLFEDREMIEERLKTYAHLFDDKVMKQLKRRRYTGWGRLSRKLINGIRDKQSGKTILDFLKSDGFANRNFMQLIHDDSLTFKEDIQKAQVSGQGDSLHEHIANLAGSPAIKKGILQTVKVVDELVKVMGRHKPENIVIEMARENQTTQKGQKNSRERMKRIEEGIKELGSQILKEHPVENTQLQNEKLYLYYLQNGRDMYVDQELDINRLSDYDVDHIVPQSFLKDDSIDNKVLTRSDKARGKSDNVPSEEVVKKMKNYWRQLLNAKLITQRKFDNLTKAERGGLSELDKAGFIKRQLVETRQITKHVAQILDSRMNTKYDENDKLIREVKVITLKSKLVSDFRKDFQFYKVREINNYHHAHDAYLNAVVGTALIKKYPKLESEFVYGDYKVYDVRKMIAKSEQEIGKATAKYFFYSNIMNFFKTEITLANGEIRKRPLIETNGETGEIVWDKGRDFATVRKVLSMPQVNIVKKTEVQTGGFSKESILPKRNSDKLIARKKDWDPKKYGGFDSPTVAYSVLVVAKVEKGKSKKLKSVKELLGITIMERSSFEKNPIDFLEAKGYKEVKKDLIIKLPKYSLFELENGRKRMLASAGELQKGNELALPSKYVNFLYLASHYEKLKGSPEDNEQKQLFVEQHKHYLDEIIEQISEFSKRVILADANLDKVLSAYNKHRDKPIREQAENIIHLFTLTNLGAPAAFKYFDTTIDRKRYTSTKEVLDATLIHQSITGLYETRIDLSQLGGDGGGGGGSSEAAAKGGLGIEDEYRLHETSTEPDVSLGSTWLSDFPQAWAETGGMGLAVRQAPLIIPLKATSTPVSIQQYPMSHEARLGIKPHIQRLLDQGILVPCQSPWNTPLLPVKKPGTNDYRPVQDLREVNKRVEDIHPTVPNPYNLLSGLPPSHQWYTVLDLKDAFFCLRLHPTSQPLFAFEWRDPGMGISGQLTWTRLPQGFKNSPTLFNEALHRDLADFRIQHPDLILLQYVDDILLAATSELDCQQGTRALLQTLGDLGYRASAKKAQICQKQVKYLGYLLREGQRWLTEARKETVMGQPVPKTPRQLREFLGKAGFCRLFIPGFAEMAAPLYPLTKPGTLFSWGPDQQKAYQEIKQALLTAPALGLPDLTKPFELFVDEKQGYAKGVLTQKLGPWRRPVAYLSKKLDPVAAGWPPCLRMVAAIAVLTKDAGKLTMGQPLVILAPHAVEALVKQPPDRWLSNARMTHYQAMLLDTDRVQFGPVVALNPATLLPLPEEGAPHDCLEILAETHGTRPDLTDQPIPDADHTWYTDGSSFLQEGQRKAGAAVTTETEVIWAGALPAGTSAQRAELIALTQALKMAEGKRLNVYTDSRYAFATAHIHGEIYRRRGWLTSEGREIKNKSEILALLKALFLPKRLSIIHCLGHQKGDSAEARGNRLADQAAREAAIKTPPDTSTLLIAGKRTADGSEFEKRTADGSEFESPKKKAKVE

SEQ ID NO: 2146 - protein, 2096 aa, synthetic construct
  source 1..2096: note = Description of Artificial Sequence: Synthetic polypeptide
MPAAKRVKLDGGDKKYSIGLDIGTNSVGWAVITDEYKVPSKKFKVLGNTDRHSIKKNLIGALLFDSGETAEATRLKRTARRRYTRRKNRICYLQEIFSNEMAKVDDSFFHRLEESFLVEEDKKHERHPIFGNIVDEVAYHEKYPTIYHLRKKLVDSTDKADLRLIYLALAHMIKFRGHFLIEGDLNPDNSDVDKLFIQLVQTYNQLFEENPINASGVDAKAILSARLSKSRRLENLIAQLPGEKKNGLFGNLIALSLGLTPNFKSNFDLAEDAKLQLSKDTYDDDLDNLLAQIGDQYADLFLAAKNLSDAILLSDILRVNTEITKAPLSASMIKRYDEHHQDLTLLKALVRQQLPEKYKEIFFDQSKNGYAGYIDGGASQEEFYKFIKPILEKMDGTEELLVKLNREDLLRKQRTFDNGSIPHQIHLGELHAILRRQEDFYPFLKDNREKIEKILTFRIPYYVGPLARGNSRFAWMTRKSEETITPWNFEEVVDKGASAQSFIERMTNFDKNLPNEKVLPKHSLLYEYFTVYNELTKVKYVTEGMRKPAFLSGEQKKAIVDLLFKTNRKVTVKQLKEDYFKKIECFDSVEISGVEDRFNASLGTYHDLLKIIKDKDFLDNEENEDILEDIVLTLTLFEDREMIEERLKTYAHLFDDKVMKQLKRRRYTGWGRLSRKLINGIRDKQSGKTILDFLKSDGFANRNFMQLIHDDSLTFKEDIQKAQVSGQGDSLHEHIANLAGSPAIKKGILQTVKVVDELVKVMGRHKPENIVIEMARENQTTQKGQKNSRERMKRIEEGIKELGSQILKEHPVENTQLQNEKLYLYYLQNGRDMYVDQELDINRLSDYDVDHIVPQSFLKDDSIDNKVLTRSDKARGKSDNVPSEEVVKKMKNYWRQLLNAKLITQRKFDNLTKAERGGLSELDKAGFIKRQLVETRQITKHVAQILDSRMNTKYDENDKLIREVKVITLKSKLVSDFRKDFQFYKVREINNYHHAHDAYLNAVVGTALIKKYPKLESEFVYGDYKVYDVRKMIAKSEQEIGKATAKYFFYSNIMNFFKTEITLANGEIRKRPLIETNGETGEIVWDKGRDFATVRKVLSMPQVNIVKKTEVQTGGFSKESILPKRNSDKLIARKKDWDPKKYGGFDSPTVAYSVLVVAKVEKGKSKKLKSVKELLGITIMERSSFEKNPIDFLEAKGYKEVKKDLIIKLPKYSLFELENGRKRMLASAGELQKGNELALPSKYVNFLYLASHYEKLKGSPEDNEQKQLFVEQHKHYLDEIIEQISEFSKRVILADANLDKVLSAYNKHRDKPIREQAENIIHLFTLTNLGAPAAFKYFDTTIDRKRYTSTKEVLDATLIHQSITGLYETRIDLSQLGGDGGGGSEAAAKPAPGGLGIEDEYRLHETSTEPDVSLGSTWLSDFPQAWAETGGMGLAVRQAPLIIPLKATSTPVSIQQYPMSHEARLGIKPHIQRLLDQGILVPCQSPWNTPLLPVKKPGTNDYRPVQDLREVNKRVEDIHPTVPNPYNLLSGLPPSHQWYTVLDLKDAFFCLRLHPTSQPLFAFEWRDPGMGISGQLTWTRLPQGFKNSPTLFNEALHRDLADFRIQHPDLILLQYVDDILLAATSELDCQQGTRALLQTLGDLGYRASAKKAQICQKQVKYLGYLLREGQRWLTEARKETVMGQPVPKTPRQLREFLGKAGFCRLFIPGFAEMAAPLYPLTKPGTLFSWGPDQQKAYQEIKQALLTAPALGLPDLTKPFELFVDEKQGYAKGVLTQKLGPWRRPVAYLSKKLDPVAAGWPPCLRMVAAIAVLTKDAGKLTMGQPLVILAPHAVEALVKQPPDRWLSNARMTHYQAMLLDTDRVQFGPVVALNPATLLPLPEEGAPHDCLEILAETHGTRPDLTDQPIPDADHTWYTDGSSFLQEGQRKAGAAVTTETEVIWAGALPAGTSAQRAELIALTQALKMAEGKRLNVYTDSRYAFATAHIHGEIYRRRGWLTSEGREIKNKSEILALLKALFLPKRLSIIHCLGHQKGDSAEARGNRLADQAAREAAIKTPPDTSTLLIAGKRTADGSEFEKRTADGSEFESPKKKAKVE

SEQ ID NO: 2147 - protein, 2093 aa, synthetic construct
  source 1..2093: note = Description of Artificial Sequence: Synthetic polypeptide
MPAAKRVKLDGGDKKYSIGLDIGTNSVGWAVITDEYKVPSKKFKVLGNTDRHSIKKNLIGALLFDSGETAEATRLKRTARRRYTRRKNRICYLQEIFSNEMAKVDDSFFHRLEESFLVEEDKKHERHPIFGNIVDEVAYHEKYPTIYHLRKKLVDSTDKADLRLIYLALAHMIKFRGHFLIEGDLNPDNSDVDKLFIQLVQTYNQLFEENPINASGVDAKAILSARLSKSRRLENLIAQLPGEKKNGLFGNLIALSLGLTPNFKSNFDLAEDAKLQLSKDTYDDDLDNLLAQIGDQYADLFLAAKNLSDAILLSDILRVNTEITKAPLSASMIKRYDEHHQDLTLLKALVRQQLPEKYKEIFFDQSKNGYAGYIDGGASQEEFYKFIKPILEKMDGTEELLVKLNREDLLRKQRTFDNGSIPHQIHLGELHAILRRQEDFYPFLKDNREKIEKILTFRIPYYVGPLARGNSRFAWMTRKSEETITPWNFEEVVDKGASAQSFIERMTNFDKNLPNEKVLPKHSLLYEYFTVYNELTKVKYVTEGMRKPAFLSGEQKKAIVDLLFKTNRKVTVKQLKEDYFKKIECFDSVEISGVEDRFNASLGTYHDLLKIIKDKDFLDNEENEDILEDIVLTLTLFEDREMIEERLKTYAHLFDDKVMKQLKRRRYTGWGRLSRKLINGIRDKQSGKTILDFLKSDGFANRNFMQLIHDDSLTFKEDIQKAQVSGQGDSLHEHIANLAGSPAIKKGILQTVKVVDELVKVMGRHKPENIVIEMARENQTTQKGQKNSRERMKRIEEGIKELGSQILKEHPVENTQLQNEKLYLYYLQNGRDMYVDQELDINRLSDYDVDHIVPQSFLKDDSIDNKVLTRSDKARGKSDNVPSEEVVKKMKNYWRQLLNAKLITQRKFDNLTKAERGGLSELDKAGFIKRQLVETRQITKHVAQILDSRMNTKYDENDKLIREVKVITLKSKLVSDFRKDFQFYKVREINNYHHAHDAYLNAVVGTALIKKYPKLESEFVYGDYKVYDVRKMIAKSEQEIGKATAKYFFYSNIMNFFKTEITLANGEIRKRPLIETNGETGEIVWDKGRDFATVRKVLSMPQVNIVKKTEVQTGGFSKESILPKRNSDKLIARKKDWDPKKYGGFDSPTVAYSVLVVAKVEKGKSKKLKSVKELLGITIMERSSFEKNPIDFLEAKGYKEVKKDLIIKLPKYSLFELENGRKRMLASAGELQKGNELALPSKYVNFLYLASHYEKLKGSPEDNEQKQLFVEQHKHYLDEIIEQISEFSKRVILADANLDKVLSAYNKHRDKPIREQAENIIHLFTLTNLGAPAAFKYFDTTIDRKRYTSTKEVLDATLIHQSITGLYETRIDLSQLGGDGGEAAAKPAPGGLGIEDEYRLHETSTEPDVSLGSTWLSDFPQAWAETGGMGLAVRQAPLIIPLKATSTPVSIQQYPMSHEARLGIKPHIQRLLDQGILVPCQSPWNTPLLPVKKPGTNDYRPVQDLREVNKRVEDIHPTVPNPYNLLSGLPPSHQWYTVLDLKDAFFCLRLHPTSQPLFAFEWRDPGMGISGQLTWTRLPQGFKNSPTLFNEALHRDLADFRIQHPDLILLQYVDDILLAATSELDCQQGTRALLQTLGDLGYRASAKKAQICQKQVKYLGYLLREGQRWLTEARKETVMGQPVPKTPRQLREFLGKAGFCRLFIPGFAEMAAPLYPLTKPGTLFSWGPDQQKAYQEIKQALLTAPALGLPDLTKPFELFVDEKQGYAKGVLTQKLGPWRRPVAYLSKKLDPVAAGWPPCLRMVAAIAVLTKDAGKLTMGQPLVILAPHAVEALVKQPPDRWLSNARMTHYQAMLLDTDRVQFGPVVALNPATLLPLPEEGAPHDCLEILAETHGTRPDLTDQPIPDADHTWYTDGSSFLQEGQRKAGAAVTTETEVIWAGALPAGTSAQRAELIALTQALKMAEGKRLNVYTDSRYAFATAHIHGEIYRRRGWLTSEGREIKNKSEILALLKALFLPKRLSIIHCLGHQKGDSAEARGNRLADQAAREAAIKTPPDTSTLLIAGKRTADGSEFEKRTADGSEFESPKKKAKVE

SEQ ID NO: 2148 - protein, 2091 aa, synthetic construct
  source 1..2091: note = Description of Artificial Sequence: Synthetic polypeptide
MPAAKRVKLDGGDKKYSIGLDIGTNSVGWAVITDEYKVPSKKFKVLGNTDRHSIKKNLIGALLFDSGETAEATRLKRTARRRYTRRKNRICYLQEIFSNEMAKVDDSFFHRLEESFLVEEDKKHERHPIFGNIVDEVAYHEKYPTIYHLRKKLVDSTDKADLRLIYLALAHMIKFRGHFLIEGDLNPDNSDVDKLFIQLVQTYNQLFEENPINASGVDAKAILSARLSKSRRLENLIAQLPGEKKNGLFGNLIALSLGLTPNFKSNFDLAEDAKLQLSKDTYDDDLDNLLAQIGDQYADLFLAAKNLSDAILLSDILRVNTEITKAPLSASMIKRYDEHHQDLTLLKALVRQQLPEKYKEIFFDQSKNGYAGYIDGGASQEEFYKFIKPILEKMDGTEELLVKLNREDLLRKQRTFDNGSIPHQIHLGELHAILRRQEDFYPFLKDNREKIEKILTFRIPYYVGPLARGNSRFAWMTRKSEETITPWNFEEVVDKGASAQSFIERMTNFDKNLPNEKVLPKHSLLYEYFTVYNELTKVKYVTEGMRKPAFLSGEQKKAIVDLLFKTNRKVTVKQLKEDYFKKIECFDSVEISGVEDRFNASLGTYHDLLKIIKDKDFLDNEENEDILEDIVLTLTLFEDREMIEERLKTYAHLFDDKVMKQLKRRRYTGWGRLSRKLINGIRDKQSGKTILDFLKSDGFANRNFMQLIHDDSLTFKEDIQKAQVSGQGDSLHEHIANLAGSPAIKKGILQTVKVVDELVKVMGRHKPENIVIEMARENQTTQKGQKNSRERMKRIEEGIKELGSQILKEHPVENTQLQNEKLYLYYLQNGRDMYVDQELDINRLSDYDVDHIVPQSFLKDDSIDNKVLTRSDKARGKSDNVPSEEVVKKMKNYWRQLLNAKLITQRKFDNLTKAERGGLSELDKAGFIKRQLVETRQITKHVAQILDSRMNTKYDENDKLIREVKVITLKSKLVSDFRKDFQFYKVREINNYHHAHDAYLNAVVGTALIKKYPKLESEFVYGDYKVYDVRKMIAKSEQEIGKATAKYFFYSNIMNFFKTEITLANGEIRKRPLIETNGETGEIVWDKGRDFATVRKVLSMPQVNIVKKTEVQTGGFSKESILPKRNSDKLIARKKDWDPKKYGGFDSPTVAYSVLVVAKVEKGKSKKLKSVKELLGITIMERSSFEKNPIDFLEAKGYKEVKKDLIIKLPKYSLFELENGRKRMLASAGELQKGNELALPSKYVNFLYLASHYEKLKGSPEDNEQKQLFVEQHKHYLDEIIEQISEFSKRVILADANLDKVLSAYNKHRDKPIREQAENIIHLFTLTNLGAPAAFKYFDTTIDRKRYTSTKEVLDATLIHQSITGLYETRIDLSQLGGDGGGGSGGGGGLGIEDEYRLHETSTEPDVSLGSTWLSDFPQAWAETGGMGLAVRQAPLIIPLKATSTPVSIQQYPMSHEARLGIKPHIQRLLDQGILVPCQSPWNTPLLPVKKPGTNDYRPVQDLREVNKRVEDIHPTVPNPYNLLSGLPPSHQWYTVLDLKDAFFCLRLHPTSQPLFAFEWRDPGMGISGQLTWTRLPQGFKNSPTLFNEALHRDLADFRIQHPDLILLQYVDDILLAATSELDCQQGTRALLQTLGDLGYRASAKKAQICQKQVKYLGYLLREGQRWLTEARKETVMGQPVPKTPRQLREFLGKAGFCRLFIPGFAEMAAPLYPLTKPGTLFSWGPDQQKAYQEIKQALLTAPALGLPDLTKPFELFVDEKQGYAKGVLTQKLGPWRRPVAYLSKKLDPVAAGWPPCLRMVAAIAVLTKDAGKLTMGQPLVILAPHAVEALVKQPPDRWLSNARMTHYQAMLLDTDRVQFGPVVALNPATLLPLPEEGAPHDCLEILAETHGTRPDLTDQPIPDADHTWYTDGSSFLQEGQRKAGAAVTTETEVIWAGALPAGTSAQRAELIALTQALKMAEGKRLNVYTDSRYAFATAHIHGEIYRRRGWLTSEGREIKNKSEILALLKALFLPKRLSIIHCLGHQKGDSAEARGNRLADQAAREAAIKTPPDTSTLLIAGKRTADGSEFEKRTADGSEFESPKKKAKVE

SEQ ID NO: 2149 - protein, 2096 aa, synthetic construct
  source 1..2096: note = Description of Artificial Sequence: Synthetic polypeptide
MPAAKRVKLDGGDKKYSIGLDIGTNSVGWAVITDEYKVPSKKFKVLGNTDRHSIKKNLIGALLFDSGETAEATRLKRTARRRYTRRKNRICYLQEIFSNEMAKVDDSFFHRLEESFLVEEDKKHERHPIFGNIVDEVAYHEKYPTIYHLRKKLVDSTDKADLRLIYLALAHMIKFRGHFLIEGDLNPDNSDVDKLFIQLVQTYNQLFEENPINASGVDAKAILSARLSKSRRLENLIAQLPGEKKNGLFGNLIALSLGLTPNFKSNFDLAEDAKLQLSKDTYDDDLDNLLAQIGDQYADLFLAAKNLSDAILLSDILRVNTEITKAPLSASMIKRYDEHHQDLTLLKALVRQQLPEKYKEIFFDQSKNGYAGYIDGGASQEEFYKFIKPILEKMDGTEELLVKLNREDLLRKQRTFDNGSIPHQIHLGELHAILRRQEDFYPFLKDNREKIEKILTFRIPYYVGPLARGNSRFAWMTRKSEETITPWNFEEVVDKGASAQSFIERMTNFDKNLPNEKVLPKHSLLYEYFTVYNELTKVKYVTEGMRKPAFLSGEQKKAIVDLLFKTNRKVTVKQLKEDYFKKIECFDSVEISGVEDRFNASLGTYHDLLKIIKDKDFLDNEENEDILEDIVLTLTLFEDREMIEERLKTYAHLFDDKVMKQLKRRRYTGWGRLSRKLINGIRDKQSGKTILDFLKSDGFANRNFMQLIHDDSLTFKEDIQKAQVSGQGDSLHEHIANLAGSPAIKKGILQTVKVVDELVKVMGRHKPENIVIEMARENQTTQKGQKNSRERMKRIEEGIKELGSQILKEHPVENTQLQNEKLYLYYLQNGRDMYVDQELDINRLSDYDVDHIVPQSFLKDDSIDNKVLTRSDKARGKSDNVPSEEVVKKMKNYWRQLLNAKLITQRKFDNLTKAERGGLSELDKAGFIKRQLVETRQITKHVAQILDSRMNTKYDENDKLIREVKVITLKSKLVSDFRKDFQFYKVREINNYHHAHDAYLNAVVGTALIKKYPKLESEFVYGDYKVYDVRKMIAKSEQEIGKATAKYFFYSNIMNFFKTEITLANGEIRKRPLIETNGETGEIVWDKGRDFATVRKVLSMPQVNIVKKTEVQTGGFSKESILPKRNSDKLIARKKDWDPKKYGGFDSPTVAYSVLVVAKVEKGKSKKLKSVKELLGITIMERSSFEKNPIDFLEAKGYKEVKKDLIIKLPKYSLFELENGRKRMLASAGELQKGNELALPSKYVNFLYLASHYEKLKGSPEDNEQKQLFVEQHKHYLDEIIEQISEFSKRVILADANLDKVLSAYNKHRDKPIREQAENIIHLFTLTNLGAPAAFKYFDTTIDRKRYTSTKEVLDATLIHQSITGLYETRIDLSQLGGDGGGSSPAPEAAAKGGLGIEDEYRLHETSTEPDVSLGSTWLSDFPQAWAETGGMGLAVRQAPLIIPLKATSTPVSIQQYPMSHEARLGIKPHIQRLLDQGILVPCQSPWNTPLLPVKKPGTNDYRPVQDLREVNKRVEDIHPTVPNPYNLLSGLPPSHQWYTVLDLKDAFFCLRLHPTSQPLFAFEWRDPGMGISGQLTWTRLPQGFKNSPTLFNEALHRDLADFRIQHPDLILLQYVDDILLAATSELDCQQGTRALLQTLGDLGYRASAKKAQICQKQVKYLGYLLREGQRWLTEARKETVMGQPVPKTPRQLREFLGKAGFCRLFIPGFAEMAAPLYPLTKPGTLFSWGPDQQKAYQEIKQALLTAPALGLPDLTKPFELFVDEKQGYAKGVLTQKLGPWRRPVAYLSKKLDPVAAGWPPCLRMVAAIAVLTKDAGKLTMGQPLVILAPHAVEALVKQPPDRWLSNARMTHYQAMLLDTDRVQFGPVVALNPATLLPLPEEGAPHDCLEILAETHGTRPDLTDQPIPDADHTWYTDGSSFLQEGQRKAGAAVTTETEVIWAGALPAGTSAQRAELIALTQALKMAEGKRLNVYTDSRYAFATAHIHGEIYRRRGWLTSEGREIKNKSEILALLKALFLPKRLSIIHCLGHQKGDSAEARGNRLADQAAREAAIKTPPDTSTLLIAGKRTADGSEFEKRTADGSEFESPKKKAKVE

SEQ ID NO: 2150 - protein, 2091 aa, synthetic construct; identical to SEQ ID NO: 2057
  source 1..2091: note = Description of Artificial Sequence: Synthetic polypeptide

SEQ ID NO: 2151 - protein, 2094 aa, synthetic construct
  source 1..2094: note = Description of Artificial Sequence: Synthetic polypeptide
MPAAKRVKLDGGDKKYSIGLDIGTNSVGWAVITDEYKVPSKKFKVLGNTDRHSIKKNLIGALLFDSGETAEATRLKRTARRRYTRRKNRICYLQEIFSNEMAKVDDSFFHRLEESFLVEEDKKHERHPIFGNIVDEVAYHEKYPTIYHLRKKLVDSTDKADLRLIYLALAHMIKFRGHFLIEGDLNPDNSDVDKLFIQLVQTYNQLFEENPINASGVDAKAILSARLSKSRRLENLIAQLPGEKKNGLFGNLIALSLGLTPNFKSNFDLAEDAKLQLSKDTYDDDLDNLLAQIGDQYADLFLAAKNLSDAILLSDILRVNTEITKAPLSASMIKRYDEHHQDLTLLKALVRQQLPEKYKEIFFDQSKNGYAGYIDGGASQEEFYKFIKPILEKMDGTEELLVKLNREDLLRKQRTFDNGSIPHQIHLGELHAILRRQEDFYPFLKDNREKIEKILTFRIPYYVGPLARGNSRFAWMTRKSEETITPWNFEEVVDKGASAQSFIERMTNFDKNLPNEKVLPKHSLLYEYFTVYNELTKVKYVTEGMRKPAFLSGEQKKAIVDLLFKTNRKVTVKQLKEDYFKKIECFDSVEISGVEDRFNASLGTYHDLLKIIKDKDFLDNEENEDILEDIVLTLTLFEDREMIEERLKTYAHLFDDKVMKQLKRRRYTGWGRLSRKLINGIRDKQSGKTILDFLKSDGFANRNFMQLIHDDSLTFKEDIQKAQVSGQGDSLHEHIANLAGSPAIKKGILQTVKVVDELVKVMGRHKPENIVIEMARENQTTQKGQKNSRERMKRIEEGIKELGSQILKEHPVENTQLQNEKLYLYYLQNGRDMYVDQELDINRLSDYDVDHIVPQSFLKDDSIDNKVLTRSDKARGKSDNVPSEEVVKKMKNYWRQLLNAKLITQRKFDNLTKAERGGLSELDKAGFIKRQLVETRQITKHVAQILDSRMNTKYDENDKLIREVKVITLKSKLVSDFRKDFQFYKVREINNYHHAHDAYLNAVVGTALIKKYPKLESEFVYGDYKVYDVRKMIAKSEQEIGKATAKYFFYSNIMNFFKTEITLANGEIRKRPLIETNGETGEIVWDKGRDFATVRKVLSMPQVNIVKKTEVQTGGFSKESILPKRNSDKLIARKKDWDPKKYGGFDSPTVAYSVLVVAKVEKGKSKKLKSVKELLGITIMERSSFEKNPIDFLEAKGYKEVKKDLIIKLPKYSLFELENGRKRMLASAGELQKGNELALPSKYVNFLYLASHYEKLKGSPEDNEQKQLFVEQHKHYLDEIIEQISEFSKRVILADANLDKVLSAYNKHRDKPIREQAENIIHLFTLTNLGAPAAFKYFDTTIDRKRYTSTKEVLDATLIHQSITGLYETRIDLSQLGGDGGPAPGGGGGSGGLGIEDEYRLHETSTEPDVSLGSTWLSDFPQAWAETGGMGLAVRQAPLIIPLKATSTPVSIQQYPMSHEARLGIKPHIQRLLDQGILVPCQSPWNTPLLPVKKPGTNDYRPVQDLREVNKRVEDIHPTVPNPYNLLSGLPPSHQWYTVLDLKDAFFCLRLHPTSQPLFAFEWRDPGMGISGQLTWTRLPQGFKNSPTLFNEALHRDLADFRIQHPDLILLQYVDDILLAATSELDCQQGTRALLQTLGDLGYRASAKKAQICQKQVKYLGYLLREGQRWLTEARKETVMGQPVPKTPRQLREFLGKAGFCRLFIPGFAEMAAPLYPLTKPGTLFSWGPDQQKAYQEIKQALLTAPALGLPDLTKPFELFVDEKQGYAKGVLTQKLGPWRRPVAYLSKKLDPVAAGWPPCLRMVAAIAVLTKDAGKLTMGQPLVILAPHAVEALVKQPPDRWLSNARMTHYQAMLLDTDRVQFGPVVALNPATLLPLPEEGAPHDCLEILAETHGTRPDLTDQPIPDADHTWYTDGSSFLQEGQRKAGAAVTTETEVIWAGALPAGTSAQRAELIALTQALKMAEGKRLNVYTDSRYAFATAHIHGEIYRRRGWLTSEGREIKNKSEILALLKALFLPKRLSIIHCLGHQKGDSAEARGNRLADQAAREAAIKTPPDTSTLLIAGKRTADGSEFEKRTADGSEFESPKKKAKVE

SEQ ID NO: 2152 - protein, 2093 aa, synthetic construct
  source 1..2093: note = Description of Artificial Sequence: Synthetic polypeptide
MPAAKRVKLDGGDKKYSIGLDIGTNSVGWAVITDEYKVPSKKFKVLGNTDRHSIKKNLIGALLFDSGETAEATRLKRTARRRYTRRKNRICYLQEIFSNEMAKVDDSFFHRLEESFLVEEDKKHERHPIFGNIVDEVAYHEKYPTIYHLRKKLVDSTDKADLRLIYLALAHMIKFRGHFLIEGDLNPDNSDVDKLFIQLVQTYNQLFEENPINASGVDAKAILSARLSKSRRLENLIAQLPGEKKNGLFGNLIALSLGLTPNFKSNFDLAEDAKLQLSKDTYDDDLDNLLAQIGDQYADLFLAAKNLSDAILLSDILRVNTEITKAPLSASMIKRYDEHHQDLTLLKALVRQQLPEKYKEIFFDQSKNGYAGYIDGGASQEEFYKFIKPILEKMDGTEELLVKLNREDLLRKQRTFDNGSIPHQIHLGELHAILRRQEDFYPFLKDNREKIEKILTFRIPYYVGPLARGNSRFAWMTRKSEETITPWNFEEVVDKGASAQSFIERMTNFDKNLPNEKVLPKHSLLYEYFTVYNELTKVKYVTEGMRKPAFLSGEQKKAIVDLLFKTNRKVTVKQLKEDYFKKIECFDSVEISGVEDRFNASLGTYHDLLKIIKDKDFLDNEENEDILEDIVLTLTLFEDREMIEERLKTYAHLFDDKVMKQLKRRRYTGWGRLSRKLINGIRDKQSGKTILDFLKSDGFANRNFMQLIHDDSLTFKEDIQKAQVSGQGDSLHEHIANLAGSPAIKKGILQTVKVVDELVKVMGRHKPENIVIEMARENQTTQKGQKNSRERMKRIEEGIKELGSQILKEHPVENTQLQNEKLYLYYLQNGRDMYVDQELDINRLSDYDVDHIVPQSFLKDDSIDNKVLTRSDKARGKSDNVPSEEVVKKMKNYWRQLLNAKLITQRKFDNLTKAERGGLSELDKAGFIKRQLVETRQITKHVAQILDSRMNTKYDENDKLIREVKVITLKSKLVSDFRKDFQFYKVREINNYHHAHDAYLNAVVGTALIKKYPKLESEFVYGDYKVYDVRKMIAKSEQEIGKATAKYFFYSNIMNFFKTEITLANGEIRKRPLIETNGETGEIVWDKGRDFATVRKVLSMPQVNIVKKTEVQTGGFSKESILPKRNSDKLIARKKDWDPKKYGGFDSPTVAYSVLVVAKVEKGKSKKLKSVKELLGITIMERSSFEKNPIDFLEAKGYKEVKKDLIIKLPKYSLFELENGRKRMLASAGELQKGNELALPSKYVNFLYLASHYEKLKGSPEDNEQKQLFVEQHKHYLDEIIEQISEFSKRVILADANLDKVLSAYNKHRDKPIREQAENIIHLFTLTNLGAPAAFKYFDTTIDRKRYTSTKEVLDATLIHQSITGLYETRIDLSQLGGDGGEAAAKGGGGGLGIEDEYRLHETSTEPDVSLGSTWLSDFPQAWAETGGMGLAVRQAPLIIPLKATSTPVSIQQYPMSHEARLGIKPHIQRLLDQGILVPCQSPWNTPLLPVKKPGTNDYRPVQDLREVNKRVEDIHPTVPNPYNLLSGLPPSHQWYTVLDLKDAFFCLRLHPTSQPLFAFEWRDPGMGISGQLTWTRLPQGFKNSPTLFNEALHRDLADFRIQHPDLILLQYVDDILLAATSELDCQQGTRALLQTLGDLGYRASAKKAQICQKQVKYLGYLLREGQRWLTEARKETVMGQPVPKTPRQLREFLGKAGFCRLFIPGFAEMAAPLYPLTKPGTLFSWGPDQQKAYQEIKQALLTAPALGLPDLTKPFELFVDEKQGYAKGVLTQKLGPWRRPVAYLSKKLDPVAAGWPPCLRMVAAIAVLTKDAGKLTMGQPLVILAPHAVEALVKQPPDRWLSNARMTHYQAMLLDTDRVQFGPVVALNPATLLPLPEEGAPHDCLEILAETHGTRPDLTDQPIPDADHTWYTDGSSFLQEGQRKAGAAVTTETEVIWAGALPAGTSAQRAELIALTQALKMAEGKRLNVYTDSRYAFATAHIHGEIYRRRGWLTSEGREIKNKSEILALLKALFLPKRLSIIHCLGHQKGDSAEARGNRLADQAAREAAIKTPPDTSTLLIAGKRTADGSEFEKRTADGSEFESPKKKAKVE

SEQ ID NO: 2153 - protein, 2094 aa, synthetic construct
  source 1..2094: note = Description of Artificial Sequence: Synthetic polypeptide
MPAAKRVKLDGGDKKYSIGLDIGTNSVGWAVITDEYKVPSKKFKVLGNTDRHSIKKNLIGALLFDSGETAEATRLKRTARRRYTRRKNRICYLQEIFSNEMAKVDDSFFHRLEESFLVEEDKKHERHPIFGNIVDEVAYHEKYPTIYHLRKKLVDSTDKADLRLIYLALAHMIKFRGHFLIEGDLNPDNSDVDKLFIQLVQTYNQLFEENPINASGVDAKAILSARLSKSRRLENLIAQLPGEKKNGLFGNLIALSLGLTPNFKSNFDLAEDAKLQLSKDTYDDDLDNLLAQIGDQYADLFLAAKNLSDAILLSDILRVNTEITKAPLSASMIKRYDEHHQDLTLLKALVRQQLPEKYKEIFFDQSKNGYAGYIDGGASQEEFYKFIKPILEKMDGTEELLVKLNREDLLRKQRTFDNGSIPHQIHLGELHAILRRQEDFYPFLKDNREKIEKILTFRIPYYVGPLARGNSRFAWMTRKSEETITPWNFEEVVDKGASAQSFIERMTNFDKNLPNEKVLPKHSLLYEYFTVYNELTKVKYVTEGMRKPAFLSGEQKKAIVDLLFKTNRKVTVKQLKEDYFKKIECFDSVEISGVEDRFNASLGTYHDLLKIIKDKDFLDNEENEDILEDIVLTLTLFEDREMIEERLKTYAHLFDDKVMKQLKRRRYTGWGRLSRKLINGIRDKQSGKTILDFLKSDGFANRNFMQLIHDDSLTFKEDIQKAQVSGQGDSLHEHIANLAGSPAIKKGILQTVKVVDELVKVMGRHKPENIVIEMARENQTTQKGQKNSRERMKRIEEGIKELGSQILKEHPVENTQLQNEKLYLYYLQNGRDMYVDQELDINRLSDYDVDHIVPQSFLKDDSIDNKVLTRSDKARGKSDNVPSEEVVKKMKNYWRQLLNAKLITQRKFDNLTKAERGGLSELDKAGFIKRQLVETRQITKHVAQILDSRMNTKYDENDKLIREVKVITLKSKLVSDFRKDFQFYKVREINNYHHAHDAYLNAVVGTALIKKYPKLESEFVYGDYKVYDVRKMIAKSEQEIGKATAKYFFYSNIMNFFKTEITLANGEIRKRPLIETNGETGEIVWDKGRDFATVRKVLSMPQVNIVKKTEVQTGGFSKESILPKRNSDKLIARKKDWDPKKYGGFDSPTVAYSVLVVAKVEKGKSKKLKSVKELLGITIMERSSFEKNPIDFLEAKGYKEVKKDLIIKLPKYSLFELENGRKRMLASAGELQKGNELALPSKYVNFLYLASHYEKLKGSPEDNEQKQLFVEQHKHYLDEIIEQISEFSKRVILADANLDKVLSAYNKHRDKPIREQAENIIHLFTLTNLGAPAAFKYFDTTIDRKRYTSTKEVLDATLIHQSITGLYETRIDLSQLGGDGGPAPGGSGGGGGLGIEDEYRLHETSTEPDVSLGSTWLSDFPQAWAETGGMGLAVRQAPLIIPLKATSTPVSIQQYPMSHEARLGIKPHIQRLLDQGILVPCQSPWNTPLLPVKKPGTNDYRPVQDLREVNKRVEDIHPTVPNPYNLLSGLPPSHQWYTVLDLKDAFFCLRLHPTSQPLFAFEWRDPGMGISGQLTWTRLPQGFKNSPTLFNEALHRDLADFRIQHPDLILLQYVDDILLAATSELDCQQGTRALLQTLGDLGYRASAKKAQICQKQVKYLGYLLREGQRWLTEARKETVMGQPVPKTPRQLREFLGKAGFCRLFIPGFAEMAAPLYPLTKPGTLFSWGPDQQKAYQEIKQALLTAPALGLPDLTKPFELFVDEKQGYAKGVLTQKLGPWRRPVAYLSKKLDPVAAGWPPCLRMVAAIAVLTKDAGKLTMGQPLVILAPHAVEALVKQPPDRWLSNARMTHYQAMLLDTDRVQFGPVVALNPATLLPLPEEGAPHDCLEILAETHGTRPDLTDQPIPDADHTWYTDGSSFLQEGQRKAGAAVTTETEVIWAGALPAGTSAQRAELIALTQALKMAEGKRLNVYTDSRYAFATAHIHGEIYRRRGWLTSEGREIKNKSEILALLKALFLPKRLSIIHCLGHQKGDSAEARGNRLADQAAREAAIKTPPDTSTLLIAGKRTADGSEFEKRTADGSEFESPKKKAKVE

SEQ ID NO: 2154 - protein, 2094 aa, synthetic construct
  source 1..2094: note = Description of Artificial Sequence: Synthetic polypeptide
MPAAKRVKLDGGDKKYSIGLDIGTNSVGWAVITDEYKVPSKKFKVLGNTDRHSIKKNLIGALLFDSGETAEATRLKRTARRRYTRRKNRICYLQEIFSNEMAKVDDSFFHRLEESFLVEEDKKHERHPIFGNIVDEVAYHEKYPTIYHLRKKLVDSTDKADLRLIYLALAHMIKFRGHFLIEGDLNPDNSDVDKLFIQLVQTYNQLFEENPINASGVDAKAILSARLSKSRRLENLIAQLPGEKKNGLFGNLIALSLGLTPNFKSNFDLAEDAKLQLSKDTYDDDLDNLLAQIGDQYADLFLAAKNLSDAILLSDILRVNTEITKAPLSASMIKRYDEHHQDLTLLKALVRQQLPEKYKEIFFDQSKNGYAGYIDGGASQEEFYKFIKPILEKMDGTEELLVKLNREDLLRKQRTFDNGSIPHQIHLGELHAILRRQEDFYPFLKDNREKIEKILTFRIPYYVGPLARGNSRFAWMTRKSEETITPWNFEEVVDKGASAQSFIERMTNFDKNLPNEKVLPKHSLLYEYFTVYNELTKVKYVTEGMRKPAFLSGEQKKAIVDLLFKTNRKVTVKQLKEDYFKKIECFDSVEISGVEDRFNASLGTYHDLLKIIKDKDFLDNEENEDILEDIVLTLTLFEDREMIEERLKTYAHLFDDKVMKQLKRRRYTGWGRLSRKLINGIRDKQSGKTILDFLKSDGFANRNFMQLIHDDSLTFKEDIQKAQVSGQGDSLHEHIANLAGSPAIKKGILQTVKVVDELVKVMGRHKPENIVIEMARENQTTQKGQKNSRERMKRIEEGIKELGSQILKEHPVENTQLQNEKLYLYYLQNGRDMYVDQELDINRLSDYDVDHIVPQSFLKDDSIDNKVLTRSDKARGKSDNVPSEEVVKKMKNYWRQLLNAKLITQRKFDNLTKAERGGLSELDKAGFIKRQLVETRQITKHVAQILDSRMNTKYDENDKLIREVKVITLKSKLVSDFRKDFQFYKVREINNYHHAHDAYLNAVVGTALIKKYPKLESEFVYGDYKVYDVRKMIAKSEQEIGKATAKYFFYSNIMNFFKTEITLANGEIRKRPLIETNGETGEIVWDKGRDFATVRKVLSMPQVNIVKKTEVQTGGFSKESILPKRNSDKLIARKKDWDPKKYGGFDSPTVAYSVLVVAKVEKGKSKKLKSVKELLGITIMERSSFEKNPIDFLEAKGYKEVKKDLIIKLPKYSLFELENGRKRMLASAGELQKGNELALPSKYVNFLYLASHYEKLKGSPEDNEQKQLFVEQHKHYLDEIIEQISEFSKRVILADANLDKVLSAYNKHRDKPIREQAENIIHLFTLTNLGAPAAFKYFDTTIDRKRYTSTKEVLDATLIHQSITGLYETRIDLSQLGGDGGGGGPAPGGSGGLGIEDEYRLHETSTEPDVSLGSTWLSDFPQAWAETGGMGLAVRQAPLIIPLKATSTPVSIQQYPMSHEARLGIKPHIQRLLDQGILVPCQSPWNTPLLPVKKPGTNDYRPVQDLREVNKRVEDIHPTVPNPYNLLSGLPPSHQWYTVLDLKDAFFCLRLHPTSQPLFAFEWRDPGMGISGQLTWTRLPQGFKNSPTLFNEALHRDLADFRIQHPDLILLQYVDDILLAATSELDCQQGTRALLQTLGDLGYRASAKKAQICQKQVKYLGYLLREGQRWLTEARKETVMGQPVPKTPRQLREFLGKAGFCRLFIPGFAEMAAPLYPLTKPGTLFSWGPDQQKAYQEIKQALLTAPALGLPDLTKPFELFVDEKQGYAKGVLTQKLGPWRRPVAYLSKKLDPVAAGWPPCLRMVAAIAVLTKDAGKLTMGQPLVILAPHAVEALVKQPPDRWLSNARMTHYQAMLLDTDRVQFGPVVALNPATLLPLPEEGAPHDCLEILAETHGTRPDLTDQPIPDADHTWYTDGSSFLQEGQRKAGAAVTTETEVIWAGALPAGTSAQRAELIALTQALKMAEGKRLNVYTDSRYAFATAHIHGEIYRRRGWLTSEGREIKNKSEILALLKALFLPKRLSIIHCLGHQKGDSAEARGNRLADQAAREAAIKTPPDTSTLLIAGKRTADGSEFEKRTADGSEFESPKKKAKVE

SEQ ID NO: 2155 - protein, 2097 aa, synthetic construct; identical to SEQ ID NO: 2056
  source 1..2097: note = Description of Artificial Sequence: Synthetic polypeptide

SEQ ID NO: 2156 - protein, 2094 aa, synthetic construct
  source 1..2094: note = Description of Artificial Sequence: Synthetic polypeptide
MPAAKRVKLDGGDKKYSIGLDIGTNSVGWAVITDEYKVPSKKFKVLGNTDRHSIKKNLIGALLFDSGETAEATRLKRTARRRYTRRKNRICYLQEIFSNEMAKVDDSFFHRLEESFLVEEDKKHERHPIFGNIVDEVAYHEKYPTIYHLRKKLVDSTDKADLRLIYLALAHMIKFRGHFLIEGDLNPDNSDVDKLFIQLVQTYNQLFEENPINASGVDAKAILSARLSKSRRLENLIAQLPGEKKNGLFGNLIALSLGLTPNFKSNFDLAEDAKLQLSKDTYDDDLDNLLAQIGDQYADLFLAAKNLSDAILLSDILRVNTEITKAPLSASMIKRYDEHHQDLTLLKALVRQQLPEKYKEIFFDQSKNGYAGYIDGGASQEEFYKFIKPILEKMDGTEELLVKLNREDLLRKQRTFDNGSIPHQIHLGELHAILRRQEDFYPFLKDNREKIEKILTFRIPYYVGPLARGNSRFAWMTRKSEETITPWNFEEVVDKGASAQSFIERMTNFDKNLPNEKVLPKHSLLYEYFTVYNELTKVKYVTEGMRKPAFLSGEQKKAIVDLLFKTNRKVTVKQLKEDYFKKIECFDSVEISGVEDRFNASLGTYHDLLKIIKDKDFLDNEENEDILEDIVLTLTLFEDREMIEERLKTYAHLFDDKVMKQLKRRRYTGWGRLSRKLINGIRDKQSGKTILDFLKSDGFANRNFMQLIHDDSLTFKEDIQKAQVSGQGDSLHEHIANLAGSPAIKKGILQTVKVVDELVKVMGRHKPENIVIEMARENQTTQKGQKNSRERMKRIEEGIKELGSQILKEHPVENTQLQNEKLYLYYLQNGRDMYVDQELDINRLSDYDVDHIVPQSFLKDDSIDNKVLTRSDKARGKSDNVPSEEVVKKMKNYWRQLLNAKLITQRKFDNLTKAERGGLSELDKAGFIKRQLVETRQITKHVAQILDSRMNTKYDENDKLIREVKVITLKSKLVSDFRKDFQFYKVREINNYHHAHDAYLNAVVGTALIKKYPKLESEFVYGDYKVYDVRKMIAKSEQEIGKATAKYFFYSNIMNFFKTEITLANGEIRKRPLIETNGETGEIVWDKGRDFATVRKVLSMPQVNIVKKTEVQTGGFSKESILPKRNSDKLIARKKDWDPKKYGGFDSPTVAYSVLVVAKVEKGKSKKLKSVKELLGITIMERSSFEKNPIDFLEAKGYKEVKKDLIIKLPKYSLFELENGRKRMLASAGELQKGNELALPSKYVNFLYLASHYEKLKGSPEDNEQKQLFVEQHKHYLDEIIEQISEFSKRVILADANLDKVLSAYNKHRDKPIREQAENIIHLFTLTNLGAPAAFKYFDTTIDRKRYTSTKEVLDATLIHQSITGLYETRIDLSQLGGDGGGSSPAPGGSGGLGIEDEYRLHETSTEPDVSLGSTWLSDFPQAWAETGGMGLAVRQAPLIIPLKATSTPVSIQQYPMSHEARLGIKPHIQRLLDQGILVPCQSPWNTPLLPVKKPGTNDYRPVQDLREVNKRVEDIHPTVPNPYNLLSGLPPSHQWYTVLDLKDAFFCLRLHPTSQPLFAFEWRDPGMGISGQLTWTRLPQGFKNSPTLFNEALHRDLADFRIQHPDLILLQYVDDILLAATSELDCQQGTRALLQTLGDLGYRASAKKAQICQKQVKYLGYLLREGQRWLTEARKETVMGQPVPKTPRQLREFLGKAGFCRLFIPGFAEMAAPLYPLTKPGTLFSWGPDQQKAYQEIKQALLTAPALGLPDLTKPFELFVDEKQGYAKGVLTQKLGPWRRPVAYLSKKLDPVAAGWPPCLRMVAAIAVLTKDAGKLTMGQPLVILAPHAVEALVKQPPDRWLSNARMTHYQAMLLDTDRVQFGPVVALNPATLLPLPEEGAPHDCLEILAETHGTRPDLTDQPIPDADHTWYTDGSSFLQEGQRKAGAAVTTETEVIWAGALPAGTSAQRAELIALTQALKMAEGKRLNVYTDSRYAFATAHIHGEIYRRRGWLTSEGREIKNKSEILALLKALFLPKRLSIIHCLGHQKGDSAEARGNRLADQAAREAAIKTPPDTSTLLIAGKRTADGSEFEKRTADGSEFESPKKKAKVE

SEQ ID NO: 2157 - protein, 2095 aa, synthetic construct
  source 1..2095: note = Description of Artificial Sequence: Synthetic polypeptide
MPAAKRVKLDGGDKKYSIGLDIGTNSVGWAVITDEYKVPSKKFKVLGNTDRHSIKKNLIGALLFDSGETAEATRLKRTARRRYTRRKNRICYLQEIFSNEMAKVDDSFFHRLEESFLVEEDKKHERHPIFGNIVDEVAYHEKYPTIYHLRKKLVDSTDKADLRLIYLALAHMIKFRGHFLIEGDLNPDNSDVDKLFIQLVQTYNQLFEENPINASGVDAKAILSARLSKSRRLENLIAQLPGEKKNGLFGNLIALSLGLTPNFKSNFDLAEDAKLQLSKDTYDDDLDNLLAQIGDQYADLFLAAKNLSDAILLSDILRVNTEITKAPLSASMIKRYDEHHQDLTLLKALVRQQLPEKYKEIFFDQSKNGYAGYIDGGASQEEFYKFIKPILEKMDGTEELLVKLNREDLLRKQRTFDNGSIPHQIHLGELHAILRRQEDFYPFLKDNREKIEKILTFRIPYYVGPLARGNSRFAWMTRKSEETITPWNFEEVVDKGASAQSFIERMTNFDKNLPNEKVLPKHSLLYEYFTVYNELTKVKYVTEGMRKPAFLSGEQKKAIVDLLFKTNRKVTVKQLKEDYFKKIECFDSVEISGVEDRFNASLGTYHDLLKIIKDKDFLDNEENEDILEDIVLTLTLFEDREMIEERLKTYAHLFDDKVMKQLKRRRYTGWGRLSRKLINGIRDKQSGKTILDFLKSDGFANRNFMQLIHDDSLTFKEDIQKAQVSGQGDSLHEHIANLAGSPAIKKGILQTVKVVDELVKVMGRHKPENIVIEMARENQTTQKGQKNSRERMKRIEEGIKELGSQILKEHPVENTQLQNEKLYLYYLQNGRDMYVDQELDINRLSDYDVDHIVPQSFLKDDSIDNKVLTRSDKARGKSDNVPSEEVVKKMKNYWRQLLNAKLITQRKFDNLTKAERGGLSELDKAGFIKRQLVETRQITKHVAQILDSRMNTKYDENDKLIREVKVITLKSKLVSDFRKDFQFYKVREINNYHHAHDAYLNAVVGTALIKKYPKLESEFVYGDYKVYDVRKMIAKSEQEIGKATAKYFFYSNIMNFFKTEITLANGEIRKRPLIETNGETGEIVWDKGRDFATVRKVLSMPQVNIVKKTEVQTGGFSKESILPKRNSDKLIARKKDWDPKKYGGFDSPTVAYSVLVVAKVEKGKSKKLKSVKELLGITIMERSSFEKNPIDFLEAKGYKEVKKDLIIKLPKYSLFELENGRKRMLASAGELQKGNELALPSKYVNFLYLASHYEKLKGSPEDNEQKQLFVEQHKHYLDEIIEQISEFSKRVILADANLDKVLSAYNKHRDKPIREQAENIIHLFTLTNLGAPAAFKYFDTTIDRKRYTSTKEVLDATLIHQSITGLYETRIDLSQLGGDGGGGGGSGGGGSGGLGIEDEYRLHETSTEPDVSLGSTWLSDFPQAWAETGGMGLAVRQAPLIIPLKATSTPVSIQQYPMSHEARLGIKPHIQRLLDQGILVPCQSPWNTPLLPVKKPGTNDYRPVQDLREVNKRVEDIHPTVPNPYNLLSGLPPSHQWYTVLDLKDAFFCLRLHPTSQPLFAFEWRDPGMGISGQLTWTRLPQGFKNSPTLFNEALHRDLADFRIQHPDLILLQYVDDILLAATSELDCQQGTRALLQTLGDLGYRASAKKAQICQKQVKYLGYLLREGQRWLTEARKETVMGQPVPKTPRQLREFLGKAGFCRLFIPGFAEMAAPLYPLTKPGTLFSWGPDQQKAYQEIKQALLTAPALGLPDLTKPFELFVDEKQGYAKGVLTQKLGPWRRPVAYLSKKLDPVAAGWPPCLRMVAAIAVLTKDAGKLTMGQPLVILAPHAVEALVKQPPDRWLSNARMTHYQAMLLDTDRVQFGPVVALNPATLLPLPEEGAPHDCLEILAETHGTRPDLTDQPIPDADHTWYTDGSSFLQEGQRKAGAAVTTETEVIWAGALPAGTSAQRAELIALTQALKMAEGKRLNVYTDSRYAFATAHIHGEIYRRRGWLTSEGREIKNKSEILALLKALFLPKRLSIIHCLGHQKGDSAEARGNRLADQAAREAAIKTPPDTSTLLIAGKRTADGSEFEKRTADGSEFESPKKKAKVE

SEQ ID NO: 2158 - protein, 2091 aa, synthetic construct
  source 1..2091: note = Description of Artificial Sequence: Synthetic polypeptide
MPAAKRVKLDGGDKKYSIGLDIGTNSVGWAVITDEYKVPSKKFKVLGNTDRHSIKKNLIGALLFDSGETAEATRLKRTARRRYTRRKNRICYLQEIFSNEMAKVDDSFFHRLEESFLVEEDKKHERHPIFGNIVDEVAYHEKYPTIYHLRKKLVDSTDKADLRLIYLALAHMIKFRGHFLIEGDLNPDNSDVDKLFIQLVQTYNQLFEENPINASGVDAKAILSARLSKSRRLENLIAQLPGEKKNGLFGNLIALSLGLTPNFKSNFDLAEDAKLQLSKDTYDDDLDNLLAQIGDQYADLFLAAKNLSDAILLSDILRVNTEITKAPLSASMIKRYDEHHQDLTLLKALVRQQLPEKYKEIFFDQSKNGYAGYIDGGASQEEFYKFIKPILEKMDGTEELLVKLNREDLLRKQRTFDNGSIPHQIHLGELHAILRRQEDFYPFLKDNREKIEKILTFRIPYYVGPLARGNSRFAWMTRKSEETITPWNFEEVVDKGASAQSFIERMTNFDKNLPNEKVLPKHSLLYEYFTVYNELTKVKYVTEGMRKPAFLSGEQKKAIVDLLFKTNRKVTVKQLKEDYFKKIECFDSVEISGVEDRFNASLGTYHDLLKIIKDKDFLDNEENEDILEDIVLTLTLFEDREMIEERLKTYAHLFDDKVMKQLKRRRYTGWGRLSRKLINGIRDKQSGKTILDFLKSDGFANRNFMQLIHDDSLTFKEDIQKAQVSGQGDSLHEHIANLAGSPAIKKGILQTVKVVDELVKVMGRHKPENIVIEMARENQTTQKGQKNSRERMKRIEEGIKELGSQILKEHPVENTQLQNEKLYLYYLQNGRDMYVDQELDINRLSDYDVDHIVPQSFLKDDSIDNKVLTRSDKARGKSDNVPSEEVVKKMKNYWRQLLNAKLITQRKFDNLTKAERGGLSELDKAGFIKRQLVETRQITKHVAQILDSRMNTKYDENDKLIREVKVITLKSKLVSDFRKDFQFYKVREINNYHHAHDAYLNAVVGTALIKKYPKLESEFVYGDYKVYDVRKMIAKSEQEIGKATAKYFFYSNIMNFFKTEITLANGEIRKRPLIETNGETGEIVWDKGRDFATVRKVLSMPQVNIVKKTEVQTGGFSKESILPKRNSDKLIARKKDWDPKKYGGFDSPTVAYSVLVVAKVEKGKSKKLKSVKELLGITIMERSSFEKNPIDFLEAKGYKEVKKDLIIKLPKYSLFELENGRKRMLASAGELQKGNELALPSKYVNFLYLASHYEKLKGSPEDNEQKQLFVEQHKHYLDEIIEQISEFSKRVILADANLDKVLSAYNKHRDKPIREQAENIIHLFTLTNLGAPAAFKYFDTTIDRKRYTSTKEVLDATLIHQSITGLYETRIDLSQLGGDGGGGSGSSGGLGIEDEYRLHETSTEPDVSLGSTWLSDFPQAWAETGGMGLAVRQAPLIIPLKATSTPVSIQQYPMSHEARLGIKPHIQRLLDQGILVPCQSPWNTPLLPVKKPGTNDYRPVQDLREVNKRVEDIHPTVPNPYNLLSGLPPSHQWYTVLDLKDAFFCLRLHPTSQPLFAFEWRDPGMGISGQLTWTRLPQGFKNSPTLFNEALHRDLADFRIQHPDLILLQYVDDILLAATSELDCQQGTRALLQTLGDLGYRASAKKAQICQKQVKYLGYLLREGQRWLTEARKETVMGQPVPKTPRQLREFLGKAGFCRLFIPGFAEMAAPLYPLTKPGTLFSWGPDQQKAYQEIKQALLTAPALGLPDLTKPFELFVDEKQGYAKGVLTQKLGPWRRPVAYLSKKLDPVAAGWPPCLRMVAAIAVLTKDAGKLTMGQPLVILAPHAVEALVKQPPDRWLSNARMTHYQAMLLDTDRVQFGPVVALNPATLLPLPEEGAPHDCLEILAETHGTRPDLTDQPIPDADHTWYTDGSSFLQEGQRKAGAAVTTETEVIWAGALPAGTSAQRAELIALTQALKMAEGKRLNVYTDSRYAFATAHIHGEIYRRRGWLTSEGREIKNKSEILALLKALFLPKRLSIIHCLGHQKGDSAEARGNRLADQAAREAAIKTPPDTSTLLIAGKRTADGSEFEKRTADGSEFESPKKKAKVE

SEQ ID NO: 2159 - protein, 2096 aa, synthetic construct; identical to SEQ ID NO: 2055
  source 1..2096: note = Description of Artificial Sequence: Synthetic polypeptide

SEQ ID NO: 2160 - protein, 2094 aa, synthetic construct
  source 1..2094: note = Description of Artificial Sequence: Synthetic polypeptide
MPAAKRVKLDGGDKKYSIGLDIGTNSVGWAVITDEYKVPSKKFKVLGNTDRHSIKKNLIGALLFDSGETAEATRLKRTARRRYTRRKNRICYLQEIFSNEMAKVDDSFFHRLEESFLVEEDKKHERHPIFGNIVDEVAYHEKYPTIYHLRKKLVDSTDKADLRLIYLALAHMIKFRGHFLIEGDLNPDNSDVDKLFIQLVQTYNQLFEENPINASGVDAKAILSARLSKSRRLENLIAQLPGEKKNGLFGNLIALSLGLTPNFKSNFDLAEDAKLQLSKDTYDDDLDNLLAQIGDQYADLFLAAKNLSDAILLSDILRVNTEITKAPLSASMIKRYDEHHQDLTLLKALVRQQLPEKYKEIFFDQSKNGYAGYIDGGASQEEFYKFIKPILEKMDGTEELLVKLNREDLLRKQRTFDNGSIPHQIHLGELHAILRRQEDFYPFLKDNREKIEKILTFRIPYYVGPLARGNSRFAWMTRKSEETITPWNFEEVVDKGASAQSFIERMTNFDKNLPNEKVLPKHSLLYEYFTVYNELTKVKYVTEGMRKPAFLSGEQKKAIVDLLFKTNRKVTVKQLKEDYFKKIECFDSVEISGVEDRFNASLGTYHDLLKIIKDKDFLDNEENEDILEDIVLTLTLFEDREMIEERLKTYAHLFDDKVMKQLKRRRYTGWGRLSRKLINGIRDKQSGKTILDFLKSDGFANRNFMQLIHDDSLTFKEDIQKAQVSGQGDSLHEHIANLAGSPAIKKGILQTVKVVDELVKVMGRHKPENIVIEMARENQTTQKGQKNSRERMKRIEEGIKELGSQILKEHPVENTQLQNEKLYLYYLQNGRDMYVDQELDINRLSDYDVDHIVPQSFLKDDSIDNKVLTRSDKARGKSDNVPSEEVVKKMKNYWRQLLNAKLITQRKFDNLTKAERGGLSELDKAGFIKRQLVETRQITKHVAQILDSRMNTKYDENDKLIREVKVITLKSKLVSDFRKDFQFYKVREINNYHHAHDAYLNAVVGTALIKKYPKLESEFVYGDYKVYDVRKMIAKSEQEIGKATAKYFFYSNIMNFFKTEITLANGEIRKRPLIETNGETGEIVWDKGRDFATVRKVLSMPQVNIVKKTEVQTGGFSKESILPKRNSDKLIARKKDWDPKKYGGFDSPTVAYSVLVVAKVEKGKSKKLKSVKELLGITIMERSSFEKNPIDFLEAKGYKEVKKDLIIKLPKYSLFELENGRKRMLASAGELQKGNELALPSKYVNFLYLASHYEKLKGSPEDNEQKQLFVEQHKHYLDEIIEQISEFSKRVILADANLDKVLSAYNKHRDKPIREQAENIIHLFTLTNLGAPAAFKYFDTTIDRKRYTSTKEVLDATLIHQSITGLYETRIDLSQLGGDGGGGGGGSGSSGGLGIEDEYRLHETSTEPDVSLGSTWLSDFPQAWAETGGMGLAVRQAPLIIPLKATSTPVSIQQYPMSHEARLGIKPHIQRLLDQGILVPCQSPWNTPLLPVKKPGTNDYRPVQDLREVNKRVEDIHPTVPNPYNLLSGLPPSHQWYTVLDLKDAFFCLRLHPTSQPLFAFEWRDPGMGISGQLTWTRLPQGFKNSPTLFNEALHRDLADFRIQHPDLILLQYVDDILLAATSELDCQQGTRALLQTLGDLGYRASAKKAQICQKQVKYLGYLLREGQRWLTEARKETVMGQPVPKTPRQLREFLGKAGFCRLFIPGFAEMAAPLYPLTKPGTLFSWGPDQQKAYQEIKQALLTAPALGLPDLTKPFELFVDEKQGYAKGVLTQKLGPWRRPVAYLSKKLDPVAAGWPPCLRMVAAIAVLTKDAGKLTMGQPLVILAPHAVEALVKQPPDRWLSNARMTHYQAMLLDTDRVQFGPVVALNPATLLPLPEEGAPHDCLEILAETHGTRPDLTDQPIPDADHTWYTDGSSFLQEGQRKAGAAVTTETEVIWAGALPAGTSAQRAELIALTQALKMAEGKRLNVYTDSRYAFATAHIHGEIYRRRGWLTSEGREIKNKSEILALLKALFLPKRLSIIHCLGHQKGDSAEARGNRLADQAAREAAIKTPPDTSTLLIAGKRTADGSEFEKRTADGSEFESPKKKAKVE

SEQ ID NO: 2161 - protein, 2096 aa, synthetic construct
  source 1..2096: note = Description of Artificial Sequence: Synthetic polypeptide
MPAAKRVKLDGGDKKYSIGLDIGTNSVGWAVITDEYKVPSKKFKVLGNTDRHSIKKNLIGALLFDSGETAEATRLKRTARRRYTRRKNRICYLQEIFSNEMAKVDDSFFHRLEESFLVEEDKKHERHPIFGNIVDEVAYHEKYPTIYHLRKKLVDSTDKADLRLIYLALAHMIKFRGHFLIEGDLNPDNSDVDKLFIQLVQTYNQLFEENPINASGVDAKAILSARLSKSRRLENLIAQLPGEKKNGLFGNLIALSLGLTPNFKSNFDLAEDAKLQLSKDTYDDDLDNLLAQIGDQYADLFLAAKNLSDAILLSDILRVNTEITKAPLSASMIKRYDEHHQDLTLLKALVRQQLPEKYKEIFFDQSKNGYAGYIDGGASQEEFYKFIKPILEKMDGTEELLVKLNREDLLRKQRTFDNGSIPHQIHLGELHAILRRQEDFYPFLKDNREKIEKILTFRIPYYVGPLARGNSRFAWMTRKSEETITPWNFEEVVDKGASAQSFIERMTNFDKNLPNEKVLPKHSLLYEYFTVYNELTKVKYVTEGMRKPAFLSGEQKKAIVDLLFKTNRKVTVKQLKEDYFKKIECFDSVEISGVEDRFNASLGTYHDLLKIIKDKDFLDNEENEDILEDIVLTLTLFEDREMIEERLKTYAHLFDDKVMKQLKRRRYTGWGRLSRKLINGIRDKQSGKTILDFLKSDGFANRNFMQLIHDDSLTFKEDIQKAQVSGQGDSLHEHIANLAGSPAIKKGILQTVKVVDELVKVMGRHKPENIVIEMARENQTTQKGQKNSRERMKRIEEGIKELGSQILKEHPVENTQLQNEKLYLYYLQNGRDMYVDQELDINRLSDYDVDHIVPQSFLKDDSIDNKVLTRSDKARGKSDNVPSEEVVKKMKNYWRQLLNAKLITQRKFDNLTKAERGGLSELDKAGFIKRQLVETRQITKHVAQILDSRMNTKYDENDKLIREVKVITLKSKLVSDFRKDFQFYKVREINNYHHAHDAYLNAVVGTALIKKYPKLESEFVYGDYKVYDVRKMIAKSEQEIGKATAKYFFYSNIMNFFKTEITLANGEIRKRPLIETNGETGEIVWDKGRDFATVRKVLSMPQVNIVKKTEVQTGGFSKESILPKRNSDKLIARKKDWDPKKYGGFDSPTVAYSVLVVAKVEKGKSKKLKSVKELLGITIMERSSFEKNPIDFLEAKGYKEVKKDLIIKLPKYSLFELENGRKRMLASAGELQKGNELALPSKYVNFLYLASHYEKLKGSPEDNEQKQLFVEQHKHYLDEIIEQISEFSKRVILADANLDKVLSAYNKHRDKPIREQAENIIHLFTLTNLGAPAAFKYFDTTIDRKRYTSTKEVLDATLIHQSITGLYETRIDLSQLGGDGGEAAAKGGGGGSGGLGIEDEYRLHETSTEPDVSLGSTWLSDFPQAWAETGGMGLAVRQAPLIIPLKATSTPVSIQQYPMSHEARLGIKPHIQRLLDQGILVPCQSPWNTPLLPVKKPGTNDYRPVQDLREVNKRVEDIHPTVPNPYNLLSGLPPSHQWYTVLDLKDAFFCLRLHPTSQPLFAFEWRDPGMGISGQLTWTRLPQGFKNSPTLFNEALHRDLADFRIQHPDLILLQYVDDILLAATSELDCQQGTRALLQTLGDLGYRASAKKAQICQKQVKYLGYLLREGQRWLTEARKETVMGQPVPKTPRQLREFLGKAGFCRLFIPGFAEMAAPLYPLTKPGTLFSWGPDQQKAYQEIKQALLTAPALGLPDLTKPFELFVDEKQGYAKGVLTQKLGPWRRPVAYLSKKLDPVAAGWPPCLRMVAAIAVLTKDAGKLTMGQPLVILAPHAVEALVKQPPDRWLSNARMTHYQAMLLDTDRVQFGPVVALNPATLLPLPEEGAPHDCLEILAETHGTRPDLTDQPIPDADHTWYTDGSSFLQEGQRKAGAAVTTETEVIWAGALPAGTSAQRAELIALTQALKMAEGKRLNVYTDSRYAFATAHIHGEIYRRRGWLTSEGREIKNKSEILALLKALFLPKRLSIIHCLGHQKGDSAEARGNRLADQAAREAAIKTPPDTSTLLIAGKRTADGSEFEKRTADGSEFESPKKKAKVE

SEQ ID NO: 2162 - protein, 2091 aa, synthetic construct
  source 1..2091: note = Description of Artificial Sequence: Synthetic polypeptide
MPAAKRVKLDGGDKKYSIGLDIGTNSVGWAVITDEYKVPSKKFKVLGNTDRHSIKKNLIGALLFDSGETAEATRLKRTARRRYTRRKNRICYLQEIFSNEMAKVDDSFFHRLEESFLVEEDKKHERHPIFGNIVDEVAYHEKYPTIYHLRKKLVDSTDKADLRLIYLALAHMIKFRGHFLIEGDLNPDNSDVDKLFIQLVQTYNQLFEENPINASGVDAKAILSARLSKSRRLENLIAQLPGEKKNGLFGNLIALSLGLTPNFKSNFDLAEDAKLQLSKDTYDDDLDNLLAQIGDQYADLFLAAKNLSDAILLSDILRVNTEITKAPLSASMIKRYDEHHQDLTLLKALVRQQLPEKYKEIFFDQSKNGYAGYIDGGASQEEFYKFIKPILEKMDGTEELLVKLNREDLLRKQRTFDNGSIPHQIHLGELHAILRRQEDFYPFLKDNREKIEKILTFRIPYYVGPLARGNSRFAWMTRKSEETITPWNFEEVVDKGASAQSFIERMTNFDKNLPNEKVLPKHSLLYEYFTVYNELTKVKYVTEGMRKPAFLSGEQKKAIVDLLFKTNRKVTVKQLKEDYFKKIECFDSVEISGVEDRFNASLGTYHDLLKIIKDKDFLDNEENEDILEDIVLTLTLFEDREMIEERLKTYAHLFDDKVMKQLKRRRYTGWGRLSRKLINGIRDKQSGKTILDFLKSDGFANRNFMQLIHDDSLTFKEDIQKAQVSGQGDSLHEHIANLAGSPAIKKGILQTVKVVDELVKVMGRHKPENIVIEMARENQTTQKGQKNSRERMKRIEEGIKELGSQILKEHPVENTQLQNEKLYLYYLQNGRDMYVDQELDINRLSDYDVDHIVPQSFLKDDSIDNKVLTRSDKARGKSDNVPSEEVVKKMKNYWRQLLNAKLITQRKFDNLTKAERGGLSELDKAGFIKRQLVETRQITKHVAQILDSRMNTKYDENDKLIREVKVITLKSKLVSDFRKDFQFYKVREINNYHHAHDAYLNAVVGTALIKKYPKLESEFVYGDYKVYDVRKMIAKSEQEIGKATAKYFFYSNIMNFFKTEITLANGEIRKRPLIETNGETGEIVWDKGRDFATVRKVLSMPQVNIVKKTEVQTGGFSKESILPKRNSDKLIARKKDWDPKKYGGFDSPTVAYSVLVVAKVEKGKSKKLKSVKELLGITIMERSSFEKNPIDFLEAKGYKEVKKDLIIKLPKYSLFELENGRKRMLASAGELQKGNELALPSKYVNFLYLASHYEKLKGSPEDNEQKQLFVEQHKHYLDEIIEQISEFSKRVILADANLDKVLSAYNKHRDKPIREQAENIIHLFTLTNLGAPAAFKYFDTTIDRKRYTSTKEVLDATLIHQSITGLYETRIDLSQLGGDGGPAPGGSGGLGIEDEYRLHETSTEPDVSLGSTWLSDFPQAWAETGGMGLAVRQAPLIIPLKATSTPVSIQQYPMSHEARLGIKPHIQRLLDQGILVPCQSPWNTPLLPVKKPGTNDYRPVQDLREVNKRVEDIHPTVPNPYNLLSGLPPSHQWYTVLDLKDAFFCLRLHPTSQPLFAFEWRDPGMGISGQLTWTRLPQGFKNSPTLFNEALHRDLADFRIQHPDLILLQYVDDILLAATSELDCQQGTRALLQTLGDLGYRASAKKAQICQKQVKYLGYLLREGQRWLTEARKETVMGQPVPKTPRQLREFLGKAGFCRLFIPGFAEMAAPLYPLTKPGTLFSWGPDQQKAYQEIKQALLTAPALGLPDLTKPFELFVDEKQGYAKGVLTQKLGPWRRPVAYLSKKLDPVAAGWPPCLRMVAAIAVLTKDAGKLTMGQPLVILAPHAVEALVKQPPDRWLSNARMTHYQAMLLDTDRVQFGPVVALNPATLLPLPEEGAPHDCLEILAETHGTRPDLTDQPIPDADHTWYTDGSSFLQEGQRKAGAAVTTETEVIWAGALPAGTSAQRAELIALTQALKMAEGKRLNVYTDSRYAFATAHIHGEIYRRRGWLTSEGREIKNKSEILALLKALFLPKRLSIIHCLGHQKGDSAEARGNRLADQAAREAAIKTPPDTSTLLIAGKRTADGSEFEKRTADGSEFESPKKKAKVE

SEQ ID NO: 2163 - protein, 2096 aa, synthetic construct
  source 1..2096: note = Description of Artificial Sequence: Synthetic polypeptide
MPAAKRVKLDGGDKKYSIGLDIGTNSVGWAVITDEYKVPSKKFKVLGNTDRHSIKKNLIGALLFDSGETAEATRLKRTARRRYTRRKNRICYLQEIFSNEMAKVDDSFFHRLEESFLVEEDKKHERHPIFGNIVDEVAYHEKYPTIYHLRKKLVDSTDKADLRLIYLALAHMIKFRGHFLIEGDLNPDNSDVDKLFIQLVQTYNQLFEENPINASGVDAKAILSARLSKSRRLENLIAQLPGEKKNGLFGNLIALSLGLTPNFKSNFDLAEDAKLQLSKDTYDDDLDNLLAQIGDQYADLFLAAKNLSDAILLSDILRVNTEITKAPLSASMIKRYDEHHQDLTLLKALVRQQLPEKYKEIFFDQSKNGYAGYIDGGASQEEFYKFIKPILEKMDGTEELLVKLNREDLLRKQRTFDNGSIPHQIHLGELHAILRRQEDFYPFLKDNREKIEKILTFRIPYYVGPLARGNSRFAWMTRKSEETITPWNFEEVVDKGASAQSFIERMTNFDKNLPNEKVLPKHSLLYEYFTVYNELTKVKYVTEGMRKPAFLSGEQKKAIVDLLFKTNRKVTVKQLKEDYFKKIECFDSVEISGVEDRFNASLGTYHDLLKIIKDKDFLDNEENEDILEDIVLTLTLFEDREMIEERLKTYAHLFDDKVMKQLKRRRYTGWGRLSRKLINGIRDKQSGKTILDFLKSDGFANRNFMQLIHDDSLTFKEDIQKAQVSGQGDSLHEHIANLAGSPAIKKGILQTVKVVDELVKVMGRHKPENIVIEMARENQTTQKGQKNSRERMKRIEEGIKELGSQILKEHPVENTQLQNEKLYLYYLQNGRDMYVDQELDINRLSDYDVDHIVPQSFLKDDSIDNKVLTRSDKARGKSDNVPSEEVVKKMKNYWRQLLNAKLITQRKFDNLTKAERGGLSELDKAGFIKRQLVETRQITKHVAQILDSRMNTKYDENDKLIREVKVITLKSKLVSDFRKDFQFYKVREINNYHHAHDAYLNAVVGTALIKKYPKLESEFVYGDYKVYDVRKMIAKSEQEIGKATAKYFFYSNIMNFFKTEITLANGEIRKRPLIETNGETGEIVWDKGRDFATVRKVLSMPQVNIVKKTEVQTGGFSKESILPKRNSDKLIARKKDWDPKKYGGFDSPTVAYSVLVVAKVEKGKSKKLKSVKELLGITIMERSSFEKNPIDFLEAKGYKEVKKDLIIKLPKYSLFELENGRKRMLASAGELQKGNELALPSKYVNFLYLASHYEKLKGSPEDNEQKQLFVEQHKHYLDEIIEQISEFSKRVILADANLDKVLSAYNKHRDKPIREQAENIIHLFTLTNLGAPAAFKYFDTTIDRKRYTSTKEVLDATLIHQSITGLYETRIDLSQLGGDGGEAAAKPAPGSSGGLGIEDEYRLHETSTEPDVSLGSTWLSDFPQAWAETGGMGLAVRQAPLIIPLKATSTPVSIQQYPMSHEARLGIKPHIQRLLDQGILVPCQSPWNTPLLPVKKPGTNDYRPVQDLREVNKRVEDIHPTVPNPYNLLSGLPPSHQWYTVLDLKDAFFCLRLHPTSQPLFAFEWRDPGMGISGQLTWTRLPQGFKNSPTLFNEALHRDLADFRIQHPDLILLQYVDDILLAATSELDCQQGTRALLQTLGDLGYRASAKKAQICQKQVKYLGYLLREGQRWLTEARKETVMGQPVPKTPRQLREFLGKAGFCRLFIPGFAEMAAPLYPLTKPGTLFSWGPDQQKAYQEIKQALLTAPALGLPDLTKPFELFVDEKQGYAKGVLTQKLGPWRRPVAYLSKKLDPVAAGWPPCLRMVAAIAVLTKDAGKLTMGQPLVILAPHAVEALVKQPPDRWLSNARMTHYQAMLLDTDRVQFGPVVALNPATLLPLPEEGAPHDCLEILAETHGTRPDLTDQPIPDADHTWYTDGSSFLQEGQRKAGAAVTTETEVIWAGALPAGTSAQRAELIALTQALKMAEGKRLNVYTDSRYAFATAHIHGEIYRRRGWLTSEGREIKNKSEILALLKALFLPKRLSIIHCLGHQKGDSAEARGNRLADQAAREAAIKTPPDTSTLLIAGKRTADGSEFEKRTADGSEFESPKKKAKVE

SEQ ID NO: 2164 - protein, 2100 aa, synthetic construct
  source 1..2100: note = Description of Artificial Sequence: Synthetic polypeptide
MPAAKRVKLDGGDKKYSIGLDIGTNSVGWAVITDEYKVPSKKFKVLGNTDRHSIKKNLIGALLFDSGETAEATRLKRTARRRYTRRKNRICYLQEIFSNEMAKVDDSFFHRLEESFLVEEDKKHERHPIFGNIVDEVAYHEKYPTIYHLRKKLVDSTDKADLRLIYLALAHMIKFRGHFLIEGDLNPDNSDVDKLFIQLVQTYNQLFEENPINASGVDAKAILSARLSKSRRLENLIAQLPGEKKNGLFGNLIALSLGLTPNFKSNFDLAEDAKLQLSKDTYDDDLDNLLAQIGDQYADLFLAAKNLSDAILLSDILRVNTEITKAPLSASMIKRYDEHHQDLTLLKALVRQQLPEKYKEIFFDQSKNGYAGYIDGGASQEEFYKFIKPILEKMDGTEELLVKLNREDLLRKQRTFDNGSIPHQIHLGELHAILRRQEDFYPFLKDNREKIEKILTFRIPYYVGPLARGNSRFAWMTRKSEETITPWNFEEVVDKGASAQSFIERMTNFDKNLPNEKVLPKHSLLYEYFTVYNELTKVKYVTEGMRKPAFLSGEQKKAIVDLLFKTNRKVTVKQLKEDYFKKIECFDSVEISGVEDRFNASLGTYHDLLKIIKDKDFLDNEENEDILEDIVLTLTLFEDREMIEERLKTYAHLFDDKVMKQLKRRRYTGWGRLSRKLINGIRDKQSGKTILDFLKSDGFANRNFMQLIHDDSLTFKEDIQKAQVSGQGDSLHEHIANLAGSPAIKKGILQTVKVVDELVKVMGRHKPENIVIEMARENQTTQKGQKNSRERMKRIEEGIKELGSQILKEHPVENTQLQNEKLYLYYLQNGRDMYVDQELDINRLSDYDVDHIVPQSFLKDDSIDNKVLTRSDKARGKSDNVPSEEVVKKMKNYWRQLLNAKLITQRKFDNLTKAERGGLSELDKAGFIKRQLVETRQITKHVAQILDSRMNTKYDENDKLIREVKVITLKSKLVSDFRKDFQFYKVREINNYHHAHDAYLNAVVGTALIKKYPKLESEFVYGDYKVYDVRKMIAKSEQEIGKATAKYFFYSNIMNFFKTEITLANGEIRKRPLIETNGETGEIVWDKGRDFATVRKVLSMPQVNIVKKTEVQTGGFSKESILPKRNSDKLIARKKDWDPKKYGGFDSPTVAYSVLVVAKVEKGKSKKLKSVKELLGITIMERSSFEKNPIDFLEAKGYKEVKKDLIIKLPKYSLFELENGRKRMLASAGELQKGNELALPSKYVNFLYLASHYEKLKGSPEDNEQKQLFVEQHKHYLDEIIEQISEFSKRVILADANLDKVLSAYNKHRDKPIREQAENIIHLFTLTNLGAPAAFKYFDTTIDRKRYTSTKEVLDATLIHQSITGLYETRIDLSQLGGDGGGSSGSSGSSGSSGSSGGLGIEDEYRLHETSTEPDVSLGSTWLSDFPQAWAETGGMGLAVRQAPLIIPLKATSTPVSIQQYPMSHEARLGIKPHIQRLLDQGILVPCQSPWNTPLLPVKKPGTNDYRPVQDLREVNKRVEDIHPTVPNPYNLLSGLPPSHQWYTVLDLKDAFFCLRLHPTSQPLFAFEWRDPGMGISGQLTWTRLPQGFKNSPTLFNEALHRDLADFRIQHPDLILLQYVDDILLAATSELDCQQGTRALLQTLGDLGYRASAKKAQICQKQVKYLGYLLREGQRWLTEARKETVMGQPVPKTPRQLREFLGKAGFCRLFIPGFAEMAAPLYPLTKPGTLFSWGPDQQKAYQEIKQALLTAPALGLPDLTKPFELFVDEKQGYAKGVLTQKLGPWRRPVAYLSKKLDPVAAGWPPCLRMVAAIAVLTKDAGKLTMGQPLVILAPHAVEALVKQPPDRWLSNARMTHYQAMLLDTDRVQFGPVVALNPATLLPLPEEGAPHDCLEILAETHGTRPDLTDQPIPDADHTWYTDGSSFLQEGQRKAGAAVTTETEVIWAGALPAGTSAQRAELIALTQALKMAEGKRLNVYTDSRYAFATAHIHGEIYRRRGWLTSEGREIKNKSEILALLKALFLPKRLSIIHCLGHQKGDSAEARGNRLADQAAREAAIKTPPDTSTLLIAGKRTADGSEFEKRTADGSEFESPKKKAKVE

SEQ ID NO: 2165 - protein, 2094 aa, synthetic construct
  source 1..2094: note = Description of Artificial Sequence: Synthetic polypeptide
MPAAKRVKLDGGDKKYSIGLDIGTNSVGWAVITDEYKVPSKKFKVLGNTDRHSIKKNLIGALLFDSGETAEATRLKRTARRRYTRRKNRICYLQEIFSNEMAKVDDSFFHRLEESFLVEEDKKHERHPIFGNIVDEVAYHEKYPTIYHLRKKLVDSTDKADLRLIYLALAHMIKFRGHFLIEGDLNPDNSDVDKLFIQLVQTYNQLFEENPINASGVDAKAILSARLSKSRRLENLIAQLPGEKKNGLFGNLIALSLGLTPNFKSNFDLAEDAKLQLSKDTYDDDLDNLLAQIGDQYADLFLAAKNLSDAILLSDILRVNTEITKAPLSASMIKRYDEHHQDLTLLKALVRQQLPEKYKEIFFDQSKNGYAGYIDGGASQEEFYKFIKPILEKMDGTEELLVKLNREDLLRKQRTFDNGSIPHQIHLGELHAILRRQEDFYPFLKDNREKIEKILTFRIPYYVGPLARGNSRFAWMTRKSEETITPWNFEEVVDKGASAQSFIERMTNFDKNLPNEKVLPKHSLLYEYFTVYNELTKVKYVTEGMRKPAFLSGEQKKAIVDLLFKTNRKVTVKQLKEDYFKKIECFDSVEISGVEDRFNASLGTYHDLLKIIKDKDFLDNEENEDILEDIVLTLTLFEDREMIEERLKTYAHLFDDKVMKQLKRRRYTGWGRLSRKLINGIRDKQSGKTILDFLKSDGFANRNFMQLIHDDSLTFKEDIQKAQVSGQGDSLHEHIANLAGSPAIKKGILQTVKVVDELVKVMGRHKPENIVIEMARENQTTQKGQKNSRERMKRIEEGIKELGSQILKEHPVENTQLQNEKLYLYYLQNGRDMYVDQELDINRLSDYDVDHIVPQSFLKDDSIDNKVLTRSDKARGKSDNVPSEEVVKKMKNYWRQLLNAKLITQRKFDNLTKAERGGLSELDKAGFIKRQLVETRQITKHVAQILDSRMNTKYDENDKLIREVKVITLKSKLVSDFRKDFQFYKVREINNYHHAHDAYLNAVVGTALIKKYPKLESEFVYGDYKVYDVRKMIAKSEQEIGKATAKYFFYSNIMNFFKTEITLANGEIRKRPLIETNGETGEIVWDKGRDFATVRKVLSMPQVNIVKKTEVQTGGFSKESILPKRNSDKLIARKKDWDPKKYGGFDSPTVAYSVLVVAKVEKGKSKKLKSVKELLGITIMERSSFEKNPIDFLEAKGYKEVKKDLIIKLPKYSLFELENGRKRMLASAGELQKGNELALPSKYVNFLYLASHYEKLKGSPEDNEQKQLFVEQHKHYLDEIIEQISEFSKRVILADANLDKVLSAYNKHRDKPIREQAENIIHLFTLTNLGAPAAFKYFDTTIDRKRYTSTKEVLDATLIHQSITGLYETRIDLSQLGGDGGGSSGGSGGGGGLGIEDEYRLHETSTEPDVSLGSTWLSDFPQAWAETGGMGLAVRQAPLIIPLKATSTPVSIQQYPMSHEARLGIKPHIQRLLDQGILVPCQSPWNTPLLPVKKPGTNDYRPVQDLREVNKRVEDIHPTVPNPYNLLSGLPPSHQWYTVLDLKDAFFCLRLHPTSQPLFAFEWRDPGMGISGQLTWTRLPQGFKNSPTLFNEALHRDLADFRIQHPDLILLQYVDDILLAATSELDCQQGTRALLQTLGDLGYRASAKKAQICQKQVKYLGYLLREGQRWLTEARKETVMGQPVPKTPRQLREFLGKAGFCRLFIPGFAEMAAPLYPLTKPGTLFSWGPDQQKAYQEIKQALLTAPALGLPDLTKPFELFVDEKQGYAKGVLTQKLGPWRRPVAYLSKKLDPVAAGWPPCLRMVAAIAVLTKDAGKLTMGQPLVILAPHAVEALVKQPPDRWLSNARMTHYQAMLLDTDRVQFGPVVALNPATLLPLPEEGAPHDCLEILAETHGTRPDLTDQPIPDADHTWYTDGSSFLQEGQRKAGAAVTTETEVIWAGALPAGTSAQRAELIALTQALKMAEGKRLNVYTDSRYAFATAHIHGEIYRRRGWLTSEGREIKNKSEILALLKALFLPKRLSIIHCLGHQKGDSAEARGNRLADQAAREAAIKTPPDTSTLLIAGKRTADGSEFEKRTADGSEFESPKKKAKVE

SEQ ID NO: 2166 - protein, 2094 aa, synthetic construct; identical to SEQ ID NO: 2051
  source 1..2094: note = Description of Artificial Sequence: Synthetic polypeptide

SEQ ID NO: 2167 - protein, 2092 aa, synthetic construct
  source 1..2092: note = Description of Artificial Sequence: Synthetic polypeptide
MPAAKRVKLDGGDKKYSIGLDIGTNSVGWAVITDEYKVPSKKFKVLGNTDRHSIKKNLIGALLFDSGETAEATRLKRTARRRYTRRKNRICYLQEIFSNEMAKVDDSFFHRLEESFLVEEDKKHERHPIFGNIVDEVAYHEKYPTIYHLRKKLVDSTDKADLRLIYLALAHMIKFRGHFLIEGDLNPDNSDVDKLFIQLVQTYNQLFEENPINASGVDAKAILSARLSKSRRLENLIAQLPGEKKNGLFGNLIALSLGLTPNFKSNFDLAEDAKLQLSKDTYDDDLDNLLAQIGDQYADLFLAAKNLSDAILLSDILRVNTEITKAPLSASMIKRYDEHHQDLTLLKALVRQQLPEKYKEIFFDQSKNGYAGYIDGGASQEEFYKFIKPILEKMDGTEELLVKLNREDLLRKQRTFDNGSIPHQIHLGELHAILRRQEDFYPFLKDNREKIEKILTFRIPYYVGPLARGNSRFAWMTRKSEETITPWNFEEVVDKGASAQSFIERMTNFDKNLPNEKVLPKHSLLYEYFTVYNELTKVKYVTEGMRKPAFLSGEQKKAIVDLLFKTNRKVTVKQLKEDYFKKIECFDSVEISGVEDRFNASLGTYHDLLKIIKDKDFLDNEENEDILEDIVLTLTLFEDREMIEERLKTYAHLFDDKVMKQLKRRRYTGWGRLSRKLINGIRDKQSGKTILDFLKSDGFANRNFMQLIHDDSLTFKEDIQKAQVSGQGDSLHEHIANLAGSPAIKKGILQTVKVVDELVKVMGRHKPENIVIEMARENQTTQKGQKNSRERMKRIEEGIKELGSQILKEHPVENTQLQNEKLYLYYLQNGRDMYVDQELDINRLSDYDVDHIVPQSFLKDDSIDNKVLTRSDKARGKSDNVPSEEVVKKMKNYWRQLLNAKLITQRKFDNLTKAERGGLSELDKAGFIKRQLVETRQITKHVAQILDSRMNTKYDENDKLIREVKVITLKSKLVSDFRKDFQFYKVREINNYHHAHDAYLNAVVGTALIKKYPKLESEFVYGDYKVYDVRKMIAKSEQEIGKATAKYFFYSNIMNFFKTEITLANGEIRKRPLIETNGETGEIVWDKGRDFATVRKVLSMPQVNIVKKTEVQTGGFSKESILPKRNSDKLIARKKDWDPKKYGGFDSPTVAYSVLVVAKVEKGKSKKLKSVKELLGITIMERSSFEKNPIDFLEAKGYKEVKKDLIIKLPKYSLFELENGRKRMLASAGELQKGNELALPSKYVNFLYLASHYEKLKGSPEDNEQKQLFVEQHKHYLDEIIEQISEFSKRVILADANLDKVLSAYNKHRDKPIREQAENIIHLFTLTNLGAPAAFKYFDTTIDRKRYTSTKEVLDATLIHQSITGLYETRIDLSQLGGDGGPAPAPAPGGLGIEDEYRLHETSTEPDVSLGSTWLSDFPQAWAETGGMGLAVRQAPLIIPLKATSTPVSIQQYPMSHEARLGIKPHIQRLLDQGILVPCQSPWNTPLLPVKKPGTNDYRPVQDLREVNKRVEDIHPTVPNPYNLLSGLPPSHQWYTVLDLKDAFFCLRLHPTSQPLFAFEWRDPGMGISGQLTWTRLPQGFKNSPTLFNEALHRDLADFRIQHPDLILLQYVDDILLAATSELDCQQGTRALLQTLGDLGYRASAKKAQICQKQVKYLGYLLREGQRWLTEARKETVMGQPVPKTPRQLREFLGKAGFCRLFIPGFAEMAAPLYPLTKPGTLFSWGPDQQKAYQEIKQALLTAPALGLPDLTKPFELFVDEKQGYAKGVLTQKLGPWRRPVAYLSKKLDPVAAGWPPCLRMVAAIAVLTKDAGKLTMGQPLVILAPHAVEALVKQPPDRWLSNARMTHYQAMLLDTDRVQFGPVVALNPATLLPLPEEGAPHDCLEILAETHGTRPDLTDQPIPDADHTWYTDGSSFLQEGQRKAGAAVTTETEVIWAGALPAGTSAQRAELIALTQALKMAEGKRLNVYTDSRYAFATAHIHGEIYRRRGWLTSEGREIKNKSEILALLKALFLPKRLSIIHCLGHQKGDSAEARGNRLADQAAREAAIKTPPDTSTLLIAGKRTADGSEFEKRTADGSEFESPKKKAKVE

SEQ ID NO: 2168 - protein, 2096 aa, synthetic construct
  source 1..2096: note = Description of Artificial Sequence: Synthetic polypeptide
MPAAKRVKLDGGDKKYSIGLDIGTNSVGWAVITDEYKVPSKKFKVLGNTDRHSIKKNLIGALLFDSGETAEATRLKRTARRRYTRRKNRICYLQEIFSNEMAKVDDSFFHRLEESFLVEEDKKHERHPIFGNIVDEVAYHEKYPTIYHLRKKLVDSTDKADLRLIYLALAHMIKFRGHFLIEGDLNPDNSDVDKLFIQLVQTYNQLFEENPINASGVDAKAILSARLSKSRRLENLIAQLPGEKKNGLFGNLIALSLGLTPNFKSNFDLAEDAKLQLSKDTYDDDLDNLLAQIGDQYADLFLAAKNLSDAILLSDILRVNTEITKAPLSASMIKRYDEHHQDLTLLKALVRQQLPEKYKEIFFDQSKNGYAGYIDGGASQEEFYKFIKPILEKMDGTEELLVKLNREDLLRKQRTFDNGSIPHQIHLGELHAILRRQEDFYPFLKDNREKIEKILTFRIPYYVGPLARGNSRFAWMTRKSEETITPWNFEEVVDKGASAQSFIERMTNFDKNLPNEKVLPKHSLLYEYFTVYNELTKVKYVTEGMRKPAFLSGEQKKAIVDLLFKTNRKVTVKQLKEDYFKKIECFDSVEISGVEDRFNASLGTYHDLLKIIKDKDFLDNEENEDILEDIVLTLTLFEDREMIEERLKTYAHLFDDKVMKQLKRRRYTGWGRLSRKLINGIRDKQSGKTILDFLKSDGFANRNFMQLIHDDSLTFKEDIQKAQVSGQGDSLHEHIANLAGSPAIKKGILQTVKVVDELVKVMGRHKPENIVIEMARENQTTQKGQKNSRERMKRIEEGIKELGSQILKEHPVENTQLQNEKLYLYYLQNGRDMYVDQELDINRLSDYDVDHIVPQSFLKDDSIDNKVLTRSDKARGKSDNVPSEEVVKKMKNYWRQLLNAKLITQRKFDNLTKAERGGLSELDKAGFIKRQLVETRQITKHVAQILDSRMNTKYDENDKLIREVKVITLKSKLVSDFRKDFQFYKVREINNYHHAHDAYLNAVVGTALIKKYPKLESEFVYGDYKVYDVRKMIAKSEQEIGKATAKYFFYSNIMNFFKTEITLANGEIRKRPLIETNGETGEIVWDKGRDFATVRKVLSMPQVNIVKKTEVQTGGFSKESILPKRNSDKLIARKKDWDPKKYGGFDSPTVAYSVLVVAKVEKGKSKKLKSVKELLGITIMERSSFEKNPIDFLEAKGYKEVKKDLIIKLPKYSLFELENGRKRMLASAGELQKGNELALPSKYVNFLYLASHYEKLKGSPEDNEQKQLFVEQHKHYLDEIIEQISEFSKRVILADANLDKVLSAYNKHRDKPIREQAENIIHLFTLTNLGAPAAFKYFDTTIDRKRYTSTKEVLDATLIHQSITGLYETRIDLSQLGGDGGGGSEAAAKGSSGGLGIEDEYRLHETSTEPDVSLGSTWLSDFPQAWAETGGMGLAVRQAPLIIPLKATSTPVSIQQYPMSHEARLGIKPHIQRLLDQGILVPCQSPWNTPLLPVKKPGTNDYRPVQDLREVNKRVEDIHPTVPNPYNLLSGLPPSHQWYTVLDLKDAFFCLRLHPTSQPLFAFEWRDPGMGISGQLTWTRLPQGFKNSPTLFNEALHRDLADFRIQHPDLILLQYVDDILLAATSELDCQQGTRALLQTLGDLGYRASAKKAQICQKQVKYLGYLLREGQRWLTEARKETVMGQPVPKTPRQLREFLGKAGFCRLFIPGFAEMAAPLYPLTKPGTLFSWGPDQQKAYQEIKQALLTAPALGLPDLTKPFELFVDEKQGYAKGVLTQKLGPWRRPVAYLSKKLDPVAAGWPPCLRMVAAIAVLTKDAGKLTMGQPLVILAPHAVEALVKQPPDRWLSNARMTHYQAMLLDTDRVQFGPVVALNPATLLPLPEEGAPHDCLEILAETHGTRPDLTDQPIPDADHTWYTDGSSFLQEGQRKAGAAVTTETEVIWAGALPAGTSAQRAELIALTQALKMAEGKRLNVYTDSRYAFATAHIHGEIYRRRGWLTSEGREIKNKSEILALLKALFLPKRLSIIHCLGHQKGDSAEARGNRLADQAAREAAIKTPPDTSTLLIAGKRTADGSEFEKRTADGSEFESPKKKAKVE

SEQ ID NO: 2169 - protein, 2090 aa, synthetic construct
  source 1..2090: note = Description of Artificial Sequence: Synthetic polypeptide
MPAAKRVKLDGGDKKYSIGLDIGTNSVGWAVITDEYKVPSKKFKVLGNTDRHSIKKNLIGALLFDSGETAEATRLKRTARRRYTRRKNRICYLQEIFSNEMAKVDDSFFHRLEESFLVEEDKKHERHPIFGNIVDEVAYHEKYPTIYHLRKKLVDSTDKADLRLIYLALAHMIKFRGHFLIEGDLNPDNSDVDKLFIQLVQTYNQLFEENPINASGVDAKAILSARLSKSRRLENLIAQLPGEKKNGLFGNLIALSLGLTPNFKSNFDLAEDAKLQLSKDTYDDDLDNLLAQIGDQYADLFLAAKNLSDAILLSDILRVNTEITKAPLSASMIKRYDEHHQDLTLLKALVRQQLPEKYKEIFFDQSKNGYAGYIDGGASQEEFYKFIKPILEKMDGTEELLVKLNREDLLRKQRTFDNGSIPHQIHLGELHAILRRQEDFYPFLKDNREKIEKILTFRIPYYVGPLARGNSRFAWMTRKSEETITPWNFEEVVDKGASAQSFIERMTNFDKNLPNEKVLPKHSLLYEYFTVYNELTKVKYVTEGMRKPAFLSGEQKKAIVDLLFKTNRKVTVKQLKEDYFKKIECFDSVEISGVEDRFNASLGTYHDLLKIIKDKDFLDNEENEDILEDIVLTLTLFEDREMIEERLKTYAHLFDDKVMKQLKRRRYTGWGRLSRKLINGIRDKQSGKTILDFLKSDGFANRNFMQLIHDDSLTFKEDIQKAQVSGQGDSLHEHIANLAGSPAIKKGILQTVKVVDELVKVMGRHKPENIVIEMARENQTTQKGQKNSRERMKRIEEGIKELGSQILKEHPVENTQLQNEKLYLYYLQNGRDMYVDQELDINRLSDYDVDHIVPQSFLKDDSIDNKVLTRSDKARGKSDNVPSEEVVKKMKNYWRQLLNAKLITQRKFDNLTKAERGGLSELDKAGFIKRQLVETRQITKHVAQILDSRMNTKYDENDKLIREVKVITLKSKLVSDFRKDFQFYKVREINNYHHAHDAYLNAVVGTALIKKYPKLESEFVYGDYKVYDVRKMIAKSEQEIGKATAKYFFYSNIMNFFKTEITLANGEIRKRPLIETNGETGEIVWDKGRDFATVRKVLSMPQVNIVKKTEVQTGGFSKESILPKRNSDKLIARKKDWDPKKYGGFDSPTVAYSVLVVAKVEKGKSKKLKSVKELLGITIMERSSFEKNPIDFLEAKGYKEVKKDLIIKLPKYSLFELENGRKRMLASAGELQKGNELALPSKYVNFLYLASHYEKLKGSPEDNEQKQLFVEQHKHYLDEIIEQISEFSKRVILADANLDKVLSAYNKHRDKPIREQAENIIHLFTLTNLGAPAAFKYFDTTIDRKRYTSTKEVLDATLIHQSITGLYETRIDLSQLGGDGGGGGGGGGLGIEDEYRLHETSTEPDVSLGSTWLSDFPQAWAETGGMGLAVRQAPLIIPLKATSTPVSIQQYPMSHEARLGIKPHIQRLLDQGILVPCQSPWNTPLLPVKKPGTNDYRPVQDLREVNKRVEDIHPTVPNPYNLLSGLPPSHQWYTVLDLKDAFFCLRLHPTSQPLFAFEWRDPGMGISGQLTWTRLPQGFKNSPTLFNEALHRDLADFRIQHPDLILLQYVDDILLAATSELDCQQGTRALLQTLGDLGYRASAKKAQICQKQVKYLGYLLREGQRWLTEARKETVMGQPVPKTPRQLREFLGKAGFCRLFIPGFAEMAAPLYPLTKPGTLFSWGPDQQKAYQEIKQALLTAPALGLPDLTKPFELFVDEKQGYAKGVLTQKLGPWRRPVAYLSKKLDPVAAGWPPCLRMVAAIAVLTKDAGKLTMGQPLVILAPHAVEALVKQPPDRWLSNARMTHYQAMLLDTDRVQFGPVVALNPATLLPLPEEGAPHDCLEILAETHGTRPDLTDQPIPDADHTWYTDGSSFLQEGQRKAGAAVTTETEVIWAGALPAGTSAQRAELIALTQALKMAEGKRLNVYTDSRYAFATAHIHGEIYRRRGWLTSEGREIKNKSEILALLKALFLPKRLSIIHCLGHQKGDSAEARGNRLADQAAREAAIKTPPDTSTLLIAGKRTADGSEFEKRTADGSEFESPKKKAKVE

SEQ ID NO: 2170 - protein, 2091 aa, synthetic construct
  source 1..2091: note = Description of Artificial Sequence: Synthetic polypeptide
MPAAKRVKLDGGDKKYSIGLDIGTNSVGWAVITDEYKVPSKKFKVLGNTDRHSIKKNLIGALLFDSGETAEATRLKRTARRRYTRRKNRICYLQEIFSNEMAKVDDSFFHRLEESFLVEEDKKHERHPIFGNIVDEVAYHEKYPTIYHLRKKLVDSTDKADLRLIYLALAHMIKFRGHFLIEGDLNPDNSDVDKLFIQLVQTYNQLFEENPINASGVDAKAILSARLSKSRRLENLIAQLPGEKKNGLFGNLIALSLGLTPNFKSNFDLAEDAKLQLSKDTYDDDLDNLLAQIGDQYADLFLAAKNLSDAILLSDILRVNTEITKAPLSASMIKRYDEHHQDLTLLKALVRQQLPEKYKEIFFDQSKNGYAGYIDGGASQEEFYKFIKPILEKMDGTEELLVKLNREDLLRKQRTFDNGSIPHQIHLGELHAILRRQEDFYPFLKDNREKIEKILTFRIPYYVGPLARGNSRFAWMTRKSEETITPWNFEEVVDKGASAQSFIERMTNFDKNLPNEKVLPKHSLLYEYFTVYNELTKVKYVTEGMRKPAFLSGEQKKAIVDLLFKTNRKVTVKQLKEDYFKKIECFDSVEISGVEDRFNASLGTYHDLLKIIKDKDFLDNEENEDILEDIVLTLTLFEDREMIEERLKTYAHLFDDKVMKQLKRRRYTGWGRLSRKLINGIRDKQSGKTILDFLKSDGFANRNFMQLIHDDSLTFKEDIQKAQVSGQGDSLHEHIANLAGSPAIKKGILQTVKVVDELVKVMGRHKPENIVIEMARENQTTQKGQKNSRERMKRIEEGIKELGSQILKEHPVENTQLQNEKLYLYYLQNGRDMYVDQELDINRLSDYDVDHIVPQSFLKDDSIDNKVLTRSDKARGKSDNVPSEEVVKKMKNYWRQLLNAKLITQRKFDNLTKAERGGLSELDKAGFIKRQLVETRQITKHVAQILDSRMNTKYDENDKLIREVKVITLKSKLVSDFRKDFQFYKVREINNYHHAHDAYLNAVVGTALIKKYPKLESEFVYGDYKVYDVRKMIAKSEQEIGKATAKYFFYSNIMNFFKTEITLANGEIRKRPLIETNGETGEIVWDKGRDFATVRKVLSMPQVNIVKKTEVQTGGFSKESILPKRNSDKLIARKKDWDPKKYGGFDSPTVAYSVLVVAKVEKGKSKKLKSVKELLGITIMERSSFEKNPIDFLEAKGYKEVKKDLIIKLPKYSLFELENGRKRMLASAGELQKGNELALPSKYVNFLYLASHYEKLKGSPEDNEQKQLFVEQHKHYLDEIIEQISEFSKRVILADANLDKVLSAYNKHRDKPIREQAENIIHLFTLTNLGAPAAFKYFDTTIDRKRYTSTKEVLDATLIHQSITGLYETRIDLSQLGGDGGGSSGGGGGLGIEDEYRLHETSTEPDVSLGSTWLSDFPQAWAETGGMGLAVRQAPLIIPLKATSTPVSIQQYPMSHEARLGIKPHIQRLLDQGILVPCQSPWNTPLLPVKKPGTNDYRPVQDLREVNKRVEDIHPTVPNPYNLLSGLPPSHQWYTVLDLKDAFFCLRLHPTSQPLFAFEWRDPGMGISGQLTWTRLPQGFKNSPTLFNEALHRDLADFRIQHPDLILLQYVDDILLAATSELDCQQGTRALLQTLGDLGYRASAKKAQICQKQVKYLGYLLREGQRWLTEARKETVMGQPVPKTPRQLREFLGKAGFCRLFIPGFAEMAAPLYPLTKPGTLFSWGPDQQKAYQEIKQALLTAPALGLPDLTKPFELFVDEKQGYAKGVLTQKLGPWRRPVAYLSKKLDPVAAGWPPCLRMVAAIAVLTKDAGKLTMGQPLVILAPHAVEALVKQPPDRWLSNARMTHYQAMLLDTDRVQFGPVVALNPATLLPLPEEGAPHDCLEILAETHGTRPDLTDQPIPDADHTWYTDGSSFLQEGQRKAGAAVTTETEVIWAGALPAGTSAQRAELIALTQALKMAEGKRLNVYTDSRYAFATAHIHGEIYRRRGWLTSEGREIKNKSEILALLKALFLPKRLSIIHCLGHQKGDSAEARGNRLADQAAREAAIKTPPDTSTLLIAGKRTADGSEFEKRTADGSEFESPKKKAKVE

SEQ ID NO: 2171 - protein, 2091 aa, synthetic construct
  source 1..2091: note = Description of Artificial Sequence: Synthetic polypeptide
MPAAKRVKLDGGDKKYSIGLDIGTNSVGWAVITDEYKVPSKKFKVLGNTDRHSIKKNLIGALLFDSGETAEATRLKRTARRRYTRRKNRICYLQEIFSNEMAKVDDSFFHRLEESFLVEEDKKHERHPIFGNIVDEVAYHEKYPTIYHLRKKLVDSTDKADLRLIYLALAHMIKFRGHFLIEGDLNPDNSDVDKLFIQLVQTYNQLFEENPINASGVDAKAILSARLSKSRRLENLIAQLPGEKKNGLFGNLIALSLGLTPNFKSNFDLAEDAKLQLSKDTYDDDLDNLLAQIGDQYADLFLAAKNLSDAILLSDILRVNTEITKAPLSASMIKRYDEHHQDLTLLKALVRQQLPEKYKEIFFDQSKNGYAGYIDGGASQEEFYKFIKPILEKMDGTEELLVKLNREDLLRKQRTFDNGSIPHQIHLGELHAILRRQEDFYPFLKDNREKIEKILTFRIPYYVGPLARGNSRFAWMTRKSEETITPWNFEEVVDKGASAQSFIERMTNFDKNLPNEKVLPKHSLLYEYFTVYNELTKVKYVTEGMRKPAFLSGEQKKAIVDLLFKTNRKVTVKQLKEDYFKKIECFDSVEISGVEDRFNASLGTYHDLLKIIKDKDFLDNEENEDILEDIVLTLTLFEDREMIEERLKTYAHLFDDKVMKQLKRRRYTGWGRLSRKLINGIRDKQSGKTILDFLKSDGFANRNFMQLIHDDSLTFKEDIQKAQVSGQGDSLHEHIANLAGSPAIKKGILQTVKVVDELVKVMGRHKPENIVIEMARENQTTQKGQKNSRERMKRIEEGIKELGSQILKEHPVENTQLQNEKLYLYYLQNGRDMYVDQELDINRLSDYDVDHIVPQSFLKDDSIDNKVLTRSDKARGKSDNVPSEEVVKKMKNYWRQLLNAKLITQRKFDNLTKAERGGLSELDKAGFIKRQLVETRQITKHVAQILDSRMNTKYDENDKLIREVKVITLKSKLVSDFRKDFQFYKVREINNYHHAHDAYLNAVVGTALIKKYPKLESEFVYGDYKVYDVRKMIAKSEQEIGKATAKYFFYSNIMNFFKTEITLANGEIRKRPLIETNGETGEIVWDKGRDFATVRKVLSMPQVNIVKKTEVQTGGFSKESILPKRNSDKLIARKKDWDPKKYGGFDSPTVAYSVLVVAKVEKGKSKKLKSVKELLGITIMERSSFEKNPIDFLEAKGYKEVKKDLIIKLPKYSLFELENGRKRMLASAGELQKGNELALPSKYVNFLYLASHYEKLKGSPEDNEQKQLFVEQHKHYLDEIIEQISEFSKRVILADANLDKVLSAYNKHRDKPIREQAENIIHLFTLTNLGAPAAFKYFDTTIDRKRYTSTKEVLDATLIHQSITGLYETRIDLSQLGGDGGGSSGGSGGLGIEDEYRLHETSTEPDVSLGSTWLSDFPQAWAETGGMGLAVRQAPLIIPLKATSTPVSIQQYPMSHEARLGIKPHIQRLLDQGILVPCQSPWNTPLLPVKKPGTNDYRPVQDLREVNKRVEDIHPTVPNPYNLLSGLPPSHQWYTVLDLKDAFFCLRLHPTSQPLFAFEWRDPGMGISGQLTWTRLPQGFKNSPTLFNEALHRDLADFRIQHPDLILLQYVDDILLAATSELDCQQGTRALLQTLGDLGYRASAKKAQICQKQVKYLGYLLREGQRWLTEARKETVMGQPVPKTPRQLREFLGKAGFCRLFIPGFAEMAAPLYPLTKPGTLFSWGPDQQKAYQEIKQALLTAPALGLPDLTKPFELFVDEKQGYAKGVLTQKLGPWRRPVAYLSKKLDPVAAGWPPCLRMVAAIAVLTKDAGKLTMGQPLVILAPHAVEALVKQPPDRWLSNARMTHYQAMLLDTDRVQFGPVVALNPATLLPLPEEGAPHDCLEILAETHGTRPDLTDQPIPDADHTWYTDGSSFLQEGQRKAGAAVTTETEVIWAGALPAGTSAQRAELIALTQALKMAEGKRLNVYTDSRYAFATAHIHGEIYRRRGWLTSEGREIKNKSEILALLKALFLPKRLSIIHCLGHQKGDSAEARGNRLADQAAREAAIKTPPDTSTLLIAGKRTADGSEFEKRTADGSEFESPKKKAKVE

SEQ ID NO: 2172 - protein, 2094 aa, synthetic construct
  source 1..2094: note = Description of Artificial Sequence: Synthetic polypeptide
MPAAKRVKLDGGDKKYSIGLDIGTNSVGWAVITDEYKVPSKKFKVLGNTDRHSIKKNLIGALLFDSGETAEATRLKRTARRRYTRRKNRICYLQEIFSNEMAKVDDSFFHRLEESFLVEEDKKHERHPIFGNIVDEVAYHEKYPTIYHLRKKLVDSTDKADLRLIYLALAHMIKFRGHFLIEGDLNPDNSDVDKLFIQLVQTYNQLFEENPINASGVDAKAILSARLSKSRRLENLIAQLPGEKKNGLFGNLIALSLGLTPNFKSNFDLAEDAKLQLSKDTYDDDLDNLLAQIGDQYADLFLAAKNLSDAILLSDILRVNTEITKAPLSASMIKRYDEHHQDLTLLKALVRQQLPEKYKEIFFDQSKNGYAGYIDGGASQEEFYKFIKPILEKMDGTEELLVKLNREDLLRKQRTFDNGSIPHQIHLGELHAILRRQEDFYPFLKDNREKIEKILTFRIPYYVGPLARGNSRFAWMTRKSEETITPWNFEEVVDKGASAQSFIERMTNFDKNLPNEKVLPKHSLLYEYFTVYNELTKVKYVTEGMRKPAFLSGEQKKAIVDLLFKTNRKVTVKQLKEDYFKKIECFDSVEISGVEDRFNASLGTYHDLLKIIKDKDFLDNEENEDILEDIVLTLTLFEDREMIEERLKTYAHLFDDKVMKQLKRRRYTGWGRLSRKLINGIRDKQSGKTILDFLKSDGFANRNFMQLIHDDSLTFKEDIQKAQVSGQGDSLHEHIANLAGSPAIKKGILQTVKVVDELVKVMGRHKPENIVIEMARENQTTQKGQKNSRERMKRIEEGIKELGSQILKEHPVENTQLQNEKLYLYYLQNGRDMYVDQELDINRLSDYDVDHIVPQSFLKDDSIDNKVLTRSDKARGKSDNVPSEEVVKKMKNYWRQLLNAKLITQRKFDNLTKAERGGLSELDKAGFIKRQLVETRQITKHVAQILDSRMNTKYDENDKLIREVKVITLKSKLVSDFRKDFQFYKVREINNYHHAHDAYLNAVVGTALIKKYPKLESEFVYGDYKVYDVRKMIAKSEQEIGKATAKYFFYSNIMNFFKTEITLANGEIRKRPLIETNGETGEIVWDKGRDFATVRKVLSMPQVNIVKKTEVQTGGFSKESILPKRNSDKLIARKKDWDPKKYGGFDSPTVAYSVLVVAKVEKGKSKKLKSVKELLGITIMERSSFEKNPIDFLEAKGYKEVKKDLIIKLPKYSLFELENGRKRMLASAGELQKGNELALPSKYVNFLYLASHYEKLKGSPEDNEQKQLFVEQHKHYLDEIIEQISEFSKRVILADANLDKVLSAYNKHRDKPIREQAENIIHLFTLTNLGAPAAFKYFDTTIDRKRYTSTKEVLDATLIHQSITGLYETRIDLSQLGGDGGGGSGGGGSSGGLGIEDEYRLHETSTEPDVSLGSTWLSDFPQAWAETGGMGLAVRQAPLIIPLKATSTPVSIQQYPMSHEARLGIKPHIQRLLDQGILVPCQSPWNTPLLPVKKPGTNDYRPVQDLREVNKRVEDIHPTVPNPYNLLSGLPPSHQWYTVLDLKDAFFCLRLHPTSQPLFAFEWRDPGMGISGQLTWTRLPQGFKNSPTLFNEALHRDLADFRIQHPDLILLQYVDDILLAATSELDCQQGTRALLQTLGDLGYRASAKKAQICQKQVKYLGYLLREGQRWLTEARKETVMGQPVPKTPRQLREFLGKAGFCRLFIPGFAEMAAPLYPLTKPGTLFSWGPDQQKAYQEIKQALLTAPALGLPDLTKPFELFVDEKQGYAKGVLTQKLGPWRRPVAYLSKKLDPVAAGWPPCLRMVAAIAVLTKDAGKLTMGQPLVILAPHAVEALVKQPPDRWLSNARMTHYQAMLLDTDRVQFGPVVALNPATLLPLPEEGAPHDCLEILAETHGTRPDLTDQPIPDADHTWYTDGSSFLQEGQRKAGAAVTTETEVIWAGALPAGTSAQRAELIALTQALKMAEGKRLNVYTDSRYAFATAHIHGEIYRRRGWLTSEGREIKNKSEILALLKALFLPKRLSIIHCLGHQKGDSAEARGNRLADQAAREAAIKTPPDTSTLLIAGKRTADGSEFEKRTADGSEFESPKKKAKVE

SEQ ID NO: 2173 - protein, 2096 aa, synthetic construct
  source 1..2096: note = Description of Artificial Sequence: Synthetic polypeptide
MPAAKRVKLDGGDKKYSIGLDIGTNSVGWAVITDEYKVPSKKFKVLGNTDRHSIKKNLIGALLFDSGETAEATRLKRTARRRYTRRKNRICYLQEIFSNEMAKVDDSFFHRLEESFLVEEDKKHERHPIFGNIVDEVAYHEKYPTIYHLRKKLVDSTDKADLRLIYLALAHMIKFRGHFLIEGDLNPDNSDVDKLFIQLVQTYNQLFEENPINASGVDAKAILSARLSKSRRLENLIAQLPGEKKNGLFGNLIALSLGLTPNFKSNFDLAEDAKLQLSKDTYDDDLDNLLAQIGDQYADLFLAAKNLSDAILLSDILRVNTEITKAPLSASMIKRYDEHHQDLTLLKALVRQQLPEKYKEIFFDQSKNGYAGYIDGGASQEEFYKFIKPILEKMDGTEELLVKLNREDLLRKQRTFDNGSIPHQIHLGELHAILRRQEDFYPFLKDNREKIEKILTFRIPYYVGPLARGNSRFAWMTRKSEETITPWNFEEVVDKGASAQSFIERMTNFDKNLPNEKVLPKHSLLYEYFTVYNELTKVKYVTEGMRKPAFLSGEQKKAIVDLLFKTNRKVTVKQLKEDYFKKIECFDSVEISGVEDRFNASLGTYHDLLKIIKDKDFLDNEENEDILEDIVLTLTLFEDREMIEERLKTYAHLFDDKVMKQLKRRRYTGWGRLSRKLINGIRDKQSGKTILDFLKSDGFANRNFMQLIHDDSLTFKEDIQKAQVSGQGDSLHEHIANLAGSPAIKKGILQTVKVVDELVKVMGRHKPENIVIEMARENQTTQKGQKNSRERMKRIEEGIKELGSQILKEHPVENTQLQNEKLYLYYLQNGRDMYVDQELDINRLSDYDVDHIVPQSFLKDDSIDNKVLTRSDKARGKSDNVPSEEVVKKMKNYWRQLLNAKLITQRKFDNLTKAERGGLSELDKAGFIKRQLVETRQITKHVAQILDSRMNTKYDENDKLIREVKVITLKSKLVSDFRKDFQFYKVREINNYHHAHDAYLNAVVGTALIKKYPKLESEFVYGDYKVYDVRKMIAKSEQEIGKATAKYFFYSNIMNFFKTEITLANGEIRKRPLIETNGETGEIVWDKGRDFATVRKVLSMPQVNIVKKTEVQTGGFSKESILPKRNSDKLIARKKDWDPKKYGGFDSPTVAYSVLVVAKVEKGKSKKLKSVKELLGITIMERSSFEKNPIDFLEAKGYKEVKKDLIIKLPKYSLFELENGRKRMLASAGELQKGNELALPSKYVNFLYLASHYEKLKGSPEDNEQKQLFVEQHKHYLDEIIEQISEFSKRVILADANLDKVLSAYNKHRDKPIREQAENIIHLFTLTNLGAPAAFKYFDTTIDRKRYTSTKEVLDATLIHQSITGLYETRIDLSQLGGDGGEAAAKGGGGSSGGLGIEDEYRLHETSTEPDVSLGSTWLSDFPQAWAETGGMGLAVRQAPLIIPLKATSTPVSIQQYPMSHEARLGIKPHIQRLLDQGILVPCQSPWNTPLLPVKKPGTNDYRPVQDLREVNKRVEDIHPTVPNPYNLLSGLPPSHQWYTVLDLKDAFFCLRLHPTSQPLFAFEWRDPGMGISGQLTWTRLPQGFKNSPTLFNEALHRDLADFRIQHPDLILLQYVDDILLAATSELDCQQGTRALLQTLGDLGYRASAKKAQICQKQVKYLGYLLREGQRWLTEARKETVMGQPVPKTPRQLREFLGKAGFCRLFIPGFAEMAAPLYPLTKPGTLFSWGPDQQKAYQEIKQALLTAPALGLPDLTKPFELFVDEKQGYAKGVLTQKLGPWRRPVAYLSKKLDPVAAGWPPCLRMVAAIAVLTKDAGKLTMGQPLVILAPHAVEALVKQPPDRWLSNARMTHYQAMLLDTDRVQFGPVVALNPATLLPLPEEGAPHDCLEILAETHGTRPDLTDQPIPDADHTWYTDGSSFLQEGQRKAGAAVTTETEVIWAGALPAGTSAQRAELIALTQALKMAEGKRLNVYTDSRYAFATAHIHGEIYRRRGWLTSEGREIKNKSEILALLKALFLPKRLSIIHCLGHQKGDSAEARGNRLADQAAREAAIKTPPDTSTLLIAGKRTADGSEFEKRTADGSEFESPKKKAKVE

SEQ ID NO: 2174 - protein, 2096 aa, synthetic construct
  source 1..2096: note = Description of Artificial Sequence: Synthetic polypeptide
MPAAKRVKLDGGDKKYSIGLDIGTNSVGWAVITDEYKVPSKKFKVLGNTDRHSIKKNLIGALLFDSGETAEATRLKRTARRRYTRRKNRICYLQEIFSNEMAKVDDSFFHRLEESFLVEEDKKHERHPIFGNIVDEVAYHEKYPTIYHLRKKLVDSTDKADLRLIYLALAHMIKFRGHFLIEGDLNPDNSDVDKLFIQLVQTYNQLFEENPINASGVDAKAILSARLSKSRRLENLIAQLPGEKKNGLFGNLIALSLGLTPNFKSNFDLAEDAKLQLSKDTYDDDLDNLLAQIGDQYADLFLAAKNLSDAILLSDILRVNTEITKAPLSASMIKRYDEHHQDLTLLKALVRQQLPEKYKEIFFDQSKNGYAGYIDGGASQEEFYKFIKPILEKMDGTEELLVKLNREDLLRKQRTFDNGSIPHQIHLGELHAILRRQEDFYPFLKDNREKIEKILTFRIPYYVGPLARGNSRFAWMTRKSEETITPWNFEEVVDKGASAQSFIERMTNFDKNLPNEKVLPKHSLLYEYFTVYNELTKVKYVTEGMRKPAFLSGEQKKAIVDLLFKTNRKVTVKQLKEDYFKKIECFDSVEISGVEDRFNASLGTYHDLLKIIKDKDFLDNEENEDILEDIVLTLTLFEDREMIEERLKTYAHLFDDKVMKQLKRRRYTGWGRLSRKLINGIRDKQSGKTILDFLKSDGFANRNFMQLIHDDSLTFKEDIQKAQVSGQGDSLHEHIANLAGSPAIKKGILQTVKVVDELVKVMGRHKPENIVIEMARENQTTQKGQKNSRERMKRIEEGIKELGSQILKEHPVENTQLQNEKLYLYYLQNGRDMYVDQELDINRLSDYDVDHIVPQSFLKDDSIDNKVLTRSDKARGKSDNVPSEEVVKKMKNYWRQLLNAKLITQRKFDNLTKAERGGLSELDKAGFIKRQLVETRQITKHVAQILDSRMNTKYDENDKLIREVKVITLKSKLVSDFRKDFQFYKVREINNYHHAHDAYLNAVVGTALIKKYPKLESEFVYGDYKVYDVRKMIAKSEQEIGKATAKYFFYSNIMNFFKTEITLANGEIRKRPLIETNGETGEIVWDKGRDFATVRKVLSMPQVNIVKKTEVQTGGFSKESILPKRNSDKLIARKKDWDPKKYGGFDSPTVAYSVLVVAKVEKGKSKKLKSVKELLGITIMERSSFEKNPIDFLEAKGYKEVKKDLIIKLPKYSLFELENGRKRMLASAGELQKGNELALPSKYVNFLYLASHYEKLKGSPEDNEQKQLFVEQHKHYLDEIIEQISEFSKRVILADANLDKVLSAYNKHRDKPIREQAENIIHLFTLTNLGAPAAFKYFDTTIDRKRYTSTKEVLDATLIHQSITGLYETRIDLSQLGGDGGGGGEAAAKGSSGGLGIEDEYRLHETSTEPDVSLGSTWLSDFPQAWAETGGMGLAVRQAPLIIPLKATSTPVSIQQYPMSHEARLGIKPHIQRLLDQGILVPCQSPWNTPLLPVKKPGTNDYRPVQDLREVNKRVEDIHPTVPNPYNLLSGLPPSHQWYTVLDLKDAFFCLRLHPTSQPLFAFEWRDPGMGISGQLTWTRLPQGFKNSPTLFNEALHRDLADFRIQHPDLILLQYVDDILLAATSELDCQQGTRALLQTLGDLGYRASAKKAQICQKQVKYLGYLLREGQRWLTEARKETVMGQPVPKTPRQLREFLGKAGFCRLFIPGFAEMAAPLYPLTKPGTLFSWGPDQQKAYQEIKQALLTAPALGLPDLTKPFELFVDEKQGYAKGVLTQKLGPWRRPVAYLSKKLDPVAAGWPPCLRMVAAIAVLTKDAGKLTMGQPLVILAPHAVEALVKQPPDRWLSNARMTHYQAMLLDTDRVQFGPVVALNPATLLPLPEEGAPHDCLEILAETHGTRPDLTDQPIPDADHTWYTDGSSFLQEGQRKAGAAVTTETEVIWAGALPAGTSAQRAELIALTQALKMAEGKRLNVYTDSRYAFATAHIHGEIYRRRGWLTSEGREIKNKSEILALLKALFLPKRLSIIHCLGHQKGDSAEARGNRLADQAAREAAIKTPPDTSTLLIAGKRTADGSEFEKRTADGSEFESPKKKAKVE

SEQ ID NO: 2175 - protein, 2096 aa, synthetic construct
  source 1..2096: note = Description of Artificial Sequence: Synthetic polypeptide
MPAAKRVKLDGGDKKYSIGLDIGTNSVGWAVITDEYKVPSKKFKVLGNTDRHSIKKNLIGALLFDSGETAEATRLKRTARRRYTRRKNRICYLQEIFSNEMAKVDDSFFHRLEESFLVEEDKKHERHPIFGNIVDEVAYHEKYPTIYHLRKKLVDSTDKADLRLIYLALAHMIKFRGHFLIEGDLNPDNSDVDKLFIQLVQTYNQLFEENPINASGVDAKAILSARLSKSRRLENLIAQLPGEKKNGLFGNLIALSLGLTPNFKSNFDLAEDAKLQLSKDTYDDDLDNLLAQIGDQYADLFLAAKNLSDAILLSDILRVNTEITKAPLSASMIKRYDEHHQDLTLLKALVRQQLPEKYKEIFFDQSKNGYAGYIDGGASQEEFYKFIKPILEKMDGTEELLVKLNREDLLRKQRTFDNGSIPHQIHLGELHAILRRQEDFYPFLKDNREKIEKILTFRIPYYVGPLARGNSRFAWMTRKSEETITPWNFEEVVDKGASAQSFIERMTNFDKNLPNEKVLPKHSLLYEYFTVYNELTKVKYVTEGMRKPAFLSGEQKKAIVDLLFKTNRKVTVKQLKEDYFKKIECFDSVEISGVEDRFNASLGTYHDLLKIIKDKDFLDNEENEDILEDIVLTLTLFEDREMIEERLKTYAHLFDDKVMKQLKRRRYTGWGRLSRKLINGIRDKQSGKTILDFLKSDGFANRNFMQLIHDDSLTFKEDIQKAQVSGQGDSLHEHIANLAGSPAIKKGILQTVKVVDELVKVMGRHKPENIVIEMARENQTTQKGQKNSRERMKRIEEGIKELGSQILKEHPVENTQLQNEKLYLYYLQNGRDMYVDQELDINRLSDYDVDHIVPQSFLKDDSIDNKVLTRSDKARGKSDNVPSEEVVKKMKNYWRQLLNAKLITQRKFDNLTKAERGGLSELDKAGFIKRQLVETRQITKHVAQILDSRMNTKYDENDKLIREVKVITLKSKLVSDFRKDFQFYKVREINNYHHAHDAYLNAVVGTALIKKYPKLESEFVYGDYKVYDVRKMIAKSEQEIGKATAKYFFYSNIMNFFKTEITLANGEIRKRPLIETNGETGEIVWDKGRDFATVRKVLSMPQVNIVKKTEVQTGGFSKESILPKRNSDKLIARKKDWDPKKYGGFDSPTVAYSVLVVAKVEKGKSKKLKSVKELLGITIMERSSFEKNPIDFLEAKGYKEVKKDLIIKLPKYSLFELENGRKRMLASAGELQKGNELALPSKYVNFLYLASHYEKLKGSPEDNEQKQLFVEQHKHYLDEIIEQISEFSKRVILADANLDKVLSAYNKHRDKPIREQAENIIHLFTLTNLGAPAAFKYFDTTIDRKRYTSTKEVLDATLIHQSITGLYETRIDLSQLGGDGGGGSGGGEAAAKGGLGIEDEYRLHETSTEPDVSLGSTWLSDFPQAWAETGGMGLAVRQAPLIIPLKATSTPVSIQQYPMSHEARLGIKPHIQRLLDQGILVPCQSPWNTPLLPVKKPGTNDYRPVQDLREVNKRVEDIHPTVPNPYNLLSGLPPSHQWYTVLDLKDAFFCLRLHPTSQPLFAFEWRDPGMGISGQLTWTRLPQGFKNSPTLFNEALHRDLADFRIQHPDLILLQYVDDILLAATSELDCQQGTRALLQTLGDLGYRASAKKAQICQKQVKYLGYLLREGQRWLTEARKETVMGQPVPKTPRQLREFLGKAGFCRLFIPGFAEMAAPLYPLTKPGTLFSWGPDQQKAYQEIKQALLTAPALGLPDLTKPFELFVDEKQGYAKGVLTQKLGPWRRPVAYLSKKLDPVAAGWPPCLRMVAAIAVLTKDAGKLTMGQPLVILAPHAVEALVKQPPDRWLSNARMTHYQAMLLDTDRVQFGPVVALNPATLLPLPEEGAPHDCLEILAETHGTRPDLTDQPIPDADHTWYTDGSSFLQEGQRKAGAAVTTETEVIWAGALPAGTSAQRAELIALTQALKMAEGKRLNVYTDSRYAFATAHIHGEIYRRRGWLTSEGREIKNKSEILALLKALFLPKRLSIIHCLGHQKGDSAEARGNRLADQAAREAAIKTPPDTSTLLIAGKRTADGSEFEKRTADGSEFESPKKKAKVE

SEQ ID NO: 2176 - protein, 2091 aa, synthetic construct
  source 1..2091: note = Description of Artificial Sequence: Synthetic polypeptide
MPAAKRVKLDGGDKKYSIGLDIGTNSVGWAVITDEYKVPSKKFKVLGNTDRHSIKKNLIGALLFDSGETAEATRLKRTARRRYTRRKNRICYLQEIFSNEMAKVDDSFFHRLEESFLVEEDKKHERHPIFGNIVDEVAYHEKYPTIYHLRKKLVDSTDKADLRLIYLALAHMIKFRGHFLIEGDLNPDNSDVDKLFIQLVQTYNQLFEENPINASGVDAKAILSARLSKSRRLENLIAQLPGEKKNGLFGNLIALSLGLTPNFKSNFDLAEDAKLQLSKDTYDDDLDNLLAQIGDQYADLFLAAKNLSDAILLSDILRVNTEITKAPLSASMIKRYDEHHQDLTLLKALVRQQLPEKYKEIFFDQSKNGYAGYIDGGASQEEFYKFIKPILEKMDGTEELLVKLNREDLLRKQRTFDNGSIPHQIHLGELHAILRRQEDFYPFLKDNREKIEKILTFRIPYYVGPLARGNSRFAWMTRKSEETITPWNFEEVVDKGASAQSFIERMTNFDKNLPNEKVLPKHSLLYEYFTVYNELTKVKYVTEGMRKPAFLSGEQKKAIVDLLFKTNRKVTVKQLKEDYFKKIECFDSVEISGVEDRFNASLGTYHDLLKIIKDKDFLDNEENEDILEDIVLTLTLFEDREMIEERLKTYAHLFDDKVMKQLKRRRYTGWGRLSRKLINGIRDKQSGKTILDFLKSDGFANRNFMQLIHDDSLTFKEDIQKAQVSGQGDSLHEHIANLAGSPAIKKGILQTVKVVDELVKVMGRHKPENIVIEMARENQTTQKGQKNSRERMKRIEEGIKELGSQILKEHPVENTQLQNEKLYLYYLQNGRDMYVDQELDINRLSDYDVDHIVPQSFLKDDSIDNKVLTRSDKARGKSDNVPSEEVVKKMKNYWRQLLNAKLITQRKFDNLTKAERGGLSELDKAGFIKRQLVETRQITKHVAQILDSRMNTKYDENDKLIREVKVITLKSKLVSDFRKDFQFYKVREINNYHHAHDAYLNAVVGTALIKKYPKLESEFVYGDYKVYDVRKMIAKSEQEIGKATAKYFFYSNIMNFFKTEITLANGEIRKRPLIETNGETGEIVWDKGRDFATVRKVLSMPQVNIVKKTEVQTGGFSKESILPKRNSDKLIARKKDWDPKKYGGFDSPTVAYSVLVVAKVEKGKSKKLKSVKELLGITIMERSSFEKNPIDFLEAKGYKEVKKDLIIKLPKYSLFELENGRKRMLASAGELQKGNELALPSKYVNFLYLASHYEKLKGSPEDNEQKQLFVEQHKHYLDEIIEQISEFSKRVILADANLDKVLSAYNKHRDKPIREQAENIIHLFTLTNLGAPAAFKYFDTTIDRKRYTSTKEVLDATLIHQSITGLYETRIDLSQLGGDGGGSSGSSGGLGIEDEYRLHETSTEPDVSLGSTWLSDFPQAWAETGGMGLAVRQAPLIIPLKATSTPVSIQQYPMSHEARLGIKPHIQRLLDQGILVPCQSPWNTPLLPVKKPGTNDYRPVQDLREVNKRVEDIHPTVPNPYNLLSGLPPSHQWYTVLDLKDAFFCLRLHPTSQPLFAFEWRDPGMGISGQLTWTRLPQGFKNSPTLFNEALHRDLADFRIQHPDLILLQYVDDILLAATSELDCQQGTRALLQTLGDLGYRASAKKAQICQKQVKYLGYLLREGQRWLTEARKETVMGQPVPKTPRQLREFLGKAGFCRLFIPGFAEMAAPLYPLTKPGTLFSWGPDQQKAYQEIKQALLTAPALGLPDLTKPFELFVDEKQGYAKGVLTQKLGPWRRPVAYLSKKLDPVAAGWPPCLRMVAAIAVLTKDAGKLTMGQPLVILAPHAVEALVKQPPDRWLSNARMTHYQAMLLDTDRVQFGPVVALNPATLLPLPEEGAPHDCLEILAETHGTRPDLTDQPIPDADHTWYTDGSSFLQEGQRKAGAAVTTETEVIWAGALPAGTSAQRAELIALTQALKMAEGKRLNVYTDSRYAFATAHIHGEIYRRRGWLTSEGREIKNKSEILALLKALFLPKRLSIIHCLGHQKGDSAEARGNRLADQAAREAAIKTPPDTSTLLIAGKRTADGSEFEKRTADGSEFESPKKKAKVE

SEQ ID NO: 2177 - protein, 2096 aa, synthetic construct
  source 1..2096: note = Description of Artificial Sequence: Synthetic polypeptide
MPAAKRVKLDGGDKKYSIGLDIGTNSVGWAVITDEYKVPSKKFKVLGNTDRHSIKKNLIGALLFDSGETAEATRLKRTARRRYTRRKNRICYLQEIFSNEMAKVDDSFFHRLEESFLVEEDKKHERHPIFGNIVDEVAYHEKYPTIYHLRKKLVDSTDKADLRLIYLALAHMIKFRGHFLIEGDLNPDNSDVDKLFIQLVQTYNQLFEENPINASGVDAKAILSARLSKSRRLENLIAQLPGEKKNGLFGNLIALSLGLTPNFKSNFDLAEDAKLQLSKDTYDDDLDNLLAQIGDQYADLFLAAKNLSDAILLSDILRVNTEITKAPLSASMIKRYDEHHQDLTLLKALVRQQLPEKYKEIFFDQSKNGYAGYIDGGASQEEFYKFIKPILEKMDGTEELLVKLNREDLLRKQRTFDNGSIPHQIHLGELHAILRRQEDFYPFLKDNREKIEKILTFRIPYYVGPLARGNSRFAWMTRKSEETITPWNFEEVVDKGASAQSFIERMTNFDKNLPNEKVLPKHSLLYEYFTVYNELTKVKYVTEGMRKPAFLSGEQKKAIVDLLFKTNRKVTVKQLKEDYFKKIECFDSVEISGVEDRFNASLGTYHDLLKIIKDKDFLDNEENEDILEDIVLTLTLFEDREMIEERLKTYAHLFDDKVMKQLKRRRYTGWGRLSRKLINGIRDKQSGKTILDFLKSDGFANRNFMQLIHDDSLTFKEDIQKAQVSGQGDSLHEHIANLAGSPAIKKGILQTVKVVDELVKVMGRHKPENIVIEMARENQTTQKGQKNSRERMKRIEEGIKELGSQILKEHPVENTQLQNEKLYLYYLQNGRDMYVDQELDINRLSDYDVDHIVPQSFLKDDSIDNKVLTRSDKARGKSDNVPSEEVVKKMKNYWRQLLNAKLITQRKFDNLTKAERGGLSELDKAGFIKRQLVETRQITKHVAQILDSRMNTKYDENDKLIREVKVITLKSKLVSDFRKDFQFYKVREINNYHHAHDAYLNAVVGTALIKKYPKLESEFVYGDYKVYDVRKMIAKSEQEIGKATAKYFFYSNIMNFFKTEITLANGEIRKRPLIETNGETGEIVWDKGRDFATVRKVLSMPQVNIVKKTEVQTGGFSKESILPKRNSDKLIARKKDWDPKKYGGFDSPTVAYSVLVVAKVEKGKSKKLKSVKELLGITIMERSSFEKNPIDFLEAKGYKEVKKDLIIKLPKYSLFELENGRKRMLASAGELQKGNELALPSKYVNFLYLASHYEKLKGSPEDNEQKQLFVEQHKHYLDEIIEQISEFSKRVILADANLDKVLSAYNKHRDKPIREQAENIIHLFTLTNLGAPAAFKYFDTTIDRKRYTSTKEVLDATLIHQSITGLYETRIDLSQLGGDGGGSSEAAAKGGSGGLGIEDEYRLHETSTEPDVSLGSTWLSDFPQAWAETGGMGLAVRQAPLIIPLKATSTPVSIQQYPMSHEARLGIKPHIQRLLDQGILVPCQSPWNTPLLPVKKPGTNDYRPVQDLREVNKRVEDIHPTVPNPYNLLSGLPPSHQWYTVLDLKDAFFCLRLHPTSQPLFAFEWRDPGMGISGQLTWTRLPQGFKNSPTLFNEALHRDLADFRIQHPDLILLQYVDDILLAATSELDCQQGTRALLQTLGDLGYRASAKKAQICQKQVKYLGYLLREGQRWLTEARKETVMGQPVPKTPRQLREFLGKAGFCRLFIPGFAEMAAPLYPLTKPGTLFSWGPDQQKAYQEIKQALLTAPALGLPDLTKPFELFVDEKQGYAKGVLTQKLGPWRRPVAYLSKKLDPVAAGWPPCLRMVAAIAVLTKDAGKLTMGQPLVILAPHAVEALVKQPPDRWLSNARMTHYQAMLLDTDRVQFGPVVALNPATLLPLPEEGAPHDCLEILAETHGTRPDLTDQPIPDADHTWYTDGSSFLQEGQRKAGAAVTTETEVIWAGALPAGTSAQRAELIALTQALKMAEGKRLNVYTDSRYAFATAHIHGEIYRRRGWLTSEGREIKNKSEILALLKALFLPKRLSIIHCLGHQKGDSAEARGNRLADQAAREAAIKTPPDTSTLLIAGKRTADGSEFEKRTADGSEFESPKKKAKVE

SEQ ID NO: 2178 - protein, 2096 aa, synthetic construct
  source 1..2096: note = Description of Artificial Sequence: Synthetic polypeptide
MPAAKRVKLDGGDKKYSIGLDIGTNSVGWAVITDEYKVPSKKFKVLGNTDRHSIKKNLIGALLFDSGETAEATRLKRTARRRYTRRKNRICYLQEIFSNEMAKVDDSFFHRLEESFLVEEDKKHERHPIFGNIVDEVAYHEKYPTIYHLRKKLVDSTDKADLRLIYLALAHMIKFRGHFLIEGDLNPDNSDVDKLFIQLVQTYNQLFEENPINASGVDAKAILSARLSKSRRLENLIAQLPGEKKNGLFGNLIALSLGLTPNFKSNFDLAEDAKLQLSKDTYDDDLDNLLAQIGDQYADLFLAAKNLSDAILLSDILRVNTEITKAPLSASMIKRYDEHHQDLTLLKALVRQQLPEKYKEIFFDQSKNGYAGYIDGGASQEEFYKFIKPILEKMDGTEELLVKLNREDLLRKQRTFDNGSIPHQIHLGELHAILRRQEDFYPFLKDNREKIEKILTFRIPYYVGPLARGNSRFAWMTRKSEETITPWNFEEVVDKGASAQSFIERMTNFDKNLPNEKVLPKHSLLYEYFTVYNELTKVKYVTEGMRKPAFLSGEQKKAIVDLLFKTNRKVTVKQLKEDYFKKIECFDSVEISGVEDRFNASLGTYHDLLKIIKDKDFLDNEENEDILEDIVLTLTLFEDREMIEERLKTYAHLFDDKVMKQLKRRRYTGWGRLSRKLINGIRDKQSGKTILDFLKSDGFANRNFMQLIHDDSLTFKEDIQKAQVSGQGDSLHEHIANLAGSPAIKKGILQTVKVVDELVKVMGRHKPENIVIEMARENQTTQKGQKNSRERMKRIEEGIKELGSQILKEHPVENTQLQNEKLYLYYLQNGRDMYVDQELDINRLSDYDVDHIVPQSFLKDDSIDNKVLTRSDKARGKSDNVPSEEVVKKMKNYWRQLLNAKLITQRKFDNLTKAERGGLSELDKAGFIKRQLVETRQITKHVAQILDSRMNTKYDENDKLIREVKVITLKSKLVSDFRKDFQFYKVREINNYHHAHDAYLNAVVGTALIKKYPKLESEFVYGDYKVYDVRKMIAKSEQEIGKATAKYFFYSNIMNFFKTEITLANGEIRKRPLIETNGETGEIVWDKGRDFATVRKVLSMPQVNIVKKTEVQTGGFSKESILPKRNSDKLIARKKDWDPKKYGGFDSPTVAYSVLVVAKVEKGKSKKLKSVKELLGITIMERSSFEKNPIDFLEAKGYKEVKKDLIIKLPKYSLFELENGRKRMLASAGELQKGNELALPSKYVNFLYLASHYEKLKGSPEDNEQKQLFVEQHKHYLDEIIEQISEFSKRVILADANLDKVLSAYNKHRDKPIREQAENIIHLFTLTNLGAPAAFKYFDTTIDRKRYTSTKEVLDATLIHQSITGLYETRIDLSQLGGDGGPAPGGGEAAAKGGLGIEDEYRLHETSTEPDVSLGSTWLSDFPQAWAETGGMGLAVRQAPLIIPLKATSTPVSIQQYPMSHEARLGIKPHIQRLLDQGILVPCQSPWNTPLLPVKKPGTNDYRPVQDLREVNKRVEDIHPTVPNPYNLLSGLPPSHQWYTVLDLKDAFFCLRLHPTSQPLFAFEWRDPGMGISGQLTWTRLPQGFKNSPTLFNEALHRDLADFRIQHPDLILLQYVDDILLAATSELDCQQGTRALLQTLGDLGYRASAKKAQICQKQVKYLGYLLREGQRWLTEARKETVMGQPVPKTPRQLREFLGKAGFCRLFIPGFAEMAAPLYPLTKPGTLFSWGPDQQKAYQEIKQALLTAPALGLPDLTKPFELFVDEKQGYAKGVLTQKLGPWRRPVAYLSKKLDPVAAGWPPCLRMVAAIAVLTKDAGKLTMGQPLVILAPHAVEALVKQPPDRWLSNARMTHYQAMLLDTDRVQFGPVVALNPATLLPLPEEGAPHDCLEILAETHGTRPDLTDQPIPDADHTWYTDGSSFLQEGQRKAGAAVTTETEVIWAGALPAGTSAQRAELIALTQALKMAEGKRLNVYTDSRYAFATAHIHGEIYRRRGWLTSEGREIKNKSEILALLKALFLPKRLSIIHCLGHQKGDSAEARGNRLADQAAREAAIKTPPDTSTLLIAGKRTADGSEFEKRTADGSEFESPKKKAKVE

SEQ ID NO: 2179 - protein, 2091 aa, synthetic construct
  source 1..2091: note = Description of Artificial Sequence: Synthetic polypeptide
MPAAKRVKLDGGDKKYSIGLDIGTNSVGWAVITDEYKVPSKKFKVLGNTDRHSIKKNLIGALLFDSGETAEATRLKRTARRRYTRRKNRICYLQEIFSNEMAKVDDSFFHRLEESFLVEEDKKHERHPIFGNIVDEVAYHEKYPTIYHLRKKLVDSTDKADLRLIYLALAHMIKFRGHFLIEGDLNPDNSDVDKLFIQLVQTYNQLFEENPINASGVDAKAILSARLSKSRRLENLIAQLPGEKKNGLFGNLIALSLGLTPNFKSNFDLAEDAKLQLSKDTYDDDLDNLLAQIGDQYADLFLAAKNLSDAILLSDILRVNTEITKAPLSASMIKRYDEHHQDLTLLKALVRQQLPEKYKEIFFDQSKNGYAGYIDGGASQEEFYKFIKPILEKMDGTEELLVKLNREDLLRKQRTFDNGSIPHQIHLGELHAILRRQEDFYPFLKDNREKIEKILTFRIPYYVGPLARGNSRFAWMTRKSEETITPWNFEEVVDKGASAQSFIERMTNFDKNLPNEKVLPKHSLLYEYFTVYNELTKVKYVTEGMRKPAFLSGEQKKAIVDLLFKTNRKVTVKQLKEDYFKKIECFDSVEISGVEDRFNASLGTYHDLLKIIKDKDFLDNEENEDILEDIVLTLTLFEDREMIEERLKTYAHLFDDKVMKQLKRRRYTGWGRLSRKLINGIRDKQSGKTILDFLKSDGFANRNFMQLIHDDSLTFKEDIQKAQVSGQGDSLHEHIANLAGSPAIKKGILQTVKVVDELVKVMGRHKPENIVIEMARENQTTQKGQKNSRERMKRIEEGIKELGSQILKEHPVENTQLQNEKLYLYYLQNGRDMYVDQELDINRLSDYDVDHIVPQSFLKDDSIDNKVLTRSDKARGKSDNVPSEEVVKKMKNYWRQLLNAKLITQRKFDNLTKAERGGLSELDKAGFIKRQLVETRQITKHVAQILDSRMNTKYDENDKLIREVKVITLKSKLVSDFRKDFQFYKVREINNYHHAHDAYLNAVVGTALIKKYPKLESEFVYGDYKVYDVRKMIAKSEQEIGKATAKYFFYSNIMNFFKTEITLANGEIRKRPLIETNGETGEIVWDKGRDFATVRKVLSMPQVNIVKKTEVQTGGFSKESILPKRNSDKLIARKKDWDPKKYGGFDSPTVAYSVLVVAKVEKGKSKKLKSVKELLGITIMERSSFEKNPIDFLEAKGYKEVKKDLIIKLPKYSLFELENGRKRMLASAGELQKGNELALPSKYVNFLYLASHYEKLKGSPEDNEQKQLFVEQHKHYLDEIIEQISEFSKRVILADANLDKVLSAYNKHRDKPIREQAENIIHLFTLTNLGAPAAFKYFDTTIDRKRYTSTKEVLDATLIHQSITGLYETRIDLSQLGGDGGGGGGSSGGLGIEDEYRLHETSTEPDVSLGSTWLSDFPQAWAETGGMGLAVRQAPLIIPLKATSTPVSIQQYPMSHEARLGIKPHIQRLLDQGILVPCQSPWNTPLLPVKKPGTNDYRPVQDLREVNKRVEDIHPTVPNPYNLLSGLPPSHQWYTVLDLKDAFFCLRLHPTSQPLFAFEWRDPGMGISGQLTWTRLPQGFKNSPTLFNEALHRDLADFRIQHPDLILLQYVDDILLAATSELDCQQGTRALLQTLGDLGYRASAKKAQICQKQVKYLGYLLREGQRWLTEARKETVMGQPVPKTPRQLREFLGKAGFCRLFIPGFAEMAAPLYPLTKPGTLFSWGPDQQKAYQEIKQALLTAPALGLPDLTKPFELFVDEKQGYAKGVLTQKLGPWRRPVAYLSKKLDPVAAGWPPCLRMVAAIAVLTKDAGKLTMGQPLVILAPHAVEALVKQPPDRWLSNARMTHYQAMLLDTDRVQFGPVVALNPATLLPLPEEGAPHDCLEILAETHGTRPDLTDQPIPDADHTWYTDGSSFLQEGQRKAGAAVTTETEVIWAGALPAGTSAQRAELIALTQALKMAEGKRLNVYTDSRYAFATAHIHGEIYRRRGWLTSEGREIKNKSEILALLKALFLPKRLSIIHCLGHQKGDSAEARGNRLADQAAREAAIKTPPDTSTLLIAGKRTADGSEFEKRTADGSEFESPKKKAKVE

SEQ ID NO: 2180 - protein, 2094 aa, synthetic construct
  source 1..2094: note = Description of Artificial Sequence: Synthetic polypeptide
MPAAKRVKLDGGDKKYSIGLDIGTNSVGWAVITDEYKVPSKKFKVLGNTDRHSIKKNLIGALLFDSGETAEATRLKRTARRRYTRRKNRICYLQEIFSNEMAKVDDSFFHRLEESFLVEEDKKHERHPIFGNIVDEVAYHEKYPTIYHLRKKLVDSTDKADLRLIYLALAHMIKFRGHFLIEGDLNPDNSDVDKLFIQLVQTYNQLFEENPINASGVDAKAILSARLSKSRRLENLIAQLPGEKKNGLFGNLIALSLGLTPNFKSNFDLAEDAKLQLSKDTYDDDLDNLLAQIGDQYADLFLAAKNLSDAILLSDILRVNTEITKAPLSASMIKRYDEHHQDLTLLKALVRQQLPEKYKEIFFDQSKNGYAGYIDGGASQEEFYKFIKPILEKMDGTEELLVKLNREDLLRKQRTFDNGSIPHQIHLGELHAILRRQEDFYPFLKDNREKIEKILTFRIPYYVGPLARGNSRFAWMTRKSEETITPWNFEEVVDKGASAQSFIERMTNFDKNLPNEKVLPKHSLLYEYFTVYNELTKVKYVTEGMRKPAFLSGEQKKAIVDLLFKTNRKVTVKQLKEDYFKKIECFDSVEISGVEDRFNASLGTYHDLLKIIKDKDFLDNEENEDILEDIVLTLTLFEDREMIEERLKTYAHLFDDKVMKQLKRRRYTGWGRLSRKLINGIRDKQSGKTILDFLKSDGFANRNFMQLIHDDSLTFKEDIQKAQVSGQGDSLHEHIANLAGSPAIKKGILQTVKVVDELVKVMGRHKPENIVIEMARENQTTQKGQKNSRERMKRIEEGIKELGSQILKEHPVENTQLQNEKLYLYYLQNGRDMYVDQELDINRLSDYDVDHIVPQSFLKDDSIDNKVLTRSDKARGKSDNVPSEEVVKKMKNYWRQLLNAKLITQRKFDNLTKAERGGLSELDKAGFIKRQLVETRQITKHVAQILDSRMNTKYDENDKLIREVKVITLKSKLVSDFRKDFQFYKVREINNYHHAHDAYLNAVVGTALIKKYPKLESEFVYGDYKVYDVRKMIAKSEQEIGKATAKYFFYSNIMNFFKTEITLANGEIRKRPLIETNGETGEIVWDKGRDFATVRKVLSMPQVNIVKKTEVQTGGFSKESILPKRNSDKLIARKKDWDPKKYGGFDSPTVAYSVLVVAKVEKGKSKKLKSVKELLGITIMERSSFEKNPIDFLEAKGYKEVKKDLIIKLPKYSLFELENGRKRMLASAGELQKGNELALPSKYVNFLYLASHYEKLKGSPEDNEQKQLFVEQHKHYLDEIIEQISEFSKRVILADANLDKVLSAYNKHRDKPIREQAENIIHLFTLTNLGAPAAFKYFDTTIDRKRYTSTKEVLDATLIHQSITGLYETRIDLSQLGGDGGGGGPAPGSSGGLGIEDEYRLHETSTEPDVSLGSTWLSDFPQAWAETGGMGLAVRQAPLIIPLKATSTPVSIQQYPMSHEARLGIKPHIQRLLDQGILVPCQSPWNTPLLPVKKPGTNDYRPVQDLREVNKRVEDIHPTVPNPYNLLSGLPPSHQWYTVLDLKDAFFCLRLHPTSQPLFAFEWRDPGMGISGQLTWTRLPQGFKNSPTLFNEALHRDLADFRIQHPDLILLQYVDDILLAATSELDCQQGTRALLQTLGDLGYRASAKKAQICQKQVKYLGYLLREGQRWLTEARKETVMGQPVPKTPRQLREFLGKAGFCRLFIPGFAEMAAPLYPLTKPGTLFSWGPDQQKAYQEIKQALLTAPALGLPDLTKPFELFVDEKQGYAKGVLTQKLGPWRRPVAYLSKKLDPVAAGWPPCLRMVAAIAVLTKDAGKLTMGQPLVILAPHAVEALVKQPPDRWLSNARMTHYQAMLLDTDRVQFGPVVALNPATLLPLPEEGAPHDCLEILAETHGTRPDLTDQPIPDADHTWYTDGSSFLQEGQRKAGAAVTTETEVIWAGALPAGTSAQRAELIALTQALKMAEGKRLNVYTDSRYAFATAHIHGEIYRRRGWLTSEGREIKNKSEILALLKALFLPKRLSIIHCLGHQKGDSAEARGNRLADQAAREAAIKTPPDTSTLLIAGKRTADGSEFEKRTADGSEFESPKKKAKVE

SEQ ID NO: 2181 - protein, 2118 aa, synthetic construct
  source 1..2118: note = Description of Artificial Sequence: Synthetic polypeptide
MPAAKRVKLDGGDKKYSIGLDIGTNSVGWAVITDEYKVPSKKFKVLGNTDRHSIKKNLIGALLFDSGETAEATRLKRTARRRYTRRKNRICYLQEIFSNEMAKVDDSFFHRLEESFLVEEDKKHERHPIFGNIVDEVAYHEKYPTIYHLRKKLVDSTDKADLRLIYLALAHMIKFRGHFLIEGDLNPDNSDVDKLFIQLVQTYNQLFEENPINASGVDAKAILSARLSKSRRLENLIAQLPGEKKNGLFGNLIALSLGLTPNFKSNFDLAEDAKLQLSKDTYDDDLDNLLAQIGDQYADLFLAAKNLSDAILLSDILRVNTEITKAPLSASMIKRYDEHHQDLTLLKALVRQQLPEKYKEIFFDQSKNGYAGYIDGGASQEEFYKFIKPILEKMDGTEELLVKLNREDLLRKQRTFDNGSIPHQIHLGELHAILRRQEDFYPFLKDNREKIEKILTFRIPYYVGPLARGNSRFAWMTRKSEETITPWNFEEVVDKGASAQSFIERMTNFDKNLPNEKVLPKHSLLYEYFTVYNELTKVKYVTEGMRKPAFLSGEQKKAIVDLLFKTNRKVTVKQLKEDYFKKIECFDSVEISGVEDRFNASLGTYHDLLKIIKDKDFLDNEENEDILEDIVLTLTLFEDREMIEERLKTYAHLFDDKVMKQLKRRRYTGWGRLSRKLINGIRDKQSGKTILDFLKSDGFANRNFMQLIHDDSLTFKEDIQKAQVSGQGDSLHEHIANLAGSPAIKKGILQTVKVVDELVKVMGRHKPENIVIEMARENQTTQKGQKNSRERMKRIEEGIKELGSQILKEHPVENTQLQNEKLYLYYLQNGRDMYVDQELDINRLSDYDVDHIVPQSFLKDDSIDNKVLTRSDKARGKSDNVPSEEVVKKMKNYWRQLLNAKLITQRKFDNLTKAERGGLSELDKAGFIKRQLVETRQITKHVAQILDSRMNTKYDENDKLIREVKVITLKSKLVSDFRKDFQFYKVREINNYHHAHDAYLNAVVGTALIKKYPKLESEFVYGDYKVYDVRKMIAKSEQEIGKATAKYFFYSNIMNFFKTEITLANGEIRKRPLIETNGETGEIVWDKGRDFATVRKVLSMPQVNIVKKTEVQTGGFSKESILPKRNSDKLIARKKDWDPKKYGGFDSPTVAYSVLVVAKVEKGKSKKLKSVKELLGITIMERSSFEKNPIDFLEAKGYKEVKKDLIIKLPKYSLFELENGRKRMLASAGELQKGNELALPSKYVNFLYLASHYEKLKGSPEDNEQKQLFVEQHKHYLDEIIEQISEFSKRVILADANLDKVLSAYNKHRDKPIREQAENIIHLFTLTNLGAPAAFKYFDTTIDRKRYTSTKEVLDATLIHQSITGLYETRIDLSQLGGDGGSGGSSGGSSGSETPGTSESATPESSGGSSGGSSGGLGIEDEYRLHETSTEPDVSLGSTWLSDFPQAWAETGGMGLAVRQAPLIIPLKATSTPVSIQQYPMSHEARLGIKPHIQRLLDQGILVPCQSPWNTPLLPVKKPGTNDYRPVQDLREVNKRVEDIHPTVPNPYNLLSGLPPSHQWYTVLDLKDAFFCLRLHPTSQPLFAFEWRDPGMGISGQLTWTRLPQGFKNSPTLFNEALHRDLADFRIQHPDLILLQYVDDILLAATSELDCQQGTRALLQTLGDLGYRASAKKAQICQKQVKYLGYLLREGQRWLTEARKETVMGQPVPKTPRQLREFLGKAGFCRLFIPGFAEMAAPLYPLTKPGTLFSWGPDQQKAYQEIKQALLTAPALGLPDLTKPFELFVDEKQGYAKGVLTQKLGPWRRPVAYLSKKLDPVAAGWPPCLRMVAAIAVLTKDAGKLTMGQPLVILAPHAVEALVKQPPDRWLSNARMTHYQAMLLDTDRVQFGPVVALNPATLLPLPEEGAPHDCLEILAETHGTRPDLTDQPIPDADHTWYTDGSSFLQEGQRKAGAAVTTETEVIWAGALPAGTSAQRAELIALTQALKMAEGKRLNVYTDSRYAFATAHIHGEIYRRRGWLTSEGREIKNKSEILALLKALFLPKRLSIIHCLGHQKGDSAEARGNRLADQAAREAAIKTPPDTSTLLIAGKRTADGSEFEKRTADGSEFESPKKKAKVE

SEQ ID NO: 2182 - protein, 2096 aa, synthetic construct
  source 1..2096: note = Description of Artificial Sequence: Synthetic polypeptide
MPAAKRVKLDGGDKKYSIGLDIGTNSVGWAVITDEYKVPSKKFKVLGNTDRHSIKKNLIGALLFDSGETAEATRLKRTARRRYTRRKNRICYLQEIFSNEMAKVDDSFFHRLEESFLVEEDKKHERHPIFGNIVDEVAYHEKYPTIYHLRKKLVDSTDKADLRLIYLALAHMIKFRGHFLIEGDLNPDNSDVDKLFIQLVQTYNQLFEENPINASGVDAKAILSARLSKSRRLENLIAQLPGEKKNGLFGNLIALSLGLTPNFKSNFDLAEDAKLQLSKDTYDDDLDNLLAQIGDQYADLFLAAKNLSDAILLSDILRVNTEITKAPLSASMIKRYDEHHQDLTLLKALVRQQLPEKYKEIFFDQSKNGYAGYIDGGASQEEFYKFIKPILEKMDGTEELLVKLNREDLLRKQRTFDNGSIPHQIHLGELHAILRRQEDFYPFLKDNREKIEKILTFRIPYYVGPLARGNSRFAWMTRKSEETITPWNFEEVVDKGASAQSFIERMTNFDKNLPNEKVLPKHSLLYEYFTVYNELTKVKYVTEGMRKPAFLSGEQKKAIVDLLFKTNRKVTVKQLKEDYFKKIECFDSVEISGVEDRFNASLGTYHDLLKIIKDKDFLDNEENEDILEDIVLTLTLFEDREMIEERLKTYAHLFDDKVMKQLKRRRYTGWGRLSRKLINGIRDKQSGKTILDFLKSDGFANRNFMQLIHDDSLTFKEDIQKAQVSGQGDSLHEHIANLAGSPAIKKGILQTVKVVDELVKVMGRHKPENIVIEMARENQTTQKGQKNSRERMKRIEEGIKELGSQILKEHPVENTQLQNEKLYLYYLQNGRDMYVDQELDINRLSDYDVDHIVPQSFLKDDSIDNKVLTRSDKARGKSDNVPSEEVVKKMKNYWRQLLNAKLITQRKFDNLTKAERGGLSELDKAGFIKRQLVETRQITKHVAQILDSRMNTKYDENDKLIREVKVITLKSKLVSDFRKDFQFYKVREINNYHHAHDAYLNAVVGTALIKKYPKLESEFVYGDYKVYDVRKMIAKSEQEIGKATAKYFFYSNIMNFFKTEITLANGEIRKRPLIETNGETGEIVWDKGRDFATVRKVLSMPQVNIVKKTEVQTGGFSKESILPKRNSDKLIARKKDWDPKKYGGFDSPTVAYSVLVVAKVEKGKSKKLKSVKELLGITIMERSSFEKNPIDFLEAKGYKEVKKDLIIKLPKYSLFELENGRKRMLASAGELQKGNELALPSKYVNFLYLASHYEKLKGSPEDNEQKQLFVEQHKHYLDEIIEQISEFSKRVILADANLDKVLSAYNKHRDKPIREQAENIIHLFTLTNLGAPAAFKYFDTTIDRKRYTSTKEVLDATLIHQSITGLYETRIDLSQLGGDGGGSSGGGEAAAKGGTLGIEDEYRLHETSTEPDVSLGSTWLSDFPQAWAETGGMGLAVRQAPLIIPLKATSTPVSIQQYPMSHEARLGIKPHIQRLLDQGILVPCQSPWNTPLLPVKKPGTNDYRPVQDLREVNKRVEDIHPTVPNPYNLLSGLPPSHQWYTVLDLKDAFFCLRLHPTSQPLFAFEWRDPGMGISGQLTWTRLPQGFKNSPTLFDEALHRDLADFRIQHPDLILLQYVDDILLAATSELDCQQGTRALLQTLGDLGYRASAKKAQICQKQVKYLGYLLREGQRWLTEARKETVMGQPVPKTPRQLREFLGTAGFCRLWIPGFAEMAAPLYPLTKTGTLFSWGPDQQKAYQEIKQALLTAPALGLPDLTKPFELFVDEKQGYAKGVLTQKLGPWRRPVAYLSKKLDPVAAGWPPCLRMVAAIAVLTKDAGKLTMGQPLVILAPHAVEALVKQPPDRWLSNARMTHYQAMLLDTDRVQFGPVVALNPATLLPLPEEGAPHDCLEILAETHGTRPDLTDQPIPDADHTWYTDGSSFLQEGQRKAGAAVTTETEVIWAGALPAGTSAQRAELIALTQALKMAEGKRLNVYTDSRYAFATAHIHGEIYRRRGLLTSEGREIKNKSEILALLKALFLPKRLSIIHCLGHQKGDSAEARGNRLADQAAREAAIKTPPDTSTLLAGKRTADGSEFEKRTADGSEFESPKKKAKVE

SEQ ID NO: 2183 - protein, 2091 aa, synthetic construct
  source 1..2091: note = Description of Artificial Sequence: Synthetic polypeptide
MPAAKRVKLDGGDKKYSIGLDIGTNSVGWAVITDEYKVPSKKFKVLGNTDRHSIKKNLIGALLFDSGETAEATRLKRTARRRYTRRKNRICYLQEIFSNEMAKVDDSFFHRLEESFLVEEDKKHERHPIFGNIVDEVAYHEKYPTIYHLRKKLVDSTDKADLRLIYLALAHMIKFRGHFLIEGDLNPDNSDVDKLFIQLVQTYNQLFEENPINASGVDAKAILSARLSKSRRLENLIAQLPGEKKNGLFGNLIALSLGLTPNFKSNFDLAEDAKLQLSKDTYDDDLDNLLAQIGDQYADLFLAAKNLSDAILLSDILRVNTEITKAPLSASMIKRYDEHHQDLTLLKALVRQQLPEKYKEIFFDQSKNGYAGYIDGGASQEEFYKFIKPILEKMDGTEELLVKLNREDLLRKQRTFDNGSIPHQIHLGELHAILRRQEDFYPFLKDNREKIEKILTFRIPYYVGPLARGNSRFAWMTRKSEETITPWNFEEVVDKGASAQSFIERMTNFDKNLPNEKVLPKHSLLYEYFTVYNELTKVKYVTEGMRKPAFLSGEQKKAIVDLLFKTNRKVTVKQLKEDYFKKIECFDSVEISGVEDRFNASLGTYHDLLKIIKDKDFLDNEENEDILEDIVLTLTLFEDREMIEERLKTYAHLFDDKVMKQLKRRRYTGWGRLSRKLINGIRDKQSGKTILDFLKSDGFANRNFMQLIHDDSLTFKEDIQKAQVSGQGDSLHEHIANLAGSPAIKKGILQTVKVVDELVKVMGRHKPENIVIEMARENQTTQKGQKNSRERMKRIEEGIKELGSQILKEHPVENTQLQNEKLYLYYLQNGRDMYVDQELDINRLSDYDVDHIVPQSFLKDDSIDNKVLTRSDKARGKSDNVPSEEVVKKMKNYWRQLLNAKLITQRKFDNLTKAERGGLSELDKAGFIKRQLVETRQITKHVAQILDSRMNTKYDENDKLIREVKVITLKSKLVSDFRKDFQFYKVREINNYHHAHDAYLNAVVGTALIKKYPKLESEFVYGDYKVYDVRKMIAKSEQEIGKATAKYFFYSNIMNFFKTEITLANGEIRKRPLIETNGETGEIVWDKGRDFATVRKVLSMPQVNIVKKTEVQTGGFSKESILPKRNSDKLIARKKDWDPKKYGGFDSPTVAYSVLVVAKVEKGKSKKLKSVKELLGITIMERSSFEKNPIDFLEAKGYKEVKKDLIIKLPKYSLFELENGRKRMLASAGELQKGNELALPSKYVNFLYLASHYEKLKGSPEDNEQKQLFVEQHKHYLDEIIEQISEFSKRVILADANLDKVLSAYNKHRDKPIREQAENIIHLFTLTNLGAPAAFKYFDTTIDRKRYTSTKEVLDATLIHQSITGLYETRIDLSQLGGDGGGSSPAPGGTLGIEDEYRLHETSTEPDVSLGSTWLSDFPQAWAETGGMGLAVRQAPLIIPLKATSTPVSIQQYPMSHEARLGIKPHIQRLLDQGILVPCQSPWNTPLLPVKKPGTNDYRPVQDLREVNKRVEDIHPTVPNPYNLLSGLPPSHQWYTVLDLKDAFFCLRLHPTSQPLFAFEWRDPGMGISGQLTWTRLPQGFKNSPTLFDEALHRDLADFRIQHPDLILLQYVDDILLAATSELDCQQGTRALLQTLGDLGYRASAKKAQICQKQVKYLGYLLREGQRWLTEARKETVMGQPVPKTPRQLREFLGTAGFCRLWIPGFAEMAAPLYPLTKTGTLFSWGPDQQKAYQEIKQALLTAPALGLPDLTKPFELFVDEKQGYAKGVLTQKLGPWRRPVAYLSKKLDPVAAGWPPCLRMVAAIAVLTKDAGKLTMGQPLVILAPHAVEALVKQPPDRWLSNARMTHYQAMLLDTDRVQFGPVVALNPATLLPLPEEGAPHDCLEILAETHGTRPDLTDQPIPDADHTWYTDGSSFLQEGQRKAGAAVTTETEVIWAGALPAGTSAQRAELIALTQALKMAEGKRLNVYTDSRYAFATAHIHGEIYRRRGLLTSEGREIKNKSEILALLKALFLPKRLSIIHCLGHQKGDSAEARGNRLADQAAREAAIKTPPDTSTLLAGKRTADGSEFEKRTADGSEFESPKKKAKVE

SEQ ID NO: 2184 - protein, 2096 aa, synthetic construct
  source 1..2096: note = Description of Artificial Sequence: Synthetic polypeptide
MPAAKRVKLDGGDKKYSIGLDIGTNSVGWAVITDEYKVPSKKFKVLGNTDRHSIKKNLIGALLFDSGETAEATRLKRTARRRYTRRKNRICYLQEIFSNEMAKVDDSFFHRLEESFLVEEDKKHERHPIFGNIVDEVAYHEKYPTIYHLRKKLVDSTDKADLRLIYLALAHMIKFRGHFLIEGDLNPDNSDVDKLFIQLVQTYNQLFEENPINASGVDAKAILSARLSKSRRLENLIAQLPGEKKNGLFGNLIALSLGLTPNFKSNFDLAEDAKLQLSKDTYDDDLDNLLAQIGDQYADLFLAAKNLSDAILLSDILRVNTEITKAPLSASMIKRYDEHHQDLTLLKALVRQQLPEKYKEIFFDQSKNGYAGYIDGGASQEEFYKFIKPILEKMDGTEELLVKLNREDLLRKQRTFDNGSIPHQIHLGELHAILRRQEDFYPFLKDNREKIEKILTFRIPYYVGPLARGNSRFAWMTRKSEETITPWNFEEVVDKGASAQSFIERMTNFDKNLPNEKVLPKHSLLYEYFTVYNELTKVKYVTEGMRKPAFLSGEQKKAIVDLLFKTNRKVTVKQLKEDYFKKIECFDSVEISGVEDRFNASLGTYHDLLKIIKDKDFLDNEENEDILEDIVLTLTLFEDREMIEERLKTYAHLFDDKVMKQLKRRRYTGWGRLSRKLINGIRDKQSGKTILDFLKSDGFANRNFMQLIHDDSLTFKEDIQKAQVSGQGDSLHEHIANLAGSPAIKKGILQTVKVVDELVKVMGRHKPENIVIEMARENQTTQKGQKNSRERMKRIEEGIKELGSQILKEHPVENTQLQNEKLYLYYLQNGRDMYVDQELDINRLSDYDVDHIVPQSFLKDDSIDNKVLTRSDKARGKSDNVPSEEVVKKMKNYWRQLLNAKLITQRKFDNLTKAERGGLSELDKAGFIKRQLVETRQITKHVAQILDSRMNTKYDENDKLIREVKVITLKSKLVSDFRKDFQFYKVREINNYHHAHDAYLNAVVGTALIKKYPKLESEFVYGDYKVYDVRKMIAKSEQEIGKATAKYFFYSNIMNFFKTEITLANGEIRKRPLIETNGETGEIVWDKGRDFATVRKVLSMPQVNIVKKTEVQTGGFSKESILPKRNSDKLIARKKDWDPKKYGGFDSPTVAYSVLVVAKVEKGKSKKLKSVKELLGITIMERSSFEKNPIDFLEAKGYKEVKKDLIIKLPKYSLFELENGRKRMLASAGELQKGNELALPSKYVNFLYLASHYEKLKGSPEDNEQKQLFVEQHKHYLDEIIEQISEFSKRVILADANLDKVLSAYNKHRDKPIREQAENIIHLFTLTNLGAPAAFKYFDTTIDRKRYTSTKEVLDATLIHQSITGLYETRIDLSQLGGDGGGGGEAAAKGGSGGTLGIEDEYRLHETSTEPDVSLGSTWLSDFPQAWAETGGMGLAVRQAPLIIPLKATSTPVSIQQYPMSHEARLGIKPHIQRLLDQGILVPCQSPWNTPLLPVKKPGTNDYRPVQDLREVNKRVEDIHPTVPNPYNLLSGLPPSHQWYTVLDLKDAFFCLRLHPTSQPLFAFEWRDPGMGISGQLTWTRLPQGFKNSPTLFDEALHRDLADFRIQHPDLILLQYVDDILLAATSELDCQQGTRALLQTLGDLGYRASAKKAQICQKQVKYLGYLLREGQRWLTEARKETVMGQPVPKTPRQLREFLGTAGFCRLWIPGFAEMAAPLYPLTKTGTLFSWGPDQQKAYQEIKQALLTAPALGLPDLTKPFELFVDEKQGYAKGVLTQKLGPWRRPVAYLSKKLDPVAAGWPPCLRMVAAIAVLTKDAGKLTMGQPLVILAPHAVEALVKQPPDRWLSNARMTHYQAMLLDTDRVQFGPVVALNPATLLPLPEEGAPHDCLEILAETHGTRPDLTDQPIPDADHTWYTDGSSFLQEGQRKAGAAVTTETEVIWAGALPAGTSAQRAELIALTQALKMAEGKRLNVYTDSRYAFATAHIHGEIYRRRGLLTSEGREIKNKSEILALLKALFLPKRLSIIHCLGHQKGDSAEARGNRLADQAAREAAIKTPPDTSTLLAGKRTADGSEFEKRTADGSEFESPKKKAKVE

SEQ ID NO: 2185 - protein, 2096 aa, synthetic construct
  source 1..2096: note = Description of Artificial Sequence: Synthetic polypeptide
MPAAKRVKLDGGDKKYSIGLDIGTNSVGWAVITDEYKVPSKKFKVLGNTDRHSIKKNLIGALLFDSGETAEATRLKRTARRRYTRRKNRICYLQEIFSNEMAKVDDSFFHRLEESFLVEEDKKHERHPIFGNIVDEVAYHEKYPTIYHLRKKLVDSTDKADLRLIYLALAHMIKFRGHFLIEGDLNPDNSDVDKLFIQLVQTYNQLFEENPINASGVDAKAILSARLSKSRRLENLIAQLPGEKKNGLFGNLIALSLGLTPNFKSNFDLAEDAKLQLSKDTYDDDLDNLLAQIGDQYADLFLAAKNLSDAILLSDILRVNTEITKAPLSASMIKRYDEHHQDLTLLKALVRQQLPEKYKEIFFDQSKNGYAGYIDGGASQEEFYKFIKPILEKMDGTEELLVKLNREDLLRKQRTFDNGSIPHQIHLGELHAILRRQEDFYPFLKDNREKIEKILTFRIPYYVGPLARGNSRFAWMTRKSEETITPWNFEEVVDKGASAQSFIERMTNFDKNLPNEKVLPKHSLLYEYFTVYNELTKVKYVTEGMRKPAFLSGEQKKAIVDLLFKTNRKVTVKQLKEDYFKKIECFDSVEISGVEDRFNASLGTYHDLLKIIKDKDFLDNEENEDILEDIVLTLTLFEDREMIEERLKTYAHLFDDKVMKQLKRRRYTGWGRLSRKLINGIRDKQSGKTILDFLKSDGFANRNFMQLIHDDSLTFKEDIQKAQVSGQGDSLHEHIANLAGSPAIKKGILQTVKVVDELVKVMGRHKPENIVIEMARENQTTQKGQKNSRERMKRIEEGIKELGSQILKEHPVENTQLQNEKLYLYYLQNGRDMYVDQELDINRLSDYDVDHIVPQSFLKDDSIDNKVLTRSDKARGKSDNVPSEEVVKKMKNYWRQLLNAKLITQRKFDNLTKAERGGLSELDKAGFIKRQLVETRQITKHVAQILDSRMNTKYDENDKLIREVKVITLKSKLVSDFRKDFQFYKVREINNYHHAHDAYLNAVVGTALIKKYPKLESEFVYGDYKVYDVRKMIAKSEQEIGKATAKYFFYSNIMNFFKTEITLANGEIRKRPLIETNGETGEIVWDKGRDFATVRKVLSMPQVNIVKKTEVQTGGFSKESILPKRNSDKLIARKKDWDPKKYGGFDSPTVAYSVLVVAKVEKGKSKKLKSVKELLGITIMERSSFEKNPIDFLEAKGYKEVKKDLIIKLPKYSLFELENGRKRMLASAGELQKGNELALPSKYVNFLYLASHYEKLKGSPEDNEQKQLFVEQHKHYLDEIIEQISEFSKRVILADANLDKVLSAYNKHRDKPIREQAENIIHLFTLTNLGAPAAFKYFDTTIDRKRYTSTKEVLDATLIHQSITGLYETRIDLSQLGGDGGEAAAKPAPGSSGGTLGIEDEYRLHETSTEPDVSLGSTWLSDFPQAWAETGGMGLAVRQAPLIIPLKATSTPVSIQQYPMSHEARLGIKPHIQRLLDQGILVPCQSPWNTPLLPVKKPGTNDYRPVQDLREVNKRVEDIHPTVPNPYNLLSGLPPSHQWYTVLDLKDAFFCLRLHPTSQPLFAFEWRDPGMGISGQLTWTRLPQGFKNSPTLFDEALHRDLADFRIQHPDLILLQYVDDILLAATSELDCQQGTRALLQTLGDLGYRASAKKAQICQKQVKYLGYLLREGQRWLTEARKETVMGQPVPKTPRQLREFLGTAGFCRLWIPGFAEMAAPLYPLTKTGTLFSWGPDQQKAYQEIKQALLTAPALGLPDLTKPFELFVDEKQGYAKGVLTQKLGPWRRPVAYLSKKLDPVAAGWPPCLRMVAAIAVLTKDAGKLTMGQPLVILAPHAVEALVKQPPDRWLSNARMTHYQAMLLDTDRVQFGPVVALNPATLLPLPEEGAPHDCLEILAETHGTRPDLTDQPIPDADHTWYTDGSSFLQEGQRKAGAAVTTETEVIWAGALPAGTSAQRAELIALTQALKMAEGKRLNVYTDSRYAFATAHIHGEIYRRRGLLTSEGREIKNKSEILALLKALFLPKRLSIIHCLGHQKGDSAEARGNRLADQAAREAAIKTPPDTSTLLAGKRTADGSEFEKRTADGSEFESPKKKAKVE

SEQ ID NO: 2186 - protein, 2096 aa, synthetic construct; identical to SEQ ID NO: 2069
  source 1..2096: note = Description of Artificial Sequence: Synthetic polypeptide

SEQ ID NO: 2187 - protein, 2096 aa, synthetic construct
  source 1..2096: note = Description of Artificial Sequence: Synthetic polypeptide
MPAAKRVKLDGGDKKYSIGLDIGTNSVGWAVITDEYKVPSKKFKVLGNTDRHSIKKNLIGALLFDSGETAEATRLKRTARRRYTRRKNRICYLQEIFSNEMAKVDDSFFHRLEESFLVEEDKKHERHPIFGNIVDEVAYHEKYPTIYHLRKKLVDSTDKADLRLIYLALAHMIKFRGHFLIEGDLNPDNSDVDKLFIQLVQTYNQLFEENPINASGVDAKAILSARLSKSRRLENLIAQLPGEKKNGLFGNLIALSLGLTPNFKSNFDLAEDAKLQLSKDTYDDDLDNLLAQIGDQYADLFLAAKNLSDAILLSDILRVNTEITKAPLSASMIKRYDEHHQDLTLLKALVRQQLPEKYKEIFFDQSKNGYAGYIDGGASQEEFYKFIKPILEKMDGTEELLVKLNREDLLRKQRTFDNGSIPHQIHLGELHAILRRQEDFYPFLKDNREKIEKILTFRIPYYVGPLARGNSRFAWMTRKSEETITPWNFEEVVDKGASAQSFIERMTNFDKNLPNEKVLPKHSLLYEYFTVYNELTKVKYVTEGMRKPAFLSGEQKKAIVDLLFKTNRKVTVKQLKEDYFKKIECFDSVEISGVEDRFNASLGTYHDLLKIIKDKDFLDNEENEDILEDIVLTLTLFEDREMIEERLKTYAHLFDDKVMKQLKRRRYTGWGRLSRKLINGIRDKQSGKTILDFLKSDGFANRNFMQLIHDDSLTFKEDIQKAQVSGQGDSLHEHIANLAGSPAIKKGILQTVKVVDELVKVMGRHKPENIVIEMARENQTTQKGQKNSRERMKRIEEGIKELGSQILKEHPVENTQLQNEKLYLYYLQNGRDMYVDQELDINRLSDYDVDHIVPQSFLKDDSIDNKVLTRSDKARGKSDNVPSEEVVKKMKNYWRQLLNAKLITQRKFDNLTKAERGGLSELDKAGFIKRQLVETRQITKHVAQILDSRMNTKYDENDKLIREVKVITLKSKLVSDFRKDFQFYKVREINNYHHAHDAYLNAVVGTALIKKYPKLESEFVYGDYKVYDVRKMIAKSEQEIGKATAKYFFYSNIMNFFKTEITLANGEIRKRPLIETNGETGEIVWDKGRDFATVRKVLSMPQVNIVKKTEVQTGGFSKESILPKRNSDKLIARKKDWDPKKYGGFDSPTVAYSVLVVAKVEKGKSKKLKSVKELLGITIMERSSFEKNPIDFLEAKGYKEVKKDLIIKLPKYSLFELENGRKRMLASAGELQKGNELALPSKYVNFLYLASHYEKLKGSPEDNEQKQLFVEQHKHYLDEIIEQISEFSKRVILADANLDKVLSAYNKHRDKPIREQAENIIHLFTLTNLGAPAAFKYFDTTIDRKRYTSTKEVLDATLIHQSITGLYETRIDLSQLGGDGGPAPAPAPAPAPGGTLGIEDEYRLHETSTEPDVSLGSTWLSDFPQAWAETGGMGLAVRQAPLIIPLKATSTPVSIQQYPMSHEARLGIKPHIQRLLDQGILVPCQSPWNTPLLPVKKPGTNDYRPVQDLREVNKRVEDIHPTVPNPYNLLSGLPPSHQWYTVLDLKDAFFCLRLHPTSQPLFAFEWRDPGMGISGQLTWTRLPQGFKNSPTLFNEALHRDLADFRIQHPDLILLQYVDDILLAATSELDCQQGTRALLQTLGDLGYRASAKKAQICQKQVKYLGYLLREGQRWLTEARKETVMGQPVPKTPRQLREFLGTAGFCRLWIPGFAEMAAPLYPLTKPGTLFSWGPDQQKAYQEIKQALLTAPALGLPDLTKPFELFVDEKQGYAKGVLTQKLGPWRRPVAYLSKKLDPVAAGWPPCLRMVAAIAVLTKDAGKLTMGQPLVILAPHAVEALVKQPPDRWLSNARMTHYQAMLLDTDRVQFGPVVALNPATLLPLPEEGAPHDCLEILAETHGTRPDLTDQPIPDADHTWYTDGSSFLQEGQRKAGAAVTTETEVIWAGALPAGTSAQRAELIALTQALKMAEGKRLNVYTDSRYAFATAHIHGEIYRRRGWLTSEGREIKNKSEILALLKALFLPKRLSIIHCLGHQKGDSAEARGNRLADQAAREAAIKTPPDTSTLLAGKRTADGSEFEKRTADGSEFESPKKKAKVE

SEQ ID NO: 2188 - protein, 2110 aa, synthetic construct
  source 1..2110: note = Description of Artificial Sequence: Synthetic polypeptide
MPAAKRVKLDGGDKKYSIGLDIGTNSVGWAVITDEYKVPSKKFKVLGNTDRHSIKKNLIGALLFDSGETAEATRLKRTARRRYTRRKNRICYLQEIFSNEMAKVDDSFFHRLEESFLVEEDKKHERHPIFGNIVDEVAYHEKYPTIYHLRKKLVDSTDKADLRLIYLALAHMIKFRGHFLIEGDLNPDNSDVDKLFIQLVQTYNQLFEENPINASGVDAKAILSARLSKSRRLENLIAQLPGEKKNGLFGNLIALSLGLTPNFKSNFDLAEDAKLQLSKDTYDDDLDNLLAQIGDQYADLFLAAKNLSDAILLSDILRVNTEITKAPLSASMIKRYDEHHQDLTLLKALVRQQLPEKYKEIFFDQSKNGYAGYIDGGASQEEFYKFIKPILEKMDGTEELLVKLNREDLLRKQRTFDNGSIPHQIHLGELHAILRRQEDFYPFLKDNREKIEKILTFRIPYYVGPLARGNSRFAWMTRKSEETITPWNFEEVVDKGASAQSFIERMTNFDKNLPNEKVLPKHSLLYEYFTVYNELTKVKYVTEGMRKPAFLSGEQKKAIVDLLFKTNRKVTVKQLKEDYFKKIECFDSVEISGVEDRFNASLGTYHDLLKIIKDKDFLDNEENEDILEDIVLTLTLFEDREMIEERLKTYAHLFDDKVMKQLKRRRYTGWGRLSRKLINGIRDKQSGKTILDFLKSDGFANRNFMQLIHDDSLTFKEDIQKAQVSGQGDSLHEHIANLAGSPAIKKGILQTVKVVDELVKVMGRHKPENIVIEMARENQTTQKGQKNSRERMKRIEEGIKELGSQILKEHPVENTQLQNEKLYLYYLQNGRDMYVDQELDINRLSDYDVDHIVPQSFLKDDSIDNKVLTRSDKARGKSDNVPSEEVVKKMKNYWRQLLNAKLITQRKFDNLTKAERGGLSELDKAGFIKRQLVETRQITKHVAQILDSRMNTKYDENDKLIREVKVITLKSKLVSDFRKDFQFYKVREINNYHHAHDAYLNAVVGTALIKKYPKLESEFVYGDYKVYDVRKMIAKSEQEIGKATAKYFFYSNIMNFFKTEITLANGEIRKRPLIETNGETGEIVWDKGRDFATVRKVLSMPQVNIVKKTEVQTGGFSKESILPKRNSDKLIARKKDWDPKKYGGFDSPTVAYSVLVVAKVEKGKSKKLKSVKELLGITIMERSSFEKNPIDFLEAKGYKEVKKDLIIKLPKYSLFELENGRKRMLASAGELQKGNELALPSKYVNFLYLASHYEKLKGSPEDNEQKQLFVEQHKHYLDEIIEQISEFSKRVILADANLDKVLSAYNKHRDKPIREQAENIIHLFTLTNLGAPAAFKYFDTTIDRKRYTSTKEVLDATLIHQSITGLYETRIDLSQLGGDGGEAAAKEAAAKEAAAKEAAAKEAAAKGGTLGIEDEYRLHETSTEPDVSLGSTWLSDFPQAWAETGGMGLAVRQAPLIIPLKATSTPVSIQQYPMSHEARLGIKPHIQRLLDQGILVPCQSPWNTPLLPVKKPGTNDYRPVQDLREVNKRVEDIHPTVPNPYNLLSGLPPSHQWYTVLDLKDAFFCLRLHPTSQPLFAFEWRDPGMGISGQLTWTRLPQGFKNSPTLFNEALHRDLADFRIQHPDLILLQYVDDILLAATSELDCQQGTRALLQTLGDLGYRASAKKAQICQKQVKYLGYLLREGQRWLTEARKETVMGQPVPKTPRQLREFLGTAGFCRLWIPGFAEMAAPLYPLTKPGTLFSWGPDQQKAYQEIKQALLTAPALGLPDLTKPFELFVDEKQGYAKGVLTQKLGPWRRPVAYLSKKLDPVAAGWPPCLRMVAAIAVLTKDAGKLTMGQPLVILAPHAVEALVKQPPDRWLSNARMTHYQAMLLDTDRVQFGPVVALNPATLLPLPEEGAPHDCLEILAETHGTRPDLTDQPIPDADHTWYTDGSSFLQEGQRKAGAAVTTETEVIWAGALPAGTSAQRAELIALTQALKMAEGKRLNVYTDSRYAFATAHIHGEIYRRRGWLTSEGREIKNKSEILALLKALFLPKRLSIIHCLGHQKGDSAEARGNRLADQAAREAAIKTPPDTSTLLAGKRTADGSEFEKRTADGSEFESPKKKAKVE

SEQ ID NO: 2189 - protein, 2115 aa, synthetic construct
  source 1..2115: note = Description of Artificial Sequence: Synthetic polypeptide
MPAAKRVKLDGGDKKYSIGLDIGTNSVGWAVITDEYKVPSKKFKVLGNTDRHSIKKNLIGALLFDSGETAEATRLKRTARRRYTRRKNRICYLQEIFSNEMAKVDDSFFHRLEESFLVEEDKKHERHPIFGNIVDEVAYHEKYPTIYHLRKKLVDSTDKADLRLIYLALAHMIKFRGHFLIEGDLNPDNSDVDKLFIQLVQTYNQLFEENPINASGVDAKAILSARLSKSRRLENLIAQLPGEKKNGLFGNLIALSLGLTPNFKSNFDLAEDAKLQLSKDTYDDDLDNLLAQIGDQYADLFLAAKNLSDAILLSDILRVNTEITKAPLSASMIKRYDEHHQDLTLLKALVRQQLPEKYKEIFFDQSKNGYAGYIDGGASQEEFYKFIKPILEKMDGTEELLVKLNREDLLRKQRTFDNGSIPHQIHLGELHAILRRQEDFYPFLKDNREKIEKILTFRIPYYVGPLARGNSRFAWMTRKSEETITPWNFEEVVDKGASAQSFIERMTNFDKNLPNEKVLPKHSLLYEYFTVYNELTKVKYVTEGMRKPAFLSGEQKKAIVDLLFKTNRKVTVKQLKEDYFKKIECFDSVEISGVEDRFNASLGTYHDLLKIIKDKDFLDNEENEDILEDIVLTLTLFEDREMIEERLKTYAHLFDDKVMKQLKRRRYTGWGRLSRKLINGIRDKQSGKTILDFLKSDGFANRNFMQLIHDDSLTFKEDIQKAQVSGQGDSLHEHIANLAGSPAIKKGILQTVKVVDELVKVMGRHKPENIVIEMARENQTTQKGQKNSRERMKRIEEGIKELGSQILKEHPVENTQLQNEKLYLYYLQNGRDMYVDQELDINRLSDYDVDHIVPQSFLKDDSIDNKVLTRSDKARGKSDNVPSEEVVKKMKNYWRQLLNAKLITQRKFDNLTKAERGGLSELDKAGFIKRQLVETRQITKHVAQILDSRMNTKYDENDKLIREVKVITLKSKLVSDFRKDFQFYKVREINNYHHAHDAYLNAVVGTALIKKYPKLESEFVYGDYKVYDVRKMIAKSEQEIGKATAKYFFYSNIMNFFKTEITLANGEIRKRPLIETNGETGEIVWDKGRDFATVRKVLSMPQVNIVKKTEVQTGGFSKESILPKRNSDKLIARKKDWDPKKYGGFDSPTVAYSVLVVAKVEKGKSKKLKSVKELLGITIMERSSFEKNPIDFLEAKGYKEVKKDLIIKLPKYSLFELENGRKRMLASAGELQKGNELALPSKYVNFLYLASHYEKLKGSPEDNEQKQLFVEQHKHYLDEIIEQISEFSKRVILADANLDKVLSAYNKHRDKPIREQAENIIHLFTLTNLGAPAAFKYFDTTIDRKRYTSTKEVLDATLIHQSITGLYETRIDLSQLGGDGGEAAAKEAAAKEAAAKEAAAKEAAAKEAAAKGGTLGIEDEYRLHETSTEPDVSLGSTWLSDFPQAWAETGGMGLAVRQAPLIIPLKATSTPVSIQQYPMSHEARLGIKPHIQRLLDQGILVPCQSPWNTPLLPVKKPGTNDYRPVQDLREVNKRVEDIHPTVPNPYNLLSGLPPSHQWYTVLDLKDAFFCLRLHPTSQPLFAFEWRDPGMGISGQLTWTRLPQGFKNSPTLFNEALHRDLADFRIQHPDLILLQYVDDILLAATSELDCQQGTRALLQTLGDLGYRASAKKAQICQKQVKYLGYLLREGQRWLTEARKETVMGQPVPKTPRQLREFLGTAGFCRLWIPGFAEMAAPLYPLTKPGTLFSWGPDQQKAYQEIKQALLTAPALGLPDLTKPFELFVDEKQGYAKGVLTQKLGPWRRPVAYLSKKLDPVAAGWPPCLRMVAAIAVLTKDAGKLTMGQPLVILAPHAVEALVKQPPDRWLSNARMTHYQAMLLDTDRVQFGPVVALNPATLLPLPEEGAPHDCLEILAETHGTRPDLTDQPIPDADHTWYTDGSSFLQEGQRKAGAAVTTETEVIWAGALPAGTSAQRAELIALTQALKMAEGKRLNVYTDSRYAFATAHIHGEIYRRRGWLTSEGREIKNKSEILALLKALFLPKRLSIIHCLGHQKGDSAEARGNRLADQAAREAAIKTPPDTSTLLAGKRTADGSEFEKRTADGSEFESPKKKAKVE

SEQ ID NO: 2190 - protein, 2096 aa, synthetic construct
  source 1..2096: note = Description of Artificial Sequence: Synthetic polypeptide
MPAAKRVKLDGGDKKYSIGLDIGTNSVGWAVITDEYKVPSKKFKVLGNTDRHSIKKNLIGALLFDSGETAEATRLKRTARRRYTRRKNRICYLQEIFSNEMAKVDDSFFHRLEESFLVEEDKKHERHPIFGNIVDEVAYHEKYPTIYHLRKKLVDSTDKADLRLIYLALAHMIKFRGHFLIEGDLNPDNSDVDKLFIQLVQTYNQLFEENPINASGVDAKAILSARLSKSRRLENLIAQLPGEKKNGLFGNLIALSLGLTPNFKSNFDLAEDAKLQLSKDTYDDDLDNLLAQIGDQYADLFLAAKNLSDAILLSDILRVNTEITKAPLSASMIKRYDEHHQDLTLLKALVRQQLPEKYKEIFFDQSKNGYAGYIDGGASQEEFYKFIKPILEKMDGTEELLVKLNREDLLRKQRTFDNGSIPHQIHLGELHAILRRQEDFYPFLKDNREKIEKILTFRIPYYVGPLARGNSRFAWMTRKSEETITPWNFEEVVDKGASAQSFIERMTNFDKNLPNEKVLPKHSLLYEYFTVYNELTKVKYVTEGMRKPAFLSGEQKKAIVDLLFKTNRKVTVKQLKEDYFKKIECFDSVEISGVEDRFNASLGTYHDLLKIIKDKDFLDNEENEDILEDIVLTLTLFEDREMIEERLKTYAHLFDDKVMKQLKRRRYTGWGRLSRKLINGIRDKQSGKTILDFLKSDGFANRNFMQLIHDDSLTFKEDIQKAQVSGQGDSLHEHIANLAGSPAIKKGILQTVKVVDELVKVMGRHKPENIVIEMARENQTTQKGQKNSRERMKRIEEGIKELGSQILKEHPVENTQLQNEKLYLYYLQNGRDMYVDQELDINRLSDYDVDHIVPQSFLKDDSIDNKVLTRSDKARGKSDNVPSEEVVKKMKNYWRQLLNAKLITQRKFDNLTKAERGGLSELDKAGFIKRQLVETRQITKHVAQILDSRMNTKYDENDKLIREVKVITLKSKLVSDFRKDFQFYKVREINNYHHAHDAYLNAVVGTALIKKYPKLESEFVYGDYKVYDVRKMIAKSEQEIGKATAKYFFYSNIMNFFKTEITLANGEIRKRPLIETNGETGEIVWDKGRDFATVRKVLSMPQVNIVKKTEVQTGGFSKESILPKRNSDKLIARKKDWDPKKYGGFDSPTVAYSVLVVAKVEKGKSKKLKSVKELLGITIMERSSFEKNPIDFLEAKGYKEVKKDLIIKLPKYSLFELENGRKRMLASAGELQKGNELALPSKYVNFLYLASHYEKLKGSPEDNEQKQLFVEQHKHYLDEIIEQISEFSKRVILADANLDKVLSAYNKHRDKPIREQAENIIHLFTLTNLGAPAAFKYFDTTIDRKRYTSTKEVLDATLIHQSITGLYETRIDLSQLGGDGGEAAAKGSSGGSGGTLGIEDEYRLHETSTEPDVSLGSTWLSDFPQAWAETGGMGLAVRQAPLIIPLKATSTPVSIQQYPMSHEARLGIKPHIQRLLDQGILVPCQSPWNTPLLPVKKPGTNDYRPVQDLREVNKRVEDIHPTVPNPYNLLSGLPPSHQWYTVLDLKDAFFCLRLHPTSQPLFAFEWRDPGMGISGQLTWTRLPQGFKNSPTLFNEALHRDLADFRIQHPDLILLQYVDDILLAATSELDCQQGTRALLQTLGDLGYRASAKKAQICQKQVKYLGYLLREGQRWLTEARKETVMGQPVPKTPRQLREFLGTAGFCRLWIPGFAEMAAPLYPLTKPGTLFSWGPDQQKAYQEIKQALLTAPALGLPDLTKPFELFVDEKQGYAKGVLTQKLGPWRRPVAYLSKKLDPVAAGWPPCLRMVAAIAVLTKDAGKLTMGQPLVILAPHAVEALVKQPPDRWLSNARMTHYQAMLLDTDRVQFGPVVALNPATLLPLPEEGAPHDCLEILAETHGTRPDLTDQPIPDADHTWYTDGSSFLQEGQRKAGAAVTTETEVIWAGALPAGTSAQRAELIALTQALKMAEGKRLNVYTDSRYAFATAHIHGEIYRRRGWLTSEGREIKNKSEILALLKALFLPKRLSIIHCLGHQKGDSAEARGNRLADQAAREAAIKTPPDTSTLLAGKRTADGSEFEKRTADGSEFESPKKKAKVE

SEQ ID NO: 2191 - protein, 2105 aa, synthetic construct; identical to SEQ ID NO: 2070
  source 1..2105: note = Description of Artificial Sequence: Synthetic polypeptide

SEQ ID NO: 2192 - protein, 2096 aa, synthetic construct
  source 1..2096: note = Description of Artificial Sequence: Synthetic polypeptide
MPAAKRVKLDGGDKKYSIGLDIGTNSVGWAVITDEYKVPSKKFKVLGNTDRHSIKKNLIGALLFDSGETAEATRLKRTARRRYTRRKNRICYLQEIFSNEMAKVDDSFFHRLEESFLVEEDKKHERHPIFGNIVDEVAYHEKYPTIYHLRKKLVDSTDKADLRLIYLALAHMIKFRGHFLIEGDLNPDNSDVDKLFIQLVQTYNQLFEENPINASGVDAKAILSARLSKSRRLENLIAQLPGEKKNGLFGNLIALSLGLTPNFKSNFDLAEDAKLQLSKDTYDDDLDNLLAQIGDQYADLFLAAKNLSDAILLSDILRVNTEITKAPLSASMIKRYDEHHQDLTLLKALVRQQLPEKYKEIFFDQSKNGYAGYIDGGASQEEFYKFIKPILEKMDGTEELLVKLNREDLLRKQRTFDNGSIPHQIHLGELHAILRRQEDFYPFLKDNREKIEKILTFRIPYYVGPLARGNSRFAWMTRKSEETITPWNFEEVVDKGASAQSFIERMTNFDKNLPNEKVLPKHSLLYEYFTVYNELTKVKYVTEGMRKPAFLSGEQKKAIVDLLFKTNRKVTVKQLKEDYFKKIECFDSVEISGVEDRFNASLGTYHDLLKIIKDKDFLDNEENEDILEDIVLTLTLFEDREMIEERLKTYAHLFDDKVMKQLKRRRYTGWGRLSRKLINGIRDKQSGKTILDFLKSDGFANRNFMQLIHDDSLTFKEDIQKAQVSGQGDSLHEHIANLAGSPAIKKGILQTVKVVDELVKVMGRHKPENIVIEMARENQTTQKGQKNSRERMKRIEEGIKELGSQILKEHPVENTQLQNEKLYLYYLQNGRDMYVDQELDINRLSDYDVDHIVPQSFLKDDSIDNKVLTRSDKARGKSDNVPSEEVVKKMKNYWRQLLNAKLITQRKFDNLTKAERGGLSELDKAGFIKRQLVETRQITKHVAQILDSRMNTKYDENDKLIREVKVITLKSKLVSDFRKDFQFYKVREINNYHHAHDAYLNAVVGTALIKKYPKLESEFVYGDYKVYDVRKMIAKSEQEIGKATAKYFFYSNIMNFFKTEITLANGEIRKRPLIETNGETGEIVWDKGRDFATVRKVLSMPQVNIVKKTEVQTGGFSKESILPKRNSDKLIARKKDWDPKKYGGFDSPTVAYSVLVVAKVEKGKSKKLKSVKELLGITIMERSSFEKNPIDFLEAKGYKEVKKDLIIKLPKYSLFELENGRKRMLASAGELQKGNELALPSKYVNFLYLASHYEKLKGSPEDNEQKQLFVEQHKHYLDEIIEQISEFSKRVILADANLDKVLSAYNKHRDKPIREQAENIIHLFTLTNLGAPAAFKYFDTTIDRKRYTSTKEVLDATLIHQSITGLYETRIDLSQLGGDGGGGSPAPEAAAKGGTLGIEDEYRLHETSTEPDVSLGSTWLSDFPQAWAETGGMGLAVRQAPLIIPLKATSTPVSIQQYPMSHEARLGIKPHIQRLLDQGILVPCQSPWNTPLLPVKKPGTNDYRPVQDLREVNKRVEDIHPTVPNPYNLLSGLPPSHQWYTVLDLKDAFFCLRLHPTSQPLFAFEWRDPGMGISGQLTWTRLPQGFKNSPTLFNEALHRDLADFRIQHPDLILLQYVDDILLAATSELDCQQGTRALLQTLGDLGYRASAKKAQICQKQVKYLGYLLREGQRWLTEARKETVMGQPVPKTPRQLREFLGTAGFCRLWIPGFAEMAAPLYPLTKPGTLFSWGPDQQKAYQEIKQALLTAPALGLPDLTKPFELFVDEKQGYAKGVLTQKLGPWRRPVAYLSKKLDPVAAGWPPCLRMVAAIAVLTKDAGKLTMGQPLVILAPHAVEALVKQPPDRWLSNARMTHYQAMLLDTDRVQFGPVVALNPATLLPLPEEGAPHDCLEILAETHGTRPDLTDQPIPDADHTWYTDGSSFLQEGQRKAGAAVTTETEVIWAGALPAGTSAQRAELIALTQALKMAEGKRLNVYTDSRYAFATAHIHGEIYRRRGWLTSEGREIKNKSEILALLKALFLPKRLSIIHCLGHQKGDSAEARGNRLADQAAREAAIKTPPDTSTLLAGKRTADGSEFEKRTADGSEFESPKKKAKVE

SEQ ID NO: 2193 - protein, 2115 aa, synthetic construct
  source 1..2115: note = Description of Artificial Sequence: Synthetic polypeptide
MPAAKRVKLDGGDKKYSIGLDIGTNSVGWAVITDEYKVPSKKFKVLGNTDRHSIKKNLIGALLFDSGETAEATRLKRTARRRYTRRKNRICYLQEIFSNEMAKVDDSFFHRLEESFLVEEDKKHERHPIFGNIVDEVAYHEKYPTIYHLRKKLVDSTDKADLRLIYLALAHMIKFRGHFLIEGDLNPDNSDVDKLFIQLVQTYNQLFEENPINASGVDAKAILSARLSKSRRLENLIAQLPGEKKNGLFGNLIALSLGLTPNFKSNFDLAEDAKLQLSKDTYDDDLDNLLAQIGDQYADLFLAAKNLSDAILLSDILRVNTEITKAPLSASMIKRYDEHHQDLTLLKALVRQQLPEKYKEIFFDQSKNGYAGYIDGGASQEEFYKFIKPILEKMDGTEELLVKLNREDLLRKQRTFDNGSIPHQIHLGELHAILRRQEDFYPFLKDNREKIEKILTFRIPYYVGPLARGNSRFAWMTRKSEETITPWNFEEVVDKGASAQSFIERMTNFDKNLPNEKVLPKHSLLYEYFTVYNELTKVKYVTEGMRKPAFLSGEQKKAIVDLLFKTNRKVTVKQLKEDYFKKIECFDSVEISGVEDRFNASLGTYHDLLKIIKDKDFLDNEENEDILEDIVLTLTLFEDREMIEERLKTYAHLFDDKVMKQLKRRRYTGWGRLSRKLINGIRDKQSGKTILDFLKSDGFANRNFMQLIHDDSLTFKEDIQKAQVSGQGDSLHEHIANLAGSPAIKKGILQTVKVVDELVKVMGRHKPENIVIEMARENQTTQKGQKNSRERMKRIEEGIKELGSQILKEHPVENTQLQNEKLYLYYLQNGRDMYVDQELDINRLSDYDVDHIVPQSFLKDDSIDNKVLTRSDKARGKSDNVPSEEVVKKMKNYWRQLLNAKLITQRKFDNLTKAERGGLSELDKAGFIKRQLVETRQITKHVAQILDSRMNTKYDENDKLIREVKVITLKSKLVSDFRKDFQFYKVREINNYHHAHDAYLNAVVGTALIKKYPKLESEFVYGDYKVYDVRKMIAKSEQEIGKATAKYFFYSNIMNFFKTEITLANGEIRKRPLIETNGETGEIVWDKGRDFATVRKVLSMPQVNIVKKTEVQTGGFSKESILPKRNSDKLIARKKDWDPKKYGGFDSPTVAYSVLVVAKVEKGKSKKLKSVKELLGITIMERSSFEKNPIDFLEAKGYKEVKKDLIIKLPKYSLFELENGRKRMLASAGELQKGNELALPSKYVNFLYLASHYEKLKGSPEDNEQKQLFVEQHKHYLDEIIEQISEFSKRVILADANLDKVLSAYNKHRDKPIREQAENIIHLFTLTNLGAPAAFKYFDTTIDRKRYTSTKEVLDATLIHQSITGLYETRIDLSQLGGDGGGGGGSGGGGSGGGGSGGGGSGGGGSGGGGSGGTLGIEDEYRLHETSTEPDVSLGSTWLSDFPQAWAETGGMGLAVRQAPLIIPLKATSTPVSIQQYPMSHEARLGIKPHIQRLLDQGILVPCQSPWNTPLLPVKKPGTNDYRPVQDLREVNKRVEDIHPTVPNPYNLLSGLPPSHQWYTVLDLKDAFFCLRLHPTSQPLFAFEWRDPGMGISGQLTWTRLPQGFKNSPTLFNEALHRDLADFRIQHPDLILLQYVDDILLAATSELDCQQGTRALLQTLGDLGYRASAKKAQICQKQVKYLGYLLREGQRWLTEARKETVMGQPVPKTPRQLREFLGTAGFCRLWIPGFAEMAAPLYPLTKPGTLFSWGPDQQKAYQEIKQALLTAPALGLPDLTKPFELFVDEKQGYAKGVLTQKLGPWRRPVAYLSKKLDPVAAGWPPCLRMVAAIAVLTKDAGKLTMGQPLVILAPHAVEALVKQPPDRWLSNARMTHYQAMLLDTDRVQFGPVVALNPATLLPLPEEGAPHDCLEILAETHGTRPDLTDQPIPDADHTWYTDGSSFLQEGQRKAGAAVTTETEVIWAGALPAGTSAQRAELIALTQALKMAEGKRLNVYTDSRYAFATAHIHGEIYRRRGWLTSEGREIKNKSEILALLKALFLPKRLSIIHCLGHQKGDSAEARGNRLADQAAREAAIKTPPDTSTLLAGKRTADGSEFEKRTADGSEFESPKKKAKVE

SEQ ID NO: 2194 - protein, 2131 aa, synthetic construct
  source 1..2131: note = Description of Artificial Sequence: Synthetic polypeptide
MPAAKRVKLDGGDKKYSIGLDIGTNSVGWAVITDEYKVPSKKFKVLGNTDRHSIKKNLIGALLFDSGETAEATRLKRTARRRYTRRKNRICYLQEIFSNEMAKVDDSFFHRLEESFLVEEDKKHERHPIFGNIVDEVAYHEKYPTIYHLRKKLVDSTDKADLRLIYLALAHMIKFRGHFLIEGDLNPDNSDVDKLFIQLVQTYNQLFEENPINASGVDAKAILSARLSKSRRLENLIAQLPGEKKNGLFGNLIALSLGLTPNFKSNFDLAEDAKLQLSKDTYDDDLDNLLAQIGDQYADLFLAAKNLSDAILLSDILRVNTEITKAPLSASMIKRYDEHHQDLTLLKALVRQQLPEKYKEIFFDQSKNGYAGYIDGGASQEEFYKFIKPILEKMDGTEELLVKLNREDLLRKQRTFDNGSIPHQIHLGELHAILRRQEDFYPFLKDNREKIEKILTFRIPYYVGPLARGNSRFAWMTRKSEETITPWNFEEVVDKGASAQSFIERMTNFDKNLPNEKVLPKHSLLYEYFTVYNELTKVKYVTEGMRKPAFLSGEQKKAIVDLLFKTNRKVTVKQLKEDYFKKIECFDSVEISGVEDRFNASLGTYHDLLKIIKDKDFLDNEENEDILEDIVLTLTLFEDREMIEERLKTYAHLFDDKVMKQLKRRRYTGWGRLSRKLINGIRDKQSGKTILDFLKSDGFANRNFMQLIHDDSLTFKEDIQKAQVSGQGDSLHEHIANLAGSPAIKKGILQTVKVVDELVKVMGRHKPENIVIEMARENQTTQKGQKNSRERMKRIEEGIKELGSQILKEHPVENTQLQNEKLYLYYLQNGRDMYVDQELDINRLSDYDVDHIVPQSFLKDDSIDNKVLTRSDKARGKSDNVPSEEVVKKMKNYWRQLLNAKLITQRKFDNLTKAERGGLSELDKAGFIKRQLVETRQITKHVAQILDSRMNTKYDENDKLIREVKVITLKSKLVSDFRKDFQFYKVREINNYHHAHDAYLNAVVGTALIKKYPKLESEFVYGDYKVYDVRKMIAKSEQEIGKATAKYFFYSNIMNFFKTEITLANGEIRKRPLIETNGETGEIVWDKGRDFATVRKVLSMPQVNIVKKTEVQTGGFSKESILPKRNSDKLIARKKDWDPKKYGGFDSPTVAYSVLVVAKVEKGKSKKLKSVKELLGITIMERSSFEKNPIDFLEAKGYKEVKKDLIIKLPKYSLFELENGRKRMLASAGELQKGNELALPSKYVNFLYLASHYEKLKGSPEDNEQKQLFVEQHKHYLDEIIEQISEFSKRVILADANLDKVLSAYNKHRDKPIREQAENIIHLFTLTNLGAPAAFKYFDTTIDRKRYTSTKEVLDATLIHQSITGLYETRIDLSQLGGDGGAEAAAKEAAAKEAAAKEAAAKALEAEAAAKEAAAKEAAAKEAAAKAGGTLGIEDEYRLHETSTEPDVSLGSTWLSDFPQAWAETGGMGLAVRQAPLIIPLKATSTPVSIQQYPMSHEARLGIKPHIQRLLDQGILVPCQSPWNTPLLPVKKPGTNDYRPVQDLREVNKRVEDIHPTVPNPYNLLSGLPPSHQWYTVLDLKDAFFCLRLHPTSQPLFAFEWRDPGMGISGQLTWTRLPQGFKNSPTLFNEALHRDLADFRIQHPDLILLQYVDDILLAATSELDCQQGTRALLQTLGDLGYRASAKKAQICQKQVKYLGYLLREGQRWLTEARKETVMGQPVPKTPRQLREFLGTAGFCRLWIPGFAEMAAPLYPLTKPGTLFSWGPDQQKAYQEIKQALLTAPALGLPDLTKPFELFVDEKQGYAKGVLTQKLGPWRRPVAYLSKKLDPVAAGWPPCLRMVAAIAVLTKDAGKLTMGQPLVILAPHAVEALVKQPPDRWLSNARMTHYQAMLLDTDRVQFGPVVALNPATLLPLPEEGAPHDCLEILAETHGTRPDLTDQPIPDADHTWYTDGSSFLQEGQRKAGAAVTTETEVIWAGALPAGTSAQRAELIALTQALKMAEGKRLNVYTDSRYAFATAHIHGEIYRRRGWLTSEGREIKNKSEILALLKALFLPKRLSIIHCLGHQKGDSAEARGNRLADQAAREAAIKTPPDTSTLLAGKRTADGSEFEKRTADGSEFESPKKKAKVE

SEQ ID NO: 2195 - protein, 2096 aa, synthetic construct; identical to SEQ ID NO: 2076
  source 1..2096: note = Description of Artificial Sequence: Synthetic polypeptide

SEQ ID NO: 2196 - protein, 2096 aa, synthetic construct
  source 1..2096: note = Description of Artificial Sequence: Synthetic polypeptide
MPAAKRVKLDGGDKKYSIGLDIGTNSVGWAVITDEYKVPSKKFKVLGNTDRHSIKKNLIGALLFDSGETAEATRLKRTARRRYTRRKNRICYLQEIFSNEMAKVDDSFFHRLEESFLVEEDKKHERHPIFGNIVDEVAYHEKYPTIYHLRKKLVDSTDKADLRLIYLALAHMIKFRGHFLIEGDLNPDNSDVDKLFIQLVQTYNQLFEENPINASGVDAKAILSARLSKSRRLENLIAQLPGEKKNGLFGNLIALSLGLTPNFKSNFDLAEDAKLQLSKDTYDDDLDNLLAQIGDQYADLFLAAKNLSDAILLSDILRVNTEITKAPLSASMIKRYDEHHQDLTLLKALVRQQLPEKYKEIFFDQSKNGYAGYIDGGASQEEFYKFIKPILEKMDGTEELLVKLNREDLLRKQRTFDNGSIPHQIHLGELHAILRRQEDFYPFLKDNREKIEKILTFRIPYYVGPLARGNSRFAWMTRKSEETITPWNFEEVVDKGASAQSFIERMTNFDKNLPNEKVLPKHSLLYEYFTVYNELTKVKYVTEGMRKPAFLSGEQKKAIVDLLFKTNRKVTVKQLKEDYFKKIECFDSVEISGVEDRFNASLGTYHDLLKIIKDKDFLDNEENEDILEDIVLTLTLFEDREMIEERLKTYAHLFDDKVMKQLKRRRYTGWGRLSRKLINGIRDKQSGKTILDFLKSDGFANRNFMQLIHDDSLTFKEDIQKAQVSGQGDSLHEHIANLAGSPAIKKGILQTVKVVDELVKVMGRHKPENIVIEMARENQTTQKGQKNSRERMKRIEEGIKELGSQILKEHPVENTQLQNEKLYLYYLQNGRDMYVDQELDINRLSDYDVDHIVPQSFLKDDSIDNKVLTRSDKARGKSDNVPSEEVVKKMKNYWRQLLNAKLITQRKFDNLTKAERGGLSELDKAGFIKRQLVETRQITKHVAQILDSRMNTKYDENDKLIREVKVITLKSKLVSDFRKDFQFYKVREINNYHHAHDAYLNAVVGTALIKKYPKLESEFVYGDYKVYDVRKMIAKSEQEIGKATAKYFFYSNIMNFFKTEITLANGEIRKRPLIETNGETGEIVWDKGRDFATVRKVLSMPQVNIVKKTEVQTGGFSKESILPKRNSDKLIARKKDWDPKKYGGFDSPTVAYSVLVVAKVEKGKSKKLKSVKELLGITIMERSSFEKNPIDFLEAKGYKEVKKDLIIKLPKYSLFELENGRKRMLASAGELQKGNELALPSKYVNFLYLASHYEKLKGSPEDNEQKQLFVEQHKHYLDEIIEQISEFSKRVILADANLDKVLSAYNKHRDKPIREQAENIIHLFTLTNLGAPAAFKYFDTTIDRKRYTSTKEVLDATLIHQSITGLYETRIDLSQLGGDGGGGGGSSEAAAKGGTLGIEDEYRLHETSTEPDVSLGSTWLSDFPQAWAETGGMGLAVRQAPLIIPLKATSTPVSIQQYPMSHEARLGIKPHIQRLLDQGILVPCQSPWNTPLLPVKKPGTNDYRPVQDLREVNKRVEDIHPTVPNPYNLLSGLPPSHQWYTVLDLKDAFFCLRLHPTSQPLFAFEWRDPGMGISGQLTWTRLPQGFKNSPTLFNEALHRDLADFRIQHPDLILLQYVDDILLAATSELDCQQGTRALLQTLGDLGYRASAKKAQICQKQVKYLGYLLREGQRWLTEARKETVMGQPVPKTPRQLREFLGTAGFCRLWIPGFAEMAAPLYPLTKPGTLFSWGPDQQKAYQEIKQALLTAPALGLPDLTKPFELFVDEKQGYAKGVLTQKLGPWRRPVAYLSKKLDPVAAGWPPCLRMVAAIAVLTKDAGKLTMGQPLVILAPHAVEALVKQPPDRWLSNARMTHYQAMLLDTDRVQFGPVVALNPATLLPLPEEGAPHDCLEILAETHGTRPDLTDQPIPDADHTWYTDGSSFLQEGQRKAGAAVTTETEVIWAGALPAGTSAQRAELIALTQALKMAEGKRLNVYTDSRYAFATAHIHGEIYRRRGWLTSEGREIKNKSEILALLKALFLPKRLSIIHCLGHQKGDSAEARGNRLADQAAREAAIKTPPDTSTLLAGKRTADGSEFEKRTADGSEFESPKKKAKVE

SEQ ID NO: 2197 - protein, 2096 aa, synthetic construct
  source 1..2096: note = Description of Artificial Sequence: Synthetic polypeptide
MPAAKRVKLDGGDKKYSIGLDIGTNSVGWAVITDEYKVPSKKFKVLGNTDRHSIKKNLIGALLFDSGETAEATRLKRTARRRYTRRKNRICYLQEIFSNEMAKVDDSFFHRLEESFLVEEDKKHERHPIFGNIVDEVAYHEKYPTIYHLRKKLVDSTDKADLRLIYLALAHMIKFRGHFLIEGDLNPDNSDVDKLFIQLVQTYNQLFEENPINASGVDAKAILSARLSKSRRLENLIAQLPGEKKNGLFGNLIALSLGLTPNFKSNFDLAEDAKLQLSKDTYDDDLDNLLAQIGDQYADLFLAAKNLSDAILLSDILRVNTEITKAPLSASMIKRYDEHHQDLTLLKALVRQQLPEKYKEIFFDQSKNGYAGYIDGGASQEEFYKFIKPILEKMDGTEELLVKLNREDLLRKQRTFDNGSIPHQIHLGELHAILRRQEDFYPFLKDNREKIEKILTFRIPYYVGPLARGNSRFAWMTRKSEETITPWNFEEVVDKGASAQSFIERMTNFDKNLPNEKVLPKHSLLYEYFTVYNELTKVKYVTEGMRKPAFLSGEQKKAIVDLLFKTNRKVTVKQLKEDYFKKIECFDSVEISGVEDRFNASLGTYHDLLKIIKDKDFLDNEENEDILEDIVLTLTLFEDREMIEERLKTYAHLFDDKVMKQLKRRRYTGWGRLSRKLINGIRDKQSGKTILDFLKSDGFANRNFMQLIHDDSLTFKEDIQKAQVSGQGDSLHEHIANLAGSPAIKKGILQTVKVVDELVKVMGRHKPENIVIEMARENQTTQKGQKNSRERMKRIEEGIKELGSQILKEHPVENTQLQNEKLYLYYLQNGRDMYVDQELDINRLSDYDVDHIVPQSFLKDDSIDNKVLTRSDKARGKSDNVPSEEVVKKMKNYWRQLLNAKLITQRKFDNLTKAERGGLSELDKAGFIKRQLVETRQITKHVAQILDSRMNTKYDENDKLIREVKVITLKSKLVSDFRKDFQFYKVREINNYHHAHDAYLNAVVGTALIKKYPKLESEFVYGDYKVYDVRKMIAKSEQEIGKATAKYFFYSNIMNFFKTEITLANGEIRKRPLIETNGETGEIVWDKGRDFATVRKVLSMPQVNIVKKTEVQTGGFSKESILPKRNSDKLIARKKDWDPKKYGGFDSPTVAYSVLVVAKVEKGKSKKLKSVKELLGITIMERSSFEKNPIDFLEAKGYKEVKKDLIIKLPKYSLFELENGRKRMLASAGELQKGNELALPSKYVNFLYLASHYEKLKGSPEDNEQKQLFVEQHKHYLDEIIEQISEFSKRVILADANLDKVLSAYNKHRDKPIREQAENIIHLFTLTNLGAPAAFKYFDTTIDRKRYTSTKEVLDATLIHQSITGLYETRIDLSQLGGDGGPAPEAAAKGGGGGTLGIEDEYRLHETSTEPDVSLGSTWLSDFPQAWAETGGMGLAVRQAPLIIPLKATSTPVSIQQYPMSHEARLGIKPHIQRLLDQGILVPCQSPWNTPLLPVKKPGTNDYRPVQDLREVNKRVEDIHPTVPNPYNLLSGLPPSHQWYTVLDLKDAFFCLRLHPTSQPLFAFEWRDPGMGISGQLTWTRLPQGFKNSPTLFNEALHRDLADFRIQHPDLILLQYVDDILLAATSELDCQQGTRALLQTLGDLGYRASAKKAQICQKQVKYLGYLLREGQRWLTEARKETVMGQPVPKTPRQLREFLGTAGFCRLWIPGFAEMAAPLYPLTKPGTLFSWGPDQQKAYQEIKQALLTAPALGLPDLTKPFELFVDEKQGYAKGVLTQKLGPWRRPVAYLSKKLDPVAAGWPPCLRMVAAIAVLTKDAGKLTMGQPLVILAPHAVEALVKQPPDRWLSNARMTHYQAMLLDTDRVQFGPVVALNPATLLPLPEEGAPHDCLEILAETHGTRPDLTDQPIPDADHTWYTDGSSFLQEGQRKAGAAVTTETEVIWAGALPAGTSAQRAELIALTQALKMAEGKRLNVYTDSRYAFATAHIHGEIYRRRGWLTSEGREIKNKSEILALLKALFLPKRLSIIHCLGHQKGDSAEARGNRLADQAAREAAIKTPPDTSTLLAGKRTADGSEFEKRTADGSEFESPKKKAKVE

SEQ ID NO: 2198 - protein, 2090 aa, synthetic construct
  source 1..2090: note = Description of Artificial Sequence: Synthetic polypeptide
MPAAKRVKLDGGDKKYSIGLDIGTNSVGWAVITDEYKVPSKKFKVLGNTDRHSIKKNLIGALLFDSGETAEATRLKRTARRRYTRRKNRICYLQEIFSNEMAKVDDSFFHRLEESFLVEEDKKHERHPIFGNIVDEVAYHEKYPTIYHLRKKLVDSTDKADLRLIYLALAHMIKFRGHFLIEGDLNPDNSDVDKLFIQLVQTYNQLFEENPINASGVDAKAILSARLSKSRRLENLIAQLPGEKKNGLFGNLIALSLGLTPNFKSNFDLAEDAKLQLSKDTYDDDLDNLLAQIGDQYADLFLAAKNLSDAILLSDILRVNTEITKAPLSASMIKRYDEHHQDLTLLKALVRQQLPEKYKEIFFDQSKNGYAGYIDGGASQEEFYKFIKPILEKMDGTEELLVKLNREDLLRKQRTFDNGSIPHQIHLGELHAILRRQEDFYPFLKDNREKIEKILTFRIPYYVGPLARGNSRFAWMTRKSEETITPWNFEEVVDKGASAQSFIERMTNFDKNLPNEKVLPKHSLLYEYFTVYNELTKVKYVTEGMRKPAFLSGEQKKAIVDLLFKTNRKVTVKQLKEDYFKKIECFDSVEISGVEDRFNASLGTYHDLLKIIKDKDFLDNEENEDILEDIVLTLTLFEDREMIEERLKTYAHLFDDKVMKQLKRRRYTGWGRLSRKLINGIRDKQSGKTILDFLKSDGFANRNFMQLIHDDSLTFKEDIQKAQVSGQGDSLHEHIANLAGSPAIKKGILQTVKVVDELVKVMGRHKPENIVIEMARENQTTQKGQKNSRERMKRIEEGIKELGSQILKEHPVENTQLQNEKLYLYYLQNGRDMYVDQELDINRLSDYDVDHIVPQSFLKDDSIDNKVLTRSDKARGKSDNVPSEEVVKKMKNYWRQLLNAKLITQRKFDNLTKAERGGLSELDKAGFIKRQLVETRQITKHVAQILDSRMNTKYDENDKLIREVKVITLKSKLVSDFRKDFQFYKVREINNYHHAHDAYLNAVVGTALIKKYPKLESEFVYGDYKVYDVRKMIAKSEQEIGKATAKYFFYSNIMNFFKTEITLANGEIRKRPLIETNGETGEIVWDKGRDFATVRKVLSMPQVNIVKKTEVQTGGFSKESILPKRNSDKLIARKKDWDPKKYGGFDSPTVAYSVLVVAKVEKGKSKKLKSVKELLGITIMERSSFEKNPIDFLEAKGYKEVKKDLIIKLPKYSLFELENGRKRMLASAGELQKGNELALPSKYVNFLYLASHYEKLKGSPEDNEQKQLFVEQHKHYLDEIIEQISEFSKRVILADANLDKVLSAYNKHRDKPIREQAENIIHLFTLTNLGAPAAFKYFDTTIDRKRYTSTKEVLDATLIHQSITGLYETRIDLSQLGGDGGEAAAKGGTLGIEDEYRLHETSTEPDVSLGSTWLSDFPQAWAETGGMGLAVRQAPLIIPLKATSTPVSIQQYPMSHEARLGIKPHIQRLLDQGILVPCQSPWNTPLLPVKKPGTNDYRPVQDLREVNKRVEDIHPTVPNPYNLLSGLPPSHQWYTVLDLKDAFFCLRLHPTSQPLFAFEWRDPGMGISGQLTWTRLPQGFKNSPTLFNEALHRDLADFRIQHPDLILLQYVDDILLAATSELDCQQGTRALLQTLGDLGYRASAKKAQICQKQVKYLGYLLREGQRWLTEARKETVMGQPVPKTPRQLREFLGTAGFCRLWIPGFAEMAAPLYPLTKPGTLFSWGPDQQKAYQEIKQALLTAPALGLPDLTKPFELFVDEKQGYAKGVLTQKLGPWRRPVAYLSKKLDPVAAGWPPCLRMVAAIAVLTKDAGKLTMGQPLVILAPHAVEALVKQPPDRWLSNARMTHYQAMLLDTDRVQFGPVVALNPATLLPLPEEGAPHDCLEILAETHGTRPDLTDQPIPDADHTWYTDGSSFLQEGQRKAGAAVTTETEVIWAGALPAGTSAQRAELIALTQALKMAEGKRLNVYTDSRYAFATAHIHGEIYRRRGWLTSEGREIKNKSEILALLKALFLPKRLSIIHCLGHQKGDSAEARGNRLADQAAREAAIKTPPDTSTLLAGKRTADGSEFEKRTADGSEFESPKKKAKVE

SEQ ID NO: 2199 - protein, 2096 aa, synthetic construct
  source 1..2096: note = Description of Artificial Sequence: Synthetic polypeptide
MPAAKRVKLDGGDKKYSIGLDIGTNSVGWAVITDEYKVPSKKFKVLGNTDRHSIKKNLIGALLFDSGETAEATRLKRTARRRYTRRKNRICYLQEIFSNEMAKVDDSFFHRLEESFLVEEDKKHERHPIFGNIVDEVAYHEKYPTIYHLRKKLVDSTDKADLRLIYLALAHMIKFRGHFLIEGDLNPDNSDVDKLFIQLVQTYNQLFEENPINASGVDAKAILSARLSKSRRLENLIAQLPGEKKNGLFGNLIALSLGLTPNFKSNFDLAEDAKLQLSKDTYDDDLDNLLAQIGDQYADLFLAAKNLSDAILLSDILRVNTEITKAPLSASMIKRYDEHHQDLTLLKALVRQQLPEKYKEIFFDQSKNGYAGYIDGGASQEEFYKFIKPILEKMDGTEELLVKLNREDLLRKQRTFDNGSIPHQIHLGELHAILRRQEDFYPFLKDNREKIEKILTFRIPYYVGPLARGNSRFAWMTRKSEETITPWNFEEVVDKGASAQSFIERMTNFDKNLPNEKVLPKHSLLYEYFTVYNELTKVKYVTEGMRKPAFLSGEQKKAIVDLLFKTNRKVTVKQLKEDYFKKIECFDSVEISGVEDRFNASLGTYHDLLKIIKDKDFLDNEENEDILEDIVLTLTLFEDREMIEERLKTYAHLFDDKVMKQLKRRRYTGWGRLSRKLINGIRDKQSGKTILDFLKSDGFANRNFMQLIHDDSLTFKEDIQKAQVSGQGDSLHEHIANLAGSPAIKKGILQTVKVVDELVKVMGRHKPENIVIEMARENQTTQKGQKNSRERMKRIEEGIKELGSQILKEHPVENTQLQNEKLYLYYLQNGRDMYVDQELDINRLSDYDVDHIVPQSFLKDDSIDNKVLTRSDKARGKSDNVPSEEVVKKMKNYWRQLLNAKLITQRKFDNLTKAERGGLSELDKAGFIKRQLVETRQITKHVAQILDSRMNTKYDENDKLIREVKVITLKSKLVSDFRKDFQFYKVREINNYHHAHDAYLNAVVGTALIKKYPKLESEFVYGDYKVYDVRKMIAKSEQEIGKATAKYFFYSNIMNFFKTEITLANGEIRKRPLIETNGETGEIVWDKGRDFATVRKVLSMPQVNIVKKTEVQTGGFSKESILPKRNSDKLIARKKDWDPKKYGGFDSPTVAYSVLVVAKVEKGKSKKLKSVKELLGITIMERSSFEKNPIDFLEAKGYKEVKKDLIIKLPKYSLFELENGRKRMLASAGELQKGNELALPSKYVNFLYLASHYEKLKGSPEDNEQKQLFVEQHKHYLDEIIEQISEFSKRVILADANLDKVLSAYNKHRDKPIREQAENIIHLFTLTNLGAPAAFKYFDTTIDRKRYTSTKEVLDATLIHQSITGLYETRIDLSQLGGDGGGGSEAAAKGSSGGTLGIEDEYRLHETSTEPDVSLGSTWLSDFPQAWAETGGMGLAVRQAPLIIPLKATSTPVSIQQYPMSHEARLGIKPHIQRLLDQGILVPCQSPWNTPLLPVKKPGTNDYRPVQDLREVNKRVEDIHPTVPNPYNLLSGLPPSHQWYTVLDLKDAFFCLRLHPTSQPLFAFEWRDPGMGISGQLTWTRLPQGFKNSPTLFNEALHRDLADFRIQHPDLILLQYVDDILLAATSELDCQQGTRALLQTLGDLGYRASAKKAQICQKQVKYLGYLLREGQRWLTEARKETVMGQPVPKTPRQLREFLGTAGFCRLWIPGFAEMAAPLYPLTKPGTLFSWGPDQQKAYQEIKQALLTAPALGLPDLTKPFELFVDEKQGYAKGVLTQKLGPWRRPVAYLSKKLDPVAAGWPPCLRMVAAIAVLTKDAGKLTMGQPLVILAPHAVEALVKQPPDRWLSNARMTHYQAMLLDTDRVQFGPVVALNPATLLPLPEEGAPHDCLEILAETHGTRPDLTDQPIPDADHTWYTDGSSFLQEGQRKAGAAVTTETEVIWAGALPAGTSAQRAELIALTQALKMAEGKRLNVYTDSRYAFATAHIHGEIYRRRGWLTSEGREIKNKSEILALLKALFLPKRLSIIHCLGHQKGDSAEARGNRLADQAAREAAIKTPPDTSTLLAGKRTADGSEFEKRTADGSEFESPKKKAKVE

SEQ ID NO: 2200 - protein, 2096 aa, synthetic construct
  source 1..2096: note = Description of Artificial Sequence: Synthetic polypeptide
MPAAKRVKLDGGDKKYSIGLDIGTNSVGWAVITDEYKVPSKKFKVLGNTDRHSIKKNLIGALLFDSGETAEATRLKRTARRRYTRRKNRICYLQEIFSNEMAKVDDSFFHRLEESFLVEEDKKHERHPIFGNIVDEVAYHEKYPTIYHLRKKLVDSTDKADLRLIYLALAHMIKFRGHFLIEGDLNPDNSDVDKLFIQLVQTYNQLFEENPINASGVDAKAILSARLSKSRRLENLIAQLPGEKKNGLFGNLIALSLGLTPNFKSNFDLAEDAKLQLSKDTYDDDLDNLLAQIGDQYADLFLAAKNLSDAILLSDILRVNTEITKAPLSASMIKRYDEHHQDLTLLKALVRQQLPEKYKEIFFDQSKNGYAGYIDGGASQEEFYKFIKPILEKMDGTEELLVKLNREDLLRKQRTFDNGSIPHQIHLGELHAILRRQEDFYPFLKDNREKIEKILTFRIPYYVGPLARGNSRFAWMTRKSEETITPWNFEEVVDKGASAQSFIERMTNFDKNLPNEKVLPKHSLLYEYFTVYNELTKVKYVTEGMRKPAFLSGEQKKAIVDLLFKTNRKVTVKQLKEDYFKKIECFDSVEISGVEDRFNASLGTYHDLLKIIKDKDFLDNEENEDILEDIVLTLTLFEDREMIEERLKTYAHLFDDKVMKQLKRRRYTGWGRLSRKLINGIRDKQSGKTILDFLKSDGFANRNFMQLIHDDSLTFKEDIQKAQVSGQGDSLHEHIANLAGSPAIKKGILQTVKVVDELVKVMGRHKPENIVIEMARENQTTQKGQKNSRERMKRIEEGIKELGSQILKEHPVENTQLQNEKLYLYYLQNGRDMYVDQELDINRLSDYDVDHIVPQSFLKDDSIDNKVLTRSDKARGKSDNVPSEEVVKKMKNYWRQLLNAKLITQRKFDNLTKAERGGLSELDKAGFIKRQLVETRQITKHVAQILDSRMNTKYDENDKLIREVKVITLKSKLVSDFRKDFQFYKVREINNYHHAHDAYLNAVVGTALIKKYPKLESEFVYGDYKVYDVRKMIAKSEQEIGKATAKYFFYSNIMNFFKTEITLANGEIRKRPLIETNGETGEIVWDKGRDFATVRKVLSMPQVNIVKKTEVQTGGFSKESILPKRNSDKLIARKKDWDPKKYGGFDSPTVAYSVLVVAKVEKGKSKKLKSVKELLGITIMERSSFEKNPIDFLEAKGYKEVKKDLIIKLPKYSLFELENGRKRMLASAGELQKGNELALPSKYVNFLYLASHYEKLKGSPEDNEQKQLFVEQHKHYLDEIIEQISEFSKRVILADANLDKVLSAYNKHRDKPIREQAENIIHLFTLTNLGAPAAFKYFDTTIDRKRYTSTKEVLDATLIHQSITGLYETRIDLSQLGGDGGEAAAKGGSGSSGGTLGIEDEYRLHETSTEPDVSLGSTWLSDFPQAWAETGGMGLAVRQAPLIIPLKATSTPVSIQQYPMSHEARLGIKPHIQRLLDQGILVPCQSPWNTPLLPVKKPGTNDYRPVQDLREVNKRVEDIHPTVPNPYNLLSGLPPSHQWYTVLDLKDAFFCLRLHPTSQPLFAFEWRDPGMGISGQLTWTRLPQGFKNSPTLFNEALHRDLADFRIQHPDLILLQYVDDILLAATSELDCQQGTRALLQTLGDLGYRASAKKAQICQKQVKYLGYLLREGQRWLTEARKETVMGQPVPKTPRQLREFLGTAGFCRLWIPGFAEMAAPLYPLTKPGTLFSWGPDQQKAYQEIKQALLTAPALGLPDLTKPFELFVDEKQGYAKGVLTQKLGPWRRPVAYLSKKLDPVAAGWPPCLRMVAAIAVLTKDAGKLTMGQPLVILAPHAVEALVKQPPDRWLSNARMTHYQAMLLDTDRVQFGPVVALNPATLLPLPEEGAPHDCLEILAETHGTRPDLTDQPIPDADHTWYTDGSSFLQEGQRKAGAAVTTETEVIWAGALPAGTSAQRAELIALTQALKMAEGKRLNVYTDSRYAFATAHIHGEIYRRRGWLTSEGREIKNKSEILALLKALFLPKRLSIIHCLGHQKGDSAEARGNRLADQAAREAAIKTPPDTSTLLAGKRTADGSEFEKRTADGSEFESPKKKAKVE

SEQ ID NO: 2201 - protein, 2096 aa, synthetic construct; identical to SEQ ID NO: 2071
  source 1..2096: note = Description of Artificial Sequence: Synthetic polypeptide

SEQ ID NO: 2202 - protein, 2096 aa, synthetic construct; identical to SEQ ID NO: 2075
  source 1..2096: note = Description of Artificial Sequence: Synthetic polypeptide

SEQ ID NO: 2203 - protein, 2091 aa, synthetic construct
  source 1..2091: note = Description of Artificial Sequence: Synthetic polypeptide
MPAAKRVKLDGGDKKYSIGLDIGTNSVGWAVITDEYKVPSKKFKVLGNTDRHSIKKNLIGALLFDSGETAEATRLKRTARRRYTRRKNRICYLQEIFSNEMAKVDDSFFHRLEESFLVEEDKKHERHPIFGNIVDEVAYHEKYPTIYHLRKKLVDSTDKADLRLIYLALAHMIKFRGHFLIEGDLNPDNSDVDKLFIQLVQTYNQLFEENPINASGVDAKAILSARLSKSRRLENLIAQLPGEKKNGLFGNLIALSLGLTPNFKSNFDLAEDAKLQLSKDTYDDDLDNLLAQIGDQYADLFLAAKNLSDAILLSDILRVNTEITKAPLSASMIKRYDEHHQDLTLLKALVRQQLPEKYKEIFFDQSKNGYAGYIDGGASQEEFYKFIKPILEKMDGTEELLVKLNREDLLRKQRTFDNGSIPHQIHLGELHAILRRQEDFYPFLKDNREKIEKILTFRIPYYVGPLARGNSRFAWMTRKSEETITPWNFEEVVDKGASAQSFIERMTNFDKNLPNEKVLPKHSLLYEYFTVYNELTKVKYVTEGMRKPAFLSGEQKKAIVDLLFKTNRKVTVKQLKEDYFKKIECFDSVEISGVEDRFNASLGTYHDLLKIIKDKDFLDNEENEDILEDIVLTLTLFEDREMIEERLKTYAHLFDDKVMKQLKRRRYTGWGRLSRKLINGIRDKQSGKTILDFLKSDGFANRNFMQLIHDDSLTFKEDIQKAQVSGQGDSLHEHIANLAGSPAIKKGILQTVKVVDELVKVMGRHKPENIVIEMARENQTTQKGQKNSRERMKRIEEGIKELGSQILKEHPVENTQLQNEKLYLYYLQNGRDMYVDQELDINRLSDYDVDHIVPQSFLKDDSIDNKVLTRSDKARGKSDNVPSEEVVKKMKNYWRQLLNAKLITQRKFDNLTKAERGGLSELDKAGFIKRQLVETRQITKHVAQILDSRMNTKYDENDKLIREVKVITLKSKLVSDFRKDFQFYKVREINNYHHAHDAYLNAVVGTALIKKYPKLESEFVYGDYKVYDVRKMIAKSEQEIGKATAKYFFYSNIMNFFKTEITLANGEIRKRPLIETNGETGEIVWDKGRDFATVRKVLSMPQVNIVKKTEVQTGGFSKESILPKRNSDKLIARKKDWDPKKYGGFDSPTVAYSVLVVAKVEKGKSKKLKSVKELLGITIMERSSFEKNPIDFLEAKGYKEVKKDLIIKLPKYSLFELENGRKRMLASAGELQKGNELALPSKYVNFLYLASHYEKLKGSPEDNEQKQLFVEQHKHYLDEIIEQISEFSKRVILADANLDKVLSAYNKHRDKPIREQAENIIHLFTLTNLGAPAAFKYFDTTIDRKRYTSTKEVLDATLIHQSITGLYETRIDLSQLGGDGGGSSGGGGGTLGIEDEYRLHETSTEPDVSLGSTWLSDFPQAWAETGGMGLAVRQAPLIIPLKATSTPVSIQQYPMSHEARLGIKPHIQRLLDQGILVPCQSPWNTPLLPVKKPGTNDYRPVQDLREVNKRVEDIHPTVPNPYNLLSGLPPSHQWYTVLDLKDAFFCLRLHPTSQPLFAFEWRDPGMGISGQLTWTRLPQGFKNSPTLFNEALHRDLADFRIQHPDLILLQYVDDILLAATSELDCQQGTRALLQTLGDLGYRASAKKAQICQKQVKYLGYLLREGQRWLTEARKETVMGQPVPKTPRQLREFLGTAGFCRLWIPGFAEMAAPLYPLTKPGTLFSWGPDQQKAYQEIKQALLTAPALGLPDLTKPFELFVDEKQGYAKGVLTQKLGPWRRPVAYLSKKLDPVAAGWPPCLRMVAAIAVLTKDAGKLTMGQPLVILAPHAVEALVKQPPDRWLSNARMTHYQAMLLDTDRVQFGPVVALNPATLLPLPEEGAPHDCLEILAETHGTRPDLTDQPIPDADHTWYTDGSSFLQEGQRKAGAAVTTETEVIWAGALPAGTSAQRAELIALTQALKMAEGKRLNVYTDSRYAFATAHIHGEIYRRRGWLTSEGREIKNKSEILALLKALFLPKRLSIIHCLGHQKGDSAEARGNRLADQAAREAAIKTPPDTSTLLAGKRTADGSEFEKRTADGSEFESPKKKAKVE

SEQ ID NO: 2204 - protein, 2098 aa, synthetic construct
  source 1..2098: note = Description of Artificial Sequence: Synthetic polypeptide
MPAAKRVKLDGGDKKYSIGLDIGTNSVGWAVITDEYKVPSKKFKVLGNTDRHSIKKNLIGALLFDSGETAEATRLKRTARRRYTRRKNRICYLQEIFSNEMAKVDDSFFHRLEESFLVEEDKKHERHPIFGNIVDEVAYHEKYPTIYHLRKKLVDSTDKADLRLIYLALAHMIKFRGHFLIEGDLNPDNSDVDKLFIQLVQTYNQLFEENPINASGVDAKAILSARLSKSRRLENLIAQLPGEKKNGLFGNLIALSLGLTPNFKSNFDLAEDAKLQLSKDTYDDDLDNLLAQIGDQYADLFLAAKNLSDAILLSDILRVNTEITKAPLSASMIKRYDEHHQDLTLLKALVRQQLPEKYKEIFFDQSKNGYAGYIDGGASQEEFYKFIKPILEKMDGTEELLVKLNREDLLRKQRTFDNGSIPHQIHLGELHAILRRQEDFYPFLKDNREKIEKILTFRIPYYVGPLARGNSRFAWMTRKSEETITPWNFEEVVDKGASAQSFIERMTNFDKNLPNEKVLPKHSLLYEYFTVYNELTKVKYVTEGMRKPAFLSGEQKKAIVDLLFKTNRKVTVKQLKEDYFKKIECFDSVEISGVEDRFNASLGTYHDLLKIIKDKDFLDNEENEDILEDIVLTLTLFEDREMIEERLKTYAHLFDDKVMKQLKRRRYTGWGRLSRKLINGIRDKQSGKTILDFLKSDGFANRNFMQLIHDDSLTFKEDIQKAQVSGQGDSLHEHIANLAGSPAIKKGILQTVKVVDELVKVMGRHKPENIVIEMARENQTTQKGQKNSRERMKRIEEGIKELGSQILKEHPVENTQLQNEKLYLYYLQNGRDMYVDQELDINRLSDYDVDHIVPQSFLKDDSIDNKVLTRSDKARGKSDNVPSEEVVKKMKNYWRQLLNAKLITQRKFDNLTKAERGGLSELDKAGFIKRQLVETRQITKHVAQILDSRMNTKYDENDKLIREVKVITLKSKLVSDFRKDFQFYKVREINNYHHAHDAYLNAVVGTALIKKYPKLESEFVYGDYKVYDVRKMIAKSEQEIGKATAKYFFYSNIMNFFKTEITLANGEIRKRPLIETNGETGEIVWDKGRDFATVRKVLSMPQVNIVKKTEVQTGGFSKESILPKRNSDKLIARKKDWDPKKYGGFDSPTVAYSVLVVAKVEKGKSKKLKSVKELLGITIMERSSFEKNPIDFLEAKGYKEVKKDLIIKLPKYSLFELENGRKRMLASAGELQKGNELALPSKYVNFLYLASHYEKLKGSPEDNEQKQLFVEQHKHYLDEIIEQISEFSKRVILADANLDKVLSAYNKHRDKPIREQAENIIHLFTLTNLGAPAAFKYFDTTIDRKRYTSTKEVLDATLIHQSITGLYETRIDLSQLGGDGGPAPAPAPAPAPAPGGTLGIEDEYRLHETSTEPDVSLGSTWLSDFPQAWAETGGMGLAVRQAPLIIPLKATSTPVSIQQYPMSHEARLGIKPHIQRLLDQGILVPCQSPWNTPLLPVKKPGTNDYRPVQDLREVNKRVEDIHPTVPNPYNLLSGLPPSHQWYTVLDLKDAFFCLRLHPTSQPLFAFEWRDPGMGISGQLTWTRLPQGFKNSPTLFNEALHRDLADFRIQHPDLILLQYVDDILLAATSELDCQQGTRALLQTLGDLGYRASAKKAQICQKQVKYLGYLLREGQRWLTEARKETVMGQPVPKTPRQLREFLGTAGFCRLWIPGFAEMAAPLYPLTKPGTLFSWGPDQQKAYQEIKQALLTAPALGLPDLTKPFELFVDEKQGYAKGVLTQKLGPWRRPVAYLSKKLDPVAAGWPPCLRMVAAIAVLTKDAGKLTMGQPLVILAPHAVEALVKQPPDRWLSNARMTHYQAMLLDTDRVQFGPVVALNPATLLPLPEEGAPHDCLEILAETHGTRPDLTDQPIPDADHTWYTDGSSFLQEGQRKAGAAVTTETEVIWAGALPAGTSAQRAELIALTQALKMAEGKRLNVYTDSRYAFATAHIHGEIYRRRGWLTSEGREIKNKSEILALLKALFLPKRLSIIHCLGHQKGDSAEARGNRLADQAAREAAIKTPPDTSTLLAGKRTADGSEFEKRTADGSEFESPKKKAKVE

SEQ ID NO: 2205 - protein, 2094 aa, synthetic construct
  source 1..2094: note = Description of Artificial Sequence: Synthetic polypeptide
MPAAKRVKLDGGDKKYSIGLDIGTNSVGWAVITDEYKVPSKKFKVLGNTDRHSIKKNLIGALLFDSGETAEATRLKRTARRRYTRRKNRICYLQEIFSNEMAKVDDSFFHRLEESFLVEEDKKHERHPIFGNIVDEVAYHEKYPTIYHLRKKLVDSTDKADLRLIYLALAHMIKFRGHFLIEGDLNPDNSDVDKLFIQLVQTYNQLFEENPINASGVDAKAILSARLSKSRRLENLIAQLPGEKKNGLFGNLIALSLGLTPNFKSNFDLAEDAKLQLSKDTYDDDLDNLLAQIGDQYADLFLAAKNLSDAILLSDILRVNTEITKAPLSASMIKRYDEHHQDLTLLKALVRQQLPEKYKEIFFDQSKNGYAGYIDGGASQEEFYKFIKPILEKMDGTEELLVKLNREDLLRKQRTFDNGSIPHQIHLGELHAILRRQEDFYPFLKDNREKIEKILTFRIPYYVGPLARGNSRFAWMTRKSEETITPWNFEEVVDKGASAQSFIERMTNFDKNLPNEKVLPKHSLLYEYFTVYNELTKVKYVTEGMRKPAFLSGEQKKAIVDLLFKTNRKVTVKQLKEDYFKKIECFDSVEISGVEDRFNASLGTYHDLLKIIKDKDFLDNEENEDILEDIVLTLTLFEDREMIEERLKTYAHLFDDKVMKQLKRRRYTGWGRLSRKLINGIRDKQSGKTILDFLKSDGFANRNFMQLIHDDSLTFKEDIQKAQVSGQGDSLHEHIANLAGSPAIKKGILQTVKVVDELVKVMGRHKPENIVIEMARENQTTQKGQKNSRERMKRIEEGIKELGSQILKEHPVENTQLQNEKLYLYYLQNGRDMYVDQELDINRLSDYDVDHIVPQSFLKDDSIDNKVLTRSDKARGKSDNVPSEEVVKKMKNYWRQLLNAKLITQRKFDNLTKAERGGLSELDKAGFIKRQLVETRQITKHVAQILDSRMNTKYDENDKLIREVKVITLKSKLVSDFRKDFQFYKVREINNYHHAHDAYLNAVVGTALIKKYPKLESEFVYGDYKVYDVRKMIAKSEQEIGKATAKYFFYSNIMNFFKTEITLANGEIRKRPLIETNGETGEIVWDKGRDFATVRKVLSMPQVNIVKKTEVQTGGFSKESILPKRNSDKLIARKKDWDPKKYGGFDSPTVAYSVLVVAKVEKGKSKKLKSVKELLGITIMERSSFEKNPIDFLEAKGYKEVKKDLIIKLPKYSLFELENGRKRMLASAGELQKGNELALPSKYVNFLYLASHYEKLKGSPEDNEQKQLFVEQHKHYLDEIIEQISEFSKRVILADANLDKVLSAYNKHRDKPIREQAENIIHLFTLTNLGAPAAFKYFDTTIDRKRYTSTKEVLDATLIHQSITGLYETRIDLSQLGGDGGGGSGSSGGGGGTLGIEDEYRLHETSTEPDVSLGSTWLSDFPQAWAETGGMGLAVRQAPLIIPLKATSTPVSIQQYPMSHEARLGIKPHIQRLLDQGILVPCQSPWNTPLLPVKKPGTNDYRPVQDLREVNKRVEDIHPTVPNPYNLLSGLPPSHQWYTVLDLKDAFFCLRLHPTSQPLFAFEWRDPGMGISGQLTWTRLPQGFKNSPTLFNEALHRDLADFRIQHPDLILLQYVDDILLAATSELDCQQGTRALLQTLGDLGYRASAKKAQICQKQVKYLGYLLREGQRWLTEARKETVMGQPVPKTPRQLREFLGTAGFCRLWIPGFAEMAAPLYPLTKPGTLFSWGPDQQKAYQEIKQALLTAPALGLPDLTKPFELFVDEKQGYAKGVLTQKLGPWRRPVAYLSKKLDPVAAGWPPCLRMVAAIAVLTKDAGKLTMGQPLVILAPHAVEALVKQPPDRWLSNARMTHYQAMLLDTDRVQFGPVVALNPATLLPLPEEGAPHDCLEILAETHGTRPDLTDQPIPDADHTWYTDGSSFLQEGQRKAGAAVTTETEVIWAGALPAGTSAQRAELIALTQALKMAEGKRLNVYTDSRYAFATAHIHGEIYRRRGWLTSEGREIKNKSEILALLKALFLPKRLSIIHCLGHQKGDSAEARGNRLADQAAREAAIKTPPDTSTLLAGKRTADGSEFEKRTADGSEFESPKKKAKVE

SEQ ID NO: 2206 - protein, 2093 aa, synthetic construct
  source 1..2093: note = Description of Artificial Sequence: Synthetic polypeptide
MPAAKRVKLDGGDKKYSIGLDIGTNSVGWAVITDEYKVPSKKFKVLGNTDRHSIKKNLIGALLFDSGETAEATRLKRTARRRYTRRKNRICYLQEIFSNEMAKVDDSFFHRLEESFLVEEDKKHERHPIFGNIVDEVAYHEKYPTIYHLRKKLVDSTDKADLRLIYLALAHMIKFRGHFLIEGDLNPDNSDVDKLFIQLVQTYNQLFEENPINASGVDAKAILSARLSKSRRLENLIAQLPGEKKNGLFGNLIALSLGLTPNFKSNFDLAEDAKLQLSKDTYDDDLDNLLAQIGDQYADLFLAAKNLSDAILLSDILRVNTEITKAPLSASMIKRYDEHHQDLTLLKALVRQQLPEKYKEIFFDQSKNGYAGYIDGGASQEEFYKFIKPILEKMDGTEELLVKLNREDLLRKQRTFDNGSIPHQIHLGELHAILRRQEDFYPFLKDNREKIEKILTFRIPYYVGPLARGNSRFAWMTRKSEETITPWNFEEVVDKGASAQSFIERMTNFDKNLPNEKVLPKHSLLYEYFTVYNELTKVKYVTEGMRKPAFLSGEQKKAIVDLLFKTNRKVTVKQLKEDYFKKIECFDSVEISGVEDRFNASLGTYHDLLKIIKDKDFLDNEENEDILEDIVLTLTLFEDREMIEERLKTYAHLFDDKVMKQLKRRRYTGWGRLSRKLINGIRDKQSGKTILDFLKSDGFANRNFMQLIHDDSLTFKEDIQKAQVSGQGDSLHEHIANLAGSPAIKKGILQTVKVVDELVKVMGRHKPENIVIEMARENQTTQKGQKNSRERMKRIEEGIKELGSQILKEHPVENTQLQNEKLYLYYLQNGRDMYVDQELDINRLSDYDVDHIVPQSFLKDDSIDNKVLTRSDKARGKSDNVPSEEVVKKMKNYWRQLLNAKLITQRKFDNLTKAERGGLSELDKAGFIKRQLVETRQITKHVAQILDSRMNTKYDENDKLIREVKVITLKSKLVSDFRKDFQFYKVREINNYHHAHDAYLNAVVGTALIKKYPKLESEFVYGDYKVYDVRKMIAKSEQEIGKATAKYFFYSNIMNFFKTEITLANGEIRKRPLIETNGETGEIVWDKGRDFATVRKVLSMPQVNIVKKTEVQTGGFSKESILPKRNSDKLIARKKDWDPKKYGGFDSPTVAYSVLVVAKVEKGKSKKLKSVKELLGITIMERSSFEKNPIDFLEAKGYKEVKKDLIIKLPKYSLFELENGRKRMLASAGELQKGNELALPSKYVNFLYLASHYEKLKGSPEDNEQKQLFVEQHKHYLDEIIEQISEFSKRVILADANLDKVLSAYNKHRDKPIREQAENIIHLFTLTNLGAPAAFKYFDTTIDRKRYTSTKEVLDATLIHQSITGLYETRIDLSQLGGDGGPAPEAAAKGGTLGIEDEYRLHETSTEPDVSLGSTWLSDFPQAWAETGGMGLAVRQAPLIIPLKATSTPVSIQQYPMSHEARLGIKPHIQRLLDQGILVPCQSPWNTPLLPVKKPGTNDYRPVQDLREVNKRVEDIHPTVPNPYNLLSGLPPSHQWYTVLDLKDAFFCLRLHPTSQPLFAFEWRDPGMGISGQLTWTRLPQGFKNSPTLFNEALHRDLADFRIQHPDLILLQYVDDILLAATSELDCQQGTRALLQTLGDLGYRASAKKAQICQKQVKYLGYLLREGQRWLTEARKETVMGQPVPKTPRQLREFLGTAGFCRLWIPGFAEMAAPLYPLTKPGTLFSWGPDQQKAYQEIKQALLTAPALGLPDLTKPFELFVDEKQGYAKGVLTQKLGPWRRPVAYLSKKLDPVAAGWPPCLRMVAAIAVLTKDAGKLTMGQPLVILAPHAVEALVKQPPDRWLSNARMTHYQAMLLDTDRVQFGPVVALNPATLLPLPEEGAPHDCLEILAETHGTRPDLTDQPIPDADHTWYTDGSSFLQEGQRKAGAAVTTETEVIWAGALPAGTSAQRAELIALTQALKMAEGKRLNVYTDSRYAFATAHIHGEIYRRRGWLTSEGREIKNKSEILALLKALFLPKRLSIIHCLGHQKGDSAEARGNRLADQAAREAAIKTPPDTSTLLAGKRTADGSEFEKRTADGSEFESPKKKAKVE

SEQ ID NO: 2207 - protein, 2096 aa, synthetic construct; identical to SEQ ID NO: 2074
  source 1..2096: note = Description of Artificial Sequence: Synthetic polypeptide

SEQ ID NO: 2208 - protein, 2093 aa, synthetic construct
  source 1..2093: note = Description of Artificial Sequence: Synthetic polypeptide
MPAAKRVKLDGGDKKYSIGLDIGTNSVGWAVITDEYKVPSKKFKVLGNTDRHSIKKNLIGALLFDSGETAEATRLKRTARRRYTRRKNRICYLQEIFSNEMAKVDDSFFHRLEESFLVEEDKKHERHPIFGNIVDEVAYHEKYPTIYHLRKKLVDSTDKADLRLIYLALAHMIKFRGHFLIEGDLNPDNSDVDKLFIQLVQTYNQLFEENPINASGVDAKAILSARLSKSRRLENLIAQLPGEKKNGLFGNLIALSLGLTPNFKSNFDLAEDAKLQLSKDTYDDDLDNLLAQIGDQYADLFLAAKNLSDAILLSDILRVNTEITKAPLSASMIKRYDEHHQDLTLLKALVRQQLPEKYKEIFFDQSKNGYAGYIDGGASQEEFYKFIKPILEKMDGTEELLVKLNREDLLRKQRTFDNGSIPHQIHLGELHAILRRQEDFYPFLKDNREKIEKILTFRIPYYVGPLARGNSRFAWMTRKSEETITPWNFEEVVDKGASAQSFIERMTNFDKNLPNEKVLPKHSLLYEYFTVYNELTKVKYVTEGMRKPAFLSGEQKKAIVDLLFKTNRKVTVKQLKEDYFKKIECFDSVEISGVEDRFNASLGTYHDLLKIIKDKDFLDNEENEDILEDIVLTLTLFEDREMIEERLKTYAHLFDDKVMKQLKRRRYTGWGRLSRKLINGIRDKQSGKTILDFLKSDGFANRNFMQLIHDDSLTFKEDIQKAQVSGQGDSLHEHIANLAGSPAIKKGILQTVKVVDELVKVMGRHKPENIVIEMARENQTTQKGQKNSRERMKRIEEGIKELGSQILKEHPVENTQLQNEKLYLYYLQNGRDMYVDQELDINRLSDYDVDHIVPQSFLKDDSIDNKVLTRSDKARGKSDNVPSEEVVKKMKNYWRQLLNAKLITQRKFDNLTKAERGGLSELDKAGFIKRQLVETRQITKHVAQILDSRMNTKYDENDKLIREVKVITLKSKLVSDFRKDFQFYKVREINNYHHAHDAYLNAVVGTALIKKYPKLESEFVYGDYKVYDVRKMIAKSEQEIGKATAKYFFYSNIMNFFKTEITLANGEIRKRPLIETNGETGEIVWDKGRDFATVRKVLSMPQVNIVKKTEVQTGGFSKESILPKRNSDKLIARKKDWDPKKYGGFDSPTVAYSVLVVAKVEKGKSKKLKSVKELLGITIMERSSFEKNPIDFLEAKGYKEVKKDLIIKLPKYSLFELENGRKRMLASAGELQKGNELALPSKYVNFLYLASHYEKLKGSPEDNEQKQLFVEQHKHYLDEIIEQISEFSKRVILADANLDKVLSAYNKHRDKPIREQAENIIHLFTLTNLGAPAAFKYFDTTIDRKRYTSTKEVLDATLIHQSITGLYETRIDLSQLGGDGGGGGEAAAKGGTLGIEDEYRLHETSTEPDVSLGSTWLSDFPQAWAETGGMGLAVRQAPLIIPLKATSTPVSIQQYPMSHEARLGIKPHIQRLLDQGILVPCQSPWNTPLLPVKKPGTNDYRPVQDLREVNKRVEDIHPTVPNPYNLLSGLPPSHQWYTVLDLKDAFFCLRLHPTSQPLFAFEWRDPGMGISGQLTWTRLPQGFKNSPTLFNEALHRDLADFRIQHPDLILLQYVDDILLAATSELDCQQGTRALLQTLGDLGYRASAKKAQICQKQVKYLGYLLREGQRWLTEARKETVMGQPVPKTPRQLREFLGTAGFCRLWIPGFAEMAAPLYPLTKPGTLFSWGPDQQKAYQEIKQALLTAPALGLPDLTKPFELFVDEKQGYAKGVLTQKLGPWRRPVAYLSKKLDPVAAGWPPCLRMVAAIAVLTKDAGKLTMGQPLVILAPHAVEALVKQPPDRWLSNARMTHYQAMLLDTDRVQFGPVVALNPATLLPLPEEGAPHDCLEILAETHGTRPDLTDQPIPDADHTWYTDGSSFLQEGQRKAGAAVTTETEVIWAGALPAGTSAQRAELIALTQALKMAEGKRLNVYTDSRYAFATAHIHGEIYRRRGWLTSEGREIKNKSEILALLKALFLPKRLSIIHCLGHQKGDSAEARGNRLADQAAREAAIKTPPDTSTLLAGKRTADGSEFEKRTADGSEFESPKKKAKVE

SEQ ID NO: 2209 - protein, 2096 aa, synthetic construct
  source 1..2096: note = Description of Artificial Sequence: Synthetic polypeptide
MPAAKRVKLDGGDKKYSIGLDIGTNSVGWAVITDEYKVPSKKFKVLGNTDRHSIKKNLIGALLFDSGETAEATRLKRTARRRYTRRKNRICYLQEIFSNEMAKVDDSFFHRLEESFLVEEDKKHERHPIFGNIVDEVAYHEKYPTIYHLRKKLVDSTDKADLRLIYLALAHMIKFRGHFLIEGDLNPDNSDVDKLFIQLVQTYNQLFEENPINASGVDAKAILSARLSKSRRLENLIAQLPGEKKNGLFGNLIALSLGLTPNFKSNFDLAEDAKLQLSKDTYDDDLDNLLAQIGDQYADLFLAAKNLSDAILLSDILRVNTEITKAPLSASMIKRYDEHHQDLTLLKALVRQQLPEKYKEIFFDQSKNGYAGYIDGGASQEEFYKFIKPILEKMDGTEELLVKLNREDLLRKQRTFDNGSIPHQIHLGELHAILRRQEDFYPFLKDNREKIEKILTFRIPYYVGPLARGNSRFAWMTRKSEETITPWNFEEVVDKGASAQSFIERMTNFDKNLPNEKVLPKHSLLYEYFTVYNELTKVKYVTEGMRKPAFLSGEQKKAIVDLLFKTNRKVTVKQLKEDYFKKIECFDSVEISGVEDRFNASLGTYHDLLKIIKDKDFLDNEENEDILEDIVLTLTLFEDREMIEERLKTYAHLFDDKVMKQLKRRRYTGWGRLSRKLINGIRDKQSGKTILDFLKSDGFANRNFMQLIHDDSLTFKEDIQKAQVSGQGDSLHEHIANLAGSPAIKKGILQTVKVVDELVKVMGRHKPENIVIEMARENQTTQKGQKNSRERMKRIEEGIKELGSQILKEHPVENTQLQNEKLYLYYLQNGRDMYVDQELDINRLSDYDVDHIVPQSFLKDDSIDNKVLTRSDKARGKSDNVPSEEVVKKMKNYWRQLLNAKLITQRKFDNLTKAERGGLSELDKAGFIKRQLVETRQITKHVAQILDSRMNTKYDENDKLIREVKVITLKSKLVSDFRKDFQFYKVREINNYHHAHDAYLNAVVGTALIKKYPKLESEFVYGDYKVYDVRKMIAKSEQEIGKATAKYFFYSNIMNFFKTEITLANGEIRKRPLIETNGETGEIVWDKGRDFATVRKVLSMPQVNIVKKTEVQTGGFSKESILPKRNSDKLIARKKDWDPKKYGGFDSPTVAYSVLVVAKVEKGKSKKLKSVKELLGITIMERSSFEKNPIDFLEAKGYKEVKKDLIIKLPKYSLFELENGRKRMLASAGELQKGNELALPSKYVNFLYLASHYEKLKGSPEDNEQKQLFVEQHKHYLDEIIEQISEFSKRVILADANLDKVLSAYNKHRDKPIREQAENIIHLFTLTNLGAPAAFKYFDTTIDRKRYTSTKEVLDATLIHQSITGLYETRIDLSQLGGDGGEAAAKGGGGGSGGTLGIEDEYRLHETSTEPDVSLGSTWLSDFPQAWAETGGMGLAVRQAPLIIPLKATSTPVSIQQYPMSHEARLGIKPHIQRLLDQGILVPCQSPWNTPLLPVKKPGTNDYRPVQDLREVNKRVEDIHPTVPNPYNLLSGLPPSHQWYTVLDLKDAFFCLRLHPTSQPLFAFEWRDPGMGISGQLTWTRLPQGFKNSPTLFNEALHRDLADFRIQHPDLILLQYVDDILLAATSELDCQQGTRALLQTLGDLGYRASAKKAQICQKQVKYLGYLLREGQRWLTEARKETVMGQPVPKTPRQLREFLGTAGFCRLWIPGFAEMAAPLYPLTKPGTLFSWGPDQQKAYQEIKQALLTAPALGLPDLTKPFELFVDEKQGYAKGVLTQKLGPWRRPVAYLSKKLDPVAAGWPPCLRMVAAIAVLTKDAGKLTMGQPLVILAPHAVEALVKQPPDRWLSNARMTHYQAMLLDTDRVQFGPVVALNPATLLPLPEEGAPHDCLEILAETHGTRPDLTDQPIPDADHTWYTDGSSFLQEGQRKAGAAVTTETEVIWAGALPAGTSAQRAELIALTQALKMAEGKRLNVYTDSRYAFATAHIHGEIYRRRGWLTSEGREIKNKSEILALLKALFLPKRLSIIHCLGHQKGDSAEARGNRLADQAAREAAIKTPPDTSTLLAGKRTADGSEFEKRTADGSEFESPKKKAKVE

SEQ ID NO: 2210 - protein, 2110 aa, synthetic construct
  source 1..2110: note = Description of Artificial Sequence: Synthetic polypeptide
MPAAKRVKLDGGDKKYSIGLDIGTNSVGWAVITDEYKVPSKKFKVLGNTDRHSIKKNLIGALLFDSGETAEATRLKRTARRRYTRRKNRICYLQEIFSNEMAKVDDSFFHRLEESFLVEEDKKHERHPIFGNIVDEVAYHEKYPTIYHLRKKLVDSTDKADLRLIYLALAHMIKFRGHFLIEGDLNPDNSDVDKLFIQLVQTYNQLFEENPINASGVDAKAILSARLSKSRRLENLIAQLPGEKKNGLFGNLIALSLGLTPNFKSNFDLAEDAKLQLSKDTYDDDLDNLLAQIGDQYADLFLAAKNLSDAILLSDILRVNTEITKAPLSASMIKRYDEHHQDLTLLKALVRQQLPEKYKEIFFDQSKNGYAGYIDGGASQEEFYKFIKPILEKMDGTEELLVKLNREDLLRKQRTFDNGSIPHQIHLGELHAILRRQEDFYPFLKDNREKIEKILTFRIPYYVGPLARGNSRFAWMTRKSEETITPWNFEEVVDKGASAQSFIERMTNFDKNLPNEKVLPKHSLLYEYFTVYNELTKVKYVTEGMRKPAFLSGEQKKAIVDLLFKTNRKVTVKQLKEDYFKKIECFDSVEISGVEDRFNASLGTYHDLLKIIKDKDFLDNEENEDILEDIVLTLTLFEDREMIEERLKTYAHLFDDKVMKQLKRRRYTGWGRLSRKLINGIRDKQSGKTILDFLKSDGFANRNFMQLIHDDSLTFKEDIQKAQVSGQGDSLHEHIANLAGSPAIKKGILQTVKVVDELVKVMGRHKPENIVIEMARENQTTQKGQKNSRERMKRIEEGIKELGSQILKEHPVENTQLQNEKLYLYYLQNGRDMYVDQELDINRLSDYDVDHIVPQSFLKDDSIDNKVLTRSDKARGKSDNVPSEEVVKKMKNYWRQLLNAKLITQRKFDNLTKAERGGLSELDKAGFIKRQLVETRQITKHVAQILDSRMNTKYDENDKLIREVKVITLKSKLVSDFRKDFQFYKVREINNYHHAHDAYLNAVVGTALIKKYPKLESEFVYGDYKVYDVRKMIAKSEQEIGKATAKYFFYSNIMNFFKTEITLANGEIRKRPLIETNGETGEIVWDKGRDFATVRKVLSMPQVNIVKKTEVQTGGFSKESILPKRNSDKLIARKKDWDPKKYGGFDSPTVAYSVLVVAKVEKGKSKKLKSVKELLGITIMERSSFEKNPIDFLEAKGYKEVKKDLIIKLPKYSLFELENGRKRMLASAGELQKGNELALPSKYVNFLYLASHYEKLKGSPEDNEQKQLFVEQHKHYLDEIIEQISEFSKRVILADANLDKVLSAYNKHRDKPIREQAENIIHLFTLTNLGAPAAFKYFDTTIDRKRYTSTKEVLDATLIHQSITGLYETRIDLSQLGGDGGGGGGSGGGGSGGGGSGGGGSGGGGSGGTLGIEDEYRLHETSTEPDVSLGSTWLSDFPQAWAETGGMGLAVRQAPLIIPLKATSTPVSIQQYPMSHEARLGIKPHIQRLLDQGILVPCQSPWNTPLLPVKKPGTNDYRPVQDLREVNKRVEDIHPTVPNPYNLLSGLPPSHQWYTVLDLKDAFFCLRLHPTSQPLFAFEWRDPGMGISGQLTWTRLPQGFKNSPTLFNEALHRDLADFRIQHPDLILLQYVDDILLAATSELDCQQGTRALLQTLGDLGYRASAKKAQICQKQVKYLGYLLREGQRWLTEARKETVMGQPVPKTPRQLREFLGTAGFCRLWIPGFAEMAAPLYPLTKPGTLFSWGPDQQKAYQEIKQALLTAPALGLPDLTKPFELFVDEKQGYAKGVLTQKLGPWRRPVAYLSKKLDPVAAGWPPCLRMVAAIAVLTKDAGKLTMGQPLVILAPHAVEALVKQPPDRWLSNARMTHYQAMLLDTDRVQFGPVVALNPATLLPLPEEGAPHDCLEILAETHGTRPDLTDQPIPDADHTWYTDGSSFLQEGQRKAGAAVTTETEVIWAGALPAGTSAQRAELIALTQALKMAEGKRLNVYTDSRYAFATAHIHGEIYRRRGWLTSEGREIKNKSEILALLKALFLPKRLSIIHCLGHQKGDSAEARGNRLADQAAREAAIKTPPDTSTLLAGKRTADGSEFEKRTADGSEFESPKKKAKVE

SEQ ID NO: 2211 - protein, 2096 aa, synthetic construct
  source 1..2096: note = Description of Artificial Sequence: Synthetic polypeptide
MPAAKRVKLDGGDKKYSIGLDIGTNSVGWAVITDEYKVPSKKFKVLGNTDRHSIKKNLIGALLFDSGETAEATRLKRTARRRYTRRKNRICYLQEIFSNEMAKVDDSFFHRLEESFLVEEDKKHERHPIFGNIVDEVAYHEKYPTIYHLRKKLVDSTDKADLRLIYLALAHMIKFRGHFLIEGDLNPDNSDVDKLFIQLVQTYNQLFEENPINASGVDAKAILSARLSKSRRLENLIAQLPGEKKNGLFGNLIALSLGLTPNFKSNFDLAEDAKLQLSKDTYDDDLDNLLAQIGDQYADLFLAAKNLSDAILLSDILRVNTEITKAPLSASMIKRYDEHHQDLTLLKALVRQQLPEKYKEIFFDQSKNGYAGYIDGGASQEEFYKFIKPILEKMDGTEELLVKLNREDLLRKQRTFDNGSIPHQIHLGELHAILRRQEDFYPFLKDNREKIEKILTFRIPYYVGPLARGNSRFAWMTRKSEETITPWNFEEVVDKGASAQSFIERMTNFDKNLPNEKVLPKHSLLYEYFTVYNELTKVKYVTEGMRKPAFLSGEQKKAIVDLLFKTNRKVTVKQLKEDYFKKIECFDSVEISGVEDRFNASLGTYHDLLKIIKDKDFLDNEENEDILEDIVLTLTLFEDREMIEERLKTYAHLFDDKVMKQLKRRRYTGWGRLSRKLINGIRDKQSGKTILDFLKSDGFANRNFMQLIHDDSLTFKEDIQKAQVSGQGDSLHEHIANLAGSPAIKKGILQTVKVVDELVKVMGRHKPENIVIEMARENQTTQKGQKNSRERMKRIEEGIKELGSQILKEHPVENTQLQNEKLYLYYLQNGRDMYVDQELDINRLSDYDVDHIVPQSFLKDDSIDNKVLTRSDKARGKSDNVPSEEVVKKMKNYWRQLLNAKLITQRKFDNLTKAERGGLSELDKAGFIKRQLVETRQITKHVAQILDSRMNTKYDENDKLIREVKVITLKSKLVSDFRKDFQFYKVREINNYHHAHDAYLNAVVGTALIKKYPKLESEFVYGDYKVYDVRKMIAKSEQEIGKATAKYFFYSNIMNFFKTEITLANGEIRKRPLIETNGETGEIVWDKGRDFATVRKVLSMPQVNIVKKTEVQTGGFSKESILPKRNSDKLIARKKDWDPKKYGGFDSPTVAYSVLVVAKVEKGKSKKLKSVKELLGITIMERSSFEKNPIDFLEAKGYKEVKKDLIIKLPKYSLFELENGRKRMLASAGELQKGNELALPSKYVNFLYLASHYEKLKGSPEDNEQKQLFVEQHKHYLDEIIEQISEFSKRVILADANLDKVLSAYNKHRDKPIREQAENIIHLFTLTNLGAPAAFKYFDTTIDRKRYTSTKEVLDATLIHQSITGLYETRIDLSQLGGDGGEAAAKGSSPAPGGTLGIEDEYRLHETSTEPDVSLGSTWLSDFPQAWAETGGMGLAVRQAPLIIPLKATSTPVSIQQYPMSHEARLGIKPHIQRLLDQGILVPCQSPWNTPLLPVKKPGTNDYRPVQDLREVNKRVEDIHPTVPNPYNLLSGLPPSHQWYTVLDLKDAFFCLRLHPTSQPLFAFEWRDPGMGISGQLTWTRLPQGFKNSPTLFNEALHRDLADFRIQHPDLILLQYVDDILLAATSELDCQQGTRALLQTLGDLGYRASAKKAQICQKQVKYLGYLLREGQRWLTEARKETVMGQPVPKTPRQLREFLGTAGFCRLWIPGFAEMAAPLYPLTKPGTLFSWGPDQQKAYQEIKQALLTAPALGLPDLTKPFELFVDEKQGYAKGVLTQKLGPWRRPVAYLSKKLDPVAAGWPPCLRMVAAIAVLTKDAGKLTMGQPLVILAPHAVEALVKQPPDRWLSNARMTHYQAMLLDTDRVQFGPVVALNPATLLPLPEEGAPHDCLEILAETHGTRPDLTDQPIPDADHTWYTDGSSFLQEGQRKAGAAVTTETEVIWAGALPAGTSAQRAELIALTQALKMAEGKRLNVYTDSRYAFATAHIHGEIYRRRGWLTSEGREIKNKSEILALLKALFLPKRLSIIHCLGHQKGDSAEARGNRLADQAAREAAIKTPPDTSTLLAGKRTADGSEFEKRTADGSEFESPKKKAKVE

SEQ ID NO: 2212 - protein, 2094 aa, synthetic construct; identical to SEQ ID NO: 2079
  source 1..2094: note = Description of Artificial Sequence: Synthetic polypeptide

SEQ ID NO: 2213 - protein, 2096 aa, synthetic construct
  source 1..2096: note = Description of Artificial Sequence: Synthetic polypeptide
MPAAKRVKLDGGDKKYSIGLDIGTNSVGWAVITDEYKVPSKKFKVLGNTDRHSIKKNLIGALLFDSGETAEATRLKRTARRRYTRRKNRICYLQEIFSNEMAKVDDSFFHRLEESFLVEEDKKHERHPIFGNIVDEVAYHEKYPTIYHLRKKLVDSTDKADLRLIYLALAHMIKFRGHFLIEGDLNPDNSDVDKLFIQLVQTYNQLFEENPINASGVDAKAILSARLSKSRRLENLIAQLPGEKKNGLFGNLIALSLGLTPNFKSNFDLAEDAKLQLSKDTYDDDLDNLLAQIGDQYADLFLAAKNLSDAILLSDILRVNTEITKAPLSASMIKRYDEHHQDLTLLKALVRQQLPEKYKEIFFDQSKNGYAGYIDGGASQEEFYKFIKPILEKMDGTEELLVKLNREDLLRKQRTFDNGSIPHQIHLGELHAILRRQEDFYPFLKDNREKIEKILTFRIPYYVGPLARGNSRFAWMTRKSEETITPWNFEEVVDKGASAQSFIERMTNFDKNLPNEKVLPKHSLLYEYFTVYNELTKVKYVTEGMRKPAFLSGEQKKAIVDLLFKTNRKVTVKQLKEDYFKKIECFDSVEISGVEDRFNASLGTYHDLLKIIKDKDFLDNEENEDILEDIVLTLTLFEDREMIEERLKTYAHLFDDKVMKQLKRRRYTGWGRLSRKLINGIRDKQSGKTILDFLKSDGFANRNFMQLIHDDSLTFKEDIQKAQVSGQGDSLHEHIANLAGSPAIKKGILQTVKVVDELVKVMGRHKPENIVIEMARENQTTQKGQKNSRERMKRIEEGIKELGSQILKEHPVENTQLQNEKLYLYYLQNGRDMYVDQELDINRLSDYDVDHIVPQSFLKDDSIDNKVLTRSDKARGKSDNVPSEEVVKKMKNYWRQLLNAKLITQRKFDNLTKAERGGLSELDKAGFIKRQLVETRQITKHVAQILDSRMNTKYDENDKLIREVKVITLKSKLVSDFRKDFQFYKVREINNYHHAHDAYLNAVVGTALIKKYPKLESEFVYGDYKVYDVRKMIAKSEQEIGKATAKYFFYSNIMNFFKTEITLANGEIRKRPLIETNGETGEIVWDKGRDFATVRKVLSMPQVNIVKKTEVQTGGFSKESILPKRNSDKLIARKKDWDPKKYGGFDSPTVAYSVLVVAKVEKGKSKKLKSVKELLGITIMERSSFEKNPIDFLEAKGYKEVKKDLIIKLPKYSLFELENGRKRMLASAGELQKGNELALPSKYVNFLYLASHYEKLKGSPEDNEQKQLFVEQHKHYLDEIIEQISEFSKRVILADANLDKVLSAYNKHRDKPIREQAENIIHLFTLTNLGAPAAFKYFDTTIDRKRYTSTKEVLDATLIHQSITGLYETRIDLSQLGGDGGEAAAKPAPGSSGGTLGIEDEYRLHETSTEPDVSLGSTWLSDFPQAWAETGGMGLAVRQAPLIIPLKATSTPVSIQQYPMSHEARLGIKPHIQRLLDQGILVPCQSPWNTPLLPVKKPGTNDYRPVQDLREVNKRVEDIHPTVPNPYNLLSGLPPSHQWYTVLDLKDAFFCLRLHPTSQPLFAFEWRDPGMGISGQLTWTRLPQGFKNSPTLFNEALHRDLADFRIQHPDLILLQYVDDILLAATSELDCQQGTRALLQTLGDLGYRASAKKAQICQKQVKYLGYLLREGQRWLTEARKETVMGQPVPKTPRQLREFLGTAGFCRLWIPGFAEMAAPLYPLTKPGTLFSWGPDQQKAYQEIKQALLTAPALGLPDLTKPFELFVDEKQGYAKGVLTQKLGPWRRPVAYLSKKLDPVAAGWPPCLRMVAAIAVLTKDAGKLTMGQPLVILAPHAVEALVKQPPDRWLSNARMTHYQAMLLDTDRVQFGPVVALNPATLLPLPEEGAPHDCLEILAETHGTRPDLTDQPIPDADHTWYTDGSSFLQEGQRKAGAAVTTETEVIWAGALPAGTSAQRAELIALTQALKMAEGKRLNVYTDSRYAFATAHIHGEIYRRRGWLTSEGREIKNKSEILALLKALFLPKRLSIIHCLGHQKGDSAEARGNRLADQAAREAAIKTPPDTSTLLAGKRTADGSEFEKRTADGSEFESPKKKAKVE

SEQ ID NO: 2214 - protein, 2096 aa, synthetic construct
  source 1..2096: note = Description of Artificial Sequence: Synthetic polypeptide
MPAAKRVKLDGGDKKYSIGLDIGTNSVGWAVITDEYKVPSKKFKVLGNTDRHSIKKNLIGALLFDSGETAEATRLKRTARRRYTRRKNRICYLQEIFSNEMAKVDDSFFHRLEESFLVEEDKKHERHPIFGNIVDEVAYHEKYPTIYHLRKKLVDSTDKADLRLIYLALAHMIKFRGHFLIEGDLNPDNSDVDKLFIQLVQTYNQLFEENPINASGVDAKAILSARLSKSRRLENLIAQLPGEKKNGLFGNLIALSLGLTPNFKSNFDLAEDAKLQLSKDTYDDDLDNLLAQIGDQYADLFLAAKNLSDAILLSDILRVNTEITKAPLSASMIKRYDEHHQDLTLLKALVRQQLPEKYKEIFFDQSKNGYAGYIDGGASQEEFYKFIKPILEKMDGTEELLVKLNREDLLRKQRTFDNGSIPHQIHLGELHAILRRQEDFYPFLKDNREKIEKILTFRIPYYVGPLARGNSRFAWMTRKSEETITPWNFEEVVDKGASAQSFIERMTNFDKNLPNEKVLPKHSLLYEYFTVYNELTKVKYVTEGMRKPAFLSGEQKKAIVDLLFKTNRKVTVKQLKEDYFKKIECFDSVEISGVEDRFNASLGTYHDLLKIIKDKDFLDNEENEDILEDIVLTLTLFEDREMIEERLKTYAHLFDDKVMKQLKRRRYTGWGRLSRKLINGIRDKQSGKTILDFLKSDGFANRNFMQLIHDDSLTFKEDIQKAQVSGQGDSLHEHIANLAGSPAIKKGILQTVKVVDELVKVMGRHKPENIVIEMARENQTTQKGQKNSRERMKRIEEGIKELGSQILKEHPVENTQLQNEKLYLYYLQNGRDMYVDQELDINRLSDYDVDHIVPQSFLKDDSIDNKVLTRSDKARGKSDNVPSEEVVKKMKNYWRQLLNAKLITQRKFDNLTKAERGGLSELDKAGFIKRQLVETRQITKHVAQILDSRMNTKYDENDKLIREVKVITLKSKLVSDFRKDFQFYKVREINNYHHAHDAYLNAVVGTALIKKYPKLESEFVYGDYKVYDVRKMIAKSEQEIGKATAKYFFYSNIMNFFKTEITLANGEIRKRPLIETNGETGEIVWDKGRDFATVRKVLSMPQVNIVKKTEVQTGGFSKESILPKRNSDKLIARKKDWDPKKYGGFDSPTVAYSVLVVAKVEKGKSKKLKSVKELLGITIMERSSFEKNPIDFLEAKGYKEVKKDLIIKLPKYSLFELENGRKRMLASAGELQKGNELALPSKYVNFLYLASHYEKLKGSPEDNEQKQLFVEQHKHYLDEIIEQISEFSKRVILADANLDKVLSAYNKHRDKPIREQAENIIHLFTLTNLGAPAAFKYFDTTIDRKRYTSTKEVLDATLIHQSITGLYETRIDLSQLGGDGGGSSGGGEAAAKGGTLGIEDEYRLHETSTEPDVSLGSTWLSDFPQAWAETGGMGLAVRQAPLIIPLKATSTPVSIQQYPMSHEARLGIKPHIQRLLDQGILVPCQSPWNTPLLPVKKPGTNDYRPVQDLREVNKRVEDIHPTVPNPYNLLSGLPPSHQWYTVLDLKDAFFCLRLHPTSQPLFAFEWRDPGMGISGQLTWTRLPQGFKNSPTLFNEALHRDLADFRIQHPDLILLQYVDDILLAATSELDCQQGTRALLQTLGDLGYRASAKKAQICQKQVKYLGYLLREGQRWLTEARKETVMGQPVPKTPRQLREFLGTAGFCRLWIPGFAEMAAPLYPLTKPGTLFSWGPDQQKAYQEIKQALLTAPALGLPDLTKPFELFVDEKQGYAKGVLTQKLGPWRRPVAYLSKKLDPVAAGWPPCLRMVAAIAVLTKDAGKLTMGQPLVILAPHAVEALVKQPPDRWLSNARMTHYQAMLLDTDRVQFGPVVALNPATLLPLPEEGAPHDCLEILAETHGTRPDLTDQPIPDADHTWYTDGSSFLQEGQRKAGAAVTTETEVIWAGALPAGTSAQRAELIALTQALKMAEGKRLNVYTDSRYAFATAHIHGEIYRRRGWLTSEGREIKNKSEILALLKALFLPKRLSIIHCLGHQKGDSAEARGNRLADQAAREAAIKTPPDTSTLLAGKRTADGSEFEKRTADGSEFESPKKKAKVE

SEQ ID NO: 2215 - protein, 2096 aa, synthetic construct
  source 1..2096: note = Description of Artificial Sequence: Synthetic polypeptide
MPAAKRVKLDGGDKKYSIGLDIGTNSVGWAVITDEYKVPSKKFKVLGNTDRHSIKKNLIGALLFDSGETAEATRLKRTARRRYTRRKNRICYLQEIFSNEMAKVDDSFFHRLEESFLVEEDKKHERHPIFGNIVDEVAYHEKYPTIYHLRKKLVDSTDKADLRLIYLALAHMIKFRGHFLIEGDLNPDNSDVDKLFIQLVQTYNQLFEENPINASGVDAKAILSARLSKSRRLENLIAQLPGEKKNGLFGNLIALSLGLTPNFKSNFDLAEDAKLQLSKDTYDDDLDNLLAQIGDQYADLFLAAKNLSDAILLSDILRVNTEITKAPLSASMIKRYDEHHQDLTLLKALVRQQLPEKYKEIFFDQSKNGYAGYIDGGASQEEFYKFIKPILEKMDGTEELLVKLNREDLLRKQRTFDNGSIPHQIHLGELHAILRRQEDFYPFLKDNREKIEKILTFRIPYYVGPLARGNSRFAWMTRKSEETITPWNFEEVVDKGASAQSFIERMTNFDKNLPNEKVLPKHSLLYEYFTVYNELTKVKYVTEGMRKPAFLSGEQKKAIVDLLFKTNRKVTVKQLKEDYFKKIECFDSVEISGVEDRFNASLGTYHDLLKIIKDKDFLDNEENEDILEDIVLTLTLFEDREMIEERLKTYAHLFDDKVMKQLKRRRYTGWGRLSRKLINGIRDKQSGKTILDFLKSDGFANRNFMQLIHDDSLTFKEDIQKAQVSGQGDSLHEHIANLAGSPAIKKGILQTVKVVDELVKVMGRHKPENIVIEMARENQTTQKGQKNSRERMKRIEEGIKELGSQILKEHPVENTQLQNEKLYLYYLQNGRDMYVDQELDINRLSDYDVDHIVPQSFLKDDSIDNKVLTRSDKARGKSDNVPSEEVVKKMKNYWRQLLNAKLITQRKFDNLTKAERGGLSELDKAGFIKRQLVETRQITKHVAQILDSRMNTKYDENDKLIREVKVITLKSKLVSDFRKDFQFYKVREINNYHHAHDAYLNAVVGTALIKKYPKLESEFVYGDYKVYDVRKMIAKSEQEIGKATAKYFFYSNIMNFFKTEITLANGEIRKRPLIETNGETGEIVWDKGRDFATVRKVLSMPQVNIVKKTEVQTGGFSKESILPKRNSDKLIARKKDWDPKKYGGFDSPTVAYSVLVVAKVEKGKSKKLKSVKELLGITIMERSSFEKNPIDFLEAKGYKEVKKDLIIKLPKYSLFELENGRKRMLASAGELQKGNELALPSKYVNFLYLASHYEKLKGSPEDNEQKQLFVEQHKHYLDEIIEQISEFSKRVILADANLDKVLSAYNKHRDKPIREQAENIIHLFTLTNLGAPAAFKYFDTTIDRKRYTSTKEVLDATLIHQSITGLYETRIDLSQLGGDGGGSSEAAAKPAPGGTLGIEDEYRLHETSTEPDVSLGSTWLSDFPQAWAETGGMGLAVRQAPLIIPLKATSTPVSIQQYPMSHEARLGIKPHIQRLLDQGILVPCQSPWNTPLLPVKKPGTNDYRPVQDLREVNKRVEDIHPTVPNPYNLLSGLPPSHQWYTVLDLKDAFFCLRLHPTSQPLFAFEWRDPGMGISGQLTWTRLPQGFKNSPTLFNEALHRDLADFRIQHPDLILLQYVDDILLAATSELDCQQGTRALLQTLGDLGYRASAKKAQICQKQVKYLGYLLREGQRWLTEARKETVMGQPVPKTPRQLREFLGTAGFCRLWIPGFAEMAAPLYPLTKPGTLFSWGPDQQKAYQEIKQALLTAPALGLPDLTKPFELFVDEKQGYAKGVLTQKLGPWRRPVAYLSKKLDPVAAGWPPCLRMVAAIAVLTKDAGKLTMGQPLVILAPHAVEALVKQPPDRWLSNARMTHYQAMLLDTDRVQFGPVVALNPATLLPLPEEGAPHDCLEILAETHGTRPDLTDQPIPDADHTWYTDGSSFLQEGQRKAGAAVTTETEVIWAGALPAGTSAQRAELIALTQALKMAEGKRLNVYTDSRYAFATAHIHGEIYRRRGWLTSEGREIKNKSEILALLKALFLPKRLSIIHCLGHQKGDSAEARGNRLADQAAREAAIKTPPDTSTLLAGKRTADGSEFEKRTADGSEFESPKKKAKVE

SEQ ID NO: 2216 - protein, 2091 aa, synthetic construct
  source 1..2091: note = Description of Artificial Sequence: Synthetic polypeptide
MPAAKRVKLDGGDKKYSIGLDIGTNSVGWAVITDEYKVPSKKFKVLGNTDRHSIKKNLIGALLFDSGETAEATRLKRTARRRYTRRKNRICYLQEIFSNEMAKVDDSFFHRLEESFLVEEDKKHERHPIFGNIVDEVAYHEKYPTIYHLRKKLVDSTDKADLRLIYLALAHMIKFRGHFLIEGDLNPDNSDVDKLFIQLVQTYNQLFEENPINASGVDAKAILSARLSKSRRLENLIAQLPGEKKNGLFGNLIALSLGLTPNFKSNFDLAEDAKLQLSKDTYDDDLDNLLAQIGDQYADLFLAAKNLSDAILLSDILRVNTEITKAPLSASMIKRYDEHHQDLTLLKALVRQQLPEKYKEIFFDQSKNGYAGYIDGGASQEEFYKFIKPILEKMDGTEELLVKLNREDLLRKQRTFDNGSIPHQIHLGELHAILRRQEDFYPFLKDNREKIEKILTFRIPYYVGPLARGNSRFAWMTRKSEETITPWNFEEVVDKGASAQSFIERMTNFDKNLPNEKVLPKHSLLYEYFTVYNELTKVKYVTEGMRKPAFLSGEQKKAIVDLLFKTNRKVTVKQLKEDYFKKIECFDSVEISGVEDRFNASLGTYHDLLKIIKDKDFLDNEENEDILEDIVLTLTLFEDREMIEERLKTYAHLFDDKVMKQLKRRRYTGWGRLSRKLINGIRDKQSGKTILDFLKSDGFANRNFMQLIHDDSLTFKEDIQKAQVSGQGDSLHEHIANLAGSPAIKKGILQTVKVVDELVKVMGRHKPENIVIEMARENQTTQKGQKNSRERMKRIEEGIKELGSQILKEHPVENTQLQNEKLYLYYLQNGRDMYVDQELDINRLSDYDVDHIVPQSFLKDDSIDNKVLTRSDKARGKSDNVPSEEVVKKMKNYWRQLLNAKLITQRKFDNLTKAERGGLSELDKAGFIKRQLVETRQITKHVAQILDSRMNTKYDENDKLIREVKVITLKSKLVSDFRKDFQFYKVREINNYHHAHDAYLNAVVGTALIKKYPKLESEFVYGDYKVYDVRKMIAKSEQEIGKATAKYFFYSNIMNFFKTEITLANGEIRKRPLIETNGETGEIVWDKGRDFATVRKVLSMPQVNIVKKTEVQTGGFSKESILPKRNSDKLIARKKDWDPKKYGGFDSPTVAYSVLVVAKVEKGKSKKLKSVKELLGITIMERSSFEKNPIDFLEAKGYKEVKKDLIIKLPKYSLFELENGRKRMLASAGELQKGNELALPSKYVNFLYLASHYEKLKGSPEDNEQKQLFVEQHKHYLDEIIEQISEFSKRVILADANLDKVLSAYNKHRDKPIREQAENIIHLFTLTNLGAPAAFKYFDTTIDRKRYTSTKEVLDATLIHQSITGLYETRIDLSQLGGDGGGGGGGGGGTLGIEDEYRLHETSTEPDVSLGSTWLSDFPQAWAETGGMGLAVRQAPLIIPLKATSTPVSIQQYPMSHEARLGIKPHIQRLLDQGILVPCQSPWNTPLLPVKKPGTNDYRPVQDLREVNKRVEDIHPTVPNPYNLLSGLPPSHQWYTVLDLKDAFFCLRLHPTSQPLFAFEWRDPGMGISGQLTWTRLPQGFKNSPTLFNEALHRDLADFRIQHPDLILLQYVDDILLAATSELDCQQGTRALLQTLGDLGYRASAKKAQICQKQVKYLGYLLREGQRWLTEARKETVMGQPVPKTPRQLREFLGTAGFCRLWIPGFAEMAAPLYPLTKPGTLFSWGPDQQKAYQEIKQALLTAPALGLPDLTKPFELFVDEKQGYAKGVLTQKLGPWRRPVAYLSKKLDPVAAGWPPCLRMVAAIAVLTKDAGKLTMGQPLVILAPHAVEALVKQPPDRWLSNARMTHYQAMLLDTDRVQFGPVVALNPATLLPLPEEGAPHDCLEILAETHGTRPDLTDQPIPDADHTWYTDGSSFLQEGQRKAGAAVTTETEVIWAGALPAGTSAQRAELIALTQALKMAEGKRLNVYTDSRYAFATAHIHGEIYRRRGWLTSEGREIKNKSEILALLKALFLPKRLSIIHCLGHQKGDSAEARGNRLADQAAREAAIKTPPDTSTLLAGKRTADGSEFEKRTADGSEFESPKKKAKVE

SEQ ID NO: 2217 - protein, 2094 aa, synthetic construct
  source 1..2094: note = Description of Artificial Sequence: Synthetic polypeptide
MPAAKRVKLDGGDKKYSIGLDIGTNSVGWAVITDEYKVPSKKFKVLGNTDRHSIKKNLIGALLFDSGETAEATRLKRTARRRYTRRKNRICYLQEIFSNEMAKVDDSFFHRLEESFLVEEDKKHERHPIFGNIVDEVAYHEKYPTIYHLRKKLVDSTDKADLRLIYLALAHMIKFRGHFLIEGDLNPDNSDVDKLFIQLVQTYNQLFEENPINASGVDAKAILSARLSKSRRLENLIAQLPGEKKNGLFGNLIALSLGLTPNFKSNFDLAEDAKLQLSKDTYDDDLDNLLAQIGDQYADLFLAAKNLSDAILLSDILRVNTEITKAPLSASMIKRYDEHHQDLTLLKALVRQQLPEKYKEIFFDQSKNGYAGYIDGGASQEEFYKFIKPILEKMDGTEELLVKLNREDLLRKQRTFDNGSIPHQIHLGELHAILRRQEDFYPFLKDNREKIEKILTFRIPYYVGPLARGNSRFAWMTRKSEETITPWNFEEVVDKGASAQSFIERMTNFDKNLPNEKVLPKHSLLYEYFTVYNELTKVKYVTEGMRKPAFLSGEQKKAIVDLLFKTNRKVTVKQLKEDYFKKIECFDSVEISGVEDRFNASLGTYHDLLKIIKDKDFLDNEENEDILEDIVLTLTLFEDREMIEERLKTYAHLFDDKVMKQLKRRRYTGWGRLSRKLINGIRDKQSGKTILDFLKSDGFANRNFMQLIHDDSLTFKEDIQKAQVSGQGDSLHEHIANLAGSPAIKKGILQTVKVVDELVKVMGRHKPENIVIEMARENQTTQKGQKNSRERMKRIEEGIKELGSQILKEHPVENTQLQNEKLYLYYLQNGRDMYVDQELDINRLSDYDVDHIVPQSFLKDDSIDNKVLTRSDKARGKSDNVPSEEVVKKMKNYWRQLLNAKLITQRKFDNLTKAERGGLSELDKAGFIKRQLVETRQITKHVAQILDSRMNTKYDENDKLIREVKVITLKSKLVSDFRKDFQFYKVREINNYHHAHDAYLNAVVGTALIKKYPKLESEFVYGDYKVYDVRKMIAKSEQEIGKATAKYFFYSNIMNFFKTEITLANGEIRKRPLIETNGETGEIVWDKGRDFATVRKVLSMPQVNIVKKTEVQTGGFSKESILPKRNSDKLIARKKDWDPKKYGGFDSPTVAYSVLVVAKVEKGKSKKLKSVKELLGITIMERSSFEKNPIDFLEAKGYKEVKKDLIIKLPKYSLFELENGRKRMLASAGELQKGNELALPSKYVNFLYLASHYEKLKGSPEDNEQKQLFVEQHKHYLDEIIEQISEFSKRVILADANLDKVLSAYNKHRDKPIREQAENIIHLFTLTNLGAPAAFKYFDTTIDRKRYTSTKEVLDATLIHQSITGLYETRIDLSQLGGDGGGGSGSSPAPGGTLGIEDEYRLHETSTEPDVSLGSTWLSDFPQAWAETGGMGLAVRQAPLIIPLKATSTPVSIQQYPMSHEARLGIKPHIQRLLDQGILVPCQSPWNTPLLPVKKPGTNDYRPVQDLREVNKRVEDIHPTVPNPYNLLSGLPPSHQWYTVLDLKDAFFCLRLHPTSQPLFAFEWRDPGMGISGQLTWTRLPQGFKNSPTLFNEALHRDLADFRIQHPDLILLQYVDDILLAATSELDCQQGTRALLQTLGDLGYRASAKKAQICQKQVKYLGYLLREGQRWLTEARKETVMGQPVPKTPRQLREFLGTAGFCRLWIPGFAEMAAPLYPLTKPGTLFSWGPDQQKAYQEIKQALLTAPALGLPDLTKPFELFVDEKQGYAKGVLTQKLGPWRRPVAYLSKKLDPVAAGWPPCLRMVAAIAVLTKDAGKLTMGQPLVILAPHAVEALVKQPPDRWLSNARMTHYQAMLLDTDRVQFGPVVALNPATLLPLPEEGAPHDCLEILAETHGTRPDLTDQPIPDADHTWYTDGSSFLQEGQRKAGAAVTTETEVIWAGALPAGTSAQRAELIALTQALKMAEGKRLNVYTDSRYAFATAHIHGEIYRRRGWLTSEGREIKNKSEILALLKALFLPKRLSIIHCLGHQKGDSAEARGNRLADQAAREAAIKTPPDTSTLLAGKRTADGSEFEKRTADGSEFESPKKKAKVE

SEQ ID NO: 2218 - protein, 2096 aa, synthetic construct
  source 1..2096: note = Description of Artificial Sequence: Synthetic polypeptide
MPAAKRVKLDGGDKKYSIGLDIGTNSVGWAVITDEYKVPSKKFKVLGNTDRHSIKKNLIGALLFDSGETAEATRLKRTARRRYTRRKNRICYLQEIFSNEMAKVDDSFFHRLEESFLVEEDKKHERHPIFGNIVDEVAYHEKYPTIYHLRKKLVDSTDKADLRLIYLALAHMIKFRGHFLIEGDLNPDNSDVDKLFIQLVQTYNQLFEENPINASGVDAKAILSARLSKSRRLENLIAQLPGEKKNGLFGNLIALSLGLTPNFKSNFDLAEDAKLQLSKDTYDDDLDNLLAQIGDQYADLFLAAKNLSDAILLSDILRVNTEITKAPLSASMIKRYDEHHQDLTLLKALVRQQLPEKYKEIFFDQSKNGYAGYIDGGASQEEFYKFIKPILEKMDGTEELLVKLNREDLLRKQRTFDNGSIPHQIHLGELHAILRRQEDFYPFLKDNREKIEKILTFRIPYYVGPLARGNSRFAWMTRKSEETITPWNFEEVVDKGASAQSFIERMTNFDKNLPNEKVLPKHSLLYEYFTVYNELTKVKYVTEGMRKPAFLSGEQKKAIVDLLFKTNRKVTVKQLKEDYFKKIECFDSVEISGVEDRFNASLGTYHDLLKIIKDKDFLDNEENEDILEDIVLTLTLFEDREMIEERLKTYAHLFDDKVMKQLKRRRYTGWGRLSRKLINGIRDKQSGKTILDFLKSDGFANRNFMQLIHDDSLTFKEDIQKAQVSGQGDSLHEHIANLAGSPAIKKGILQTVKVVDELVKVMGRHKPENIVIEMARENQTTQKGQKNSRERMKRIEEGIKELGSQILKEHPVENTQLQNEKLYLYYLQNGRDMYVDQELDINRLSDYDVDHIVPQSFLKDDSIDNKVLTRSDKARGKSDNVPSEEVVKKMKNYWRQLLNAKLITQRKFDNLTKAERGGLSELDKAGFIKRQLVETRQITKHVAQILDSRMNTKYDENDKLIREVKVITLKSKLVSDFRKDFQFYKVREINNYHHAHDAYLNAVVGTALIKKYPKLESEFVYGDYKVYDVRKMIAKSEQEIGKATAKYFFYSNIMNFFKTEITLANGEIRKRPLIETNGETGEIVWDKGRDFATVRKVLSMPQVNIVKKTEVQTGGFSKESILPKRNSDKLIARKKDWDPKKYGGFDSPTVAYSVLVVAKVEKGKSKKLKSVKELLGITIMERSSFEKNPIDFLEAKGYKEVKKDLIIKLPKYSLFELENGRKRMLASAGELQKGNELALPSKYVNFLYLASHYEKLKGSPEDNEQKQLFVEQHKHYLDEIIEQISEFSKRVILADANLDKVLSAYNKHRDKPIREQAENIIHLFTLTNLGAPAAFKYFDTTIDRKRYTSTKEVLDATLIHQSITGLYETRIDLSQLGGDGGEAAAKGGSGGGGGTLGIEDEYRLHETSTEPDVSLGSTWLSDFPQAWAETGGMGLAVRQAPLIIPLKATSTPVSIQQYPMSHEARLGIKPHIQRLLDQGILVPCQSPWNTPLLPVKKPGTNDYRPVQDLREVNKRVEDIHPTVPNPYNLLSGLPPSHQWYTVLDLKDAFFCLRLHPTSQPLFAFEWRDPGMGISGQLTWTRLPQGFKNSPTLFNEALHRDLADFRIQHPDLILLQYVDDILLAATSELDCQQGTRALLQTLGDLGYRASAKKAQICQKQVKYLGYLLREGQRWLTEARKETVMGQPVPKTPRQLREFLGTAGFCRLWIPGFAEMAAPLYPLTKPGTLFSWGPDQQKAYQEIKQALLTAPALGLPDLTKPFELFVDEKQGYAKGVLTQKLGPWRRPVAYLSKKLDPVAAGWPPCLRMVAAIAVLTKDAGKLTMGQPLVILAPHAVEALVKQPPDRWLSNARMTHYQAMLLDTDRVQFGPVVALNPATLLPLPEEGAPHDCLEILAETHGTRPDLTDQPIPDADHTWYTDGSSFLQEGQRKAGAAVTTETEVIWAGALPAGTSAQRAELIALTQALKMAEGKRLNVYTDSRYAFATAHIHGEIYRRRGWLTSEGREIKNKSEILALLKALFLPKRLSIIHCLGHQKGDSAEARGNRLADQAAREAAIKTPPDTSTLLAGKRTADGSEFEKRTADGSEFESPKKKAKVE

SEQ ID NO: 2219 - protein, 2094 aa, synthetic construct
  source 1..2094: note = Description of Artificial Sequence: Synthetic polypeptide
MPAAKRVKLDGGDKKYSIGLDIGTNSVGWAVITDEYKVPSKKFKVLGNTDRHSIKKNLIGALLFDSGETAEATRLKRTARRRYTRRKNRICYLQEIFSNEMAKVDDSFFHRLEESFLVEEDKKHERHPIFGNIVDEVAYHEKYPTIYHLRKKLVDSTDKADLRLIYLALAHMIKFRGHFLIEGDLNPDNSDVDKLFIQLVQTYNQLFEENPINASGVDAKAILSARLSKSRRLENLIAQLPGEKKNGLFGNLIALSLGLTPNFKSNFDLAEDAKLQLSKDTYDDDLDNLLAQIGDQYADLFLAAKNLSDAILLSDILRVNTEITKAPLSASMIKRYDEHHQDLTLLKALVRQQLPEKYKEIFFDQSKNGYAGYIDGGASQEEFYKFIKPILEKMDGTEELLVKLNREDLLRKQRTFDNGSIPHQIHLGELHAILRRQEDFYPFLKDNREKIEKILTFRIPYYVGPLARGNSRFAWMTRKSEETITPWNFEEVVDKGASAQSFIERMTNFDKNLPNEKVLPKHSLLYEYFTVYNELTKVKYVTEGMRKPAFLSGEQKKAIVDLLFKTNRKVTVKQLKEDYFKKIECFDSVEISGVEDRFNASLGTYHDLLKIIKDKDFLDNEENEDILEDIVLTLTLFEDREMIEERLKTYAHLFDDKVMKQLKRRRYTGWGRLSRKLINGIRDKQSGKTILDFLKSDGFANRNFMQLIHDDSLTFKEDIQKAQVSGQGDSLHEHIANLAGSPAIKKGILQTVKVVDELVKVMGRHKPENIVIEMARENQTTQKGQKNSRERMKRIEEGIKELGSQILKEHPVENTQLQNEKLYLYYLQNGRDMYVDQELDINRLSDYDVDHIVPQSFLKDDSIDNKVLTRSDKARGKSDNVPSEEVVKKMKNYWRQLLNAKLITQRKFDNLTKAERGGLSELDKAGFIKRQLVETRQITKHVAQILDSRMNTKYDENDKLIREVKVITLKSKLVSDFRKDFQFYKVREINNYHHAHDAYLNAVVGTALIKKYPKLESEFVYGDYKVYDVRKMIAKSEQEIGKATAKYFFYSNIMNFFKTEITLANGEIRKRPLIETNGETGEIVWDKGRDFATVRKVLSMPQVNIVKKTEVQTGGFSKESILPKRNSDKLIARKKDWDPKKYGGFDSPTVAYSVLVVAKVEKGKSKKLKSVKELLGITIMERSSFEKNPIDFLEAKGYKEVKKDLIIKLPKYSLFELENGRKRMLASAGELQKGNELALPSKYVNFLYLASHYEKLKGSPEDNEQKQLFVEQHKHYLDEIIEQISEFSKRVILADANLDKVLSAYNKHRDKPIREQAENIIHLFTLTNLGAPAAFKYFDTTIDRKRYTSTKEVLDATLIHQSITGLYETRIDLSQLGGDGGGSSGSSGSSGGTLGIEDEYRLHETSTEPDVSLGSTWLSDFPQAWAETGGMGLAVRQAPLIIPLKATSTPVSIQQYPMSHEARLGIKPHIQRLLDQGILVPCQSPWNTPLLPVKKPGTNDYRPVQDLREVNKRVEDIHPTVPNPYNLLSGLPPSHQWYTVLDLKDAFFCLRLHPTSQPLFAFEWRDPGMGISGQLTWTRLPQGFKNSPTLFNEALHRDLADFRIQHPDLILLQYVDDILLAATSELDCQQGTRALLQTLGDLGYRASAKKAQICQKQVKYLGYLLREGQRWLTEARKETVMGQPVPKTPRQLREFLGTAGFCRLWIPGFAEMAAPLYPLTKPGTLFSWGPDQQKAYQEIKQALLTAPALGLPDLTKPFELFVDEKQGYAKGVLTQKLGPWRRPVAYLSKKLDPVAAGWPPCLRMVAAIAVLTKDAGKLTMGQPLVILAPHAVEALVKQPPDRWLSNARMTHYQAMLLDTDRVQFGPVVALNPATLLPLPEEGAPHDCLEILAETHGTRPDLTDQPIPDADHTWYTDGSSFLQEGQRKAGAAVTTETEVIWAGALPAGTSAQRAELIALTQALKMAEGKRLNVYTDSRYAFATAHIHGEIYRRRGWLTSEGREIKNKSEILALLKALFLPKRLSIIHCLGHQKGDSAEARGNRLADQAAREAAIKTPPDTSTLLAGKRTADGSEFEKRTADGSEFESPKKKAKVE

SEQ ID NO: 2220 - protein, 2097 aa, synthetic construct
  source 1..2097: note = Description of Artificial Sequence: Synthetic polypeptide
MPAAKRVKLDGGDKKYSIGLDIGTNSVGWAVITDEYKVPSKKFKVLGNTDRHSIKKNLIGALLFDSGETAEATRLKRTARRRYTRRKNRICYLQEIFSNEMAKVDDSFFHRLEESFLVEEDKKHERHPIFGNIVDEVAYHEKYPTIYHLRKKLVDSTDKADLRLIYLALAHMIKFRGHFLIEGDLNPDNSDVDKLFIQLVQTYNQLFEENPINASGVDAKAILSARLSKSRRLENLIAQLPGEKKNGLFGNLIALSLGLTPNFKSNFDLAEDAKLQLSKDTYDDDLDNLLAQIGDQYADLFLAAKNLSDAILLSDILRVNTEITKAPLSASMIKRYDEHHQDLTLLKALVRQQLPEKYKEIFFDQSKNGYAGYIDGGASQEEFYKFIKPILEKMDGTEELLVKLNREDLLRKQRTFDNGSIPHQIHLGELHAILRRQEDFYPFLKDNREKIEKILTFRIPYYVGPLARGNSRFAWMTRKSEETITPWNFEEVVDKGASAQSFIERMTNFDKNLPNEKVLPKHSLLYEYFTVYNELTKVKYVTEGMRKPAFLSGEQKKAIVDLLFKTNRKVTVKQLKEDYFKKIECFDSVEISGVEDRFNASLGTYHDLLKIIKDKDFLDNEENEDILEDIVLTLTLFEDREMIEERLKTYAHLFDDKVMKQLKRRRYTGWGRLSRKLINGIRDKQSGKTILDFLKSDGFANRNFMQLIHDDSLTFKEDIQKAQVSGQGDSLHEHIANLAGSPAIKKGILQTVKVVDELVKVMGRHKPENIVIEMARENQTTQKGQKNSRERMKRIEEGIKELGSQILKEHPVENTQLQNEKLYLYYLQNGRDMYVDQELDINRLSDYDVDHIVPQSFLKDDSIDNKVLTRSDKARGKSDNVPSEEVVKKMKNYWRQLLNAKLITQRKFDNLTKAERGGLSELDKAGFIKRQLVETRQITKHVAQILDSRMNTKYDENDKLIREVKVITLKSKLVSDFRKDFQFYKVREINNYHHAHDAYLNAVVGTALIKKYPKLESEFVYGDYKVYDVRKMIAKSEQEIGKATAKYFFYSNIMNFFKTEITLANGEIRKRPLIETNGETGEIVWDKGRDFATVRKVLSMPQVNIVKKTEVQTGGFSKESILPKRNSDKLIARKKDWDPKKYGGFDSPTVAYSVLVVAKVEKGKSKKLKSVKELLGITIMERSSFEKNPIDFLEAKGYKEVKKDLIIKLPKYSLFELENGRKRMLASAGELQKGNELALPSKYVNFLYLASHYEKLKGSPEDNEQKQLFVEQHKHYLDEIIEQISEFSKRVILADANLDKVLSAYNKHRDKPIREQAENIIHLFTLTNLGAPAAFKYFDTTIDRKRYTSTKEVLDATLIHQSITGLYETRIDLSQLGGDGGGSAGSAAGSGEFGGTLGIEDEYRLHETSTEPDVSLGSTWLSDFPQAWAETGGMGLAVRQAPLIIPLKATSTPVSIQQYPMSHEARLGIKPHIQRLLDQGILVPCQSPWNTPLLPVKKPGTNDYRPVQDLREVNKRVEDIHPTVPNPYNLLSGLPPSHQWYTVLDLKDAFFCLRLHPTSQPLFAFEWRDPGMGISGQLTWTRLPQGFKNSPTLFNEALHRDLADFRIQHPDLILLQYVDDILLAATSELDCQQGTRALLQTLGDLGYRASAKKAQICQKQVKYLGYLLREGQRWLTEARKETVMGQPVPKTPRQLREFLGTAGFCRLWIPGFAEMAAPLYPLTKPGTLFSWGPDQQKAYQEIKQALLTAPALGLPDLTKPFELFVDEKQGYAKGVLTQKLGPWRRPVAYLSKKLDPVAAGWPPCLRMVAAIAVLTKDAGKLTMGQPLVILAPHAVEALVKQPPDRWLSNARMTHYQAMLLDTDRVQFGPVVALNPATLLPLPEEGAPHDCLEILAETHGTRPDLTDQPIPDADHTWYTDGSSFLQEGQRKAGAAVTTETEVIWAGALPAGTSAQRAELIALTQALKMAEGKRLNVYTDSRYAFATAHIHGEIYRRRGWLTSEGREIKNKSEILALLKALFLPKRLSIIHCLGHQKGDSAEARGNRLADQAAREAAIKTPPDTSTLLAGKRTADGSEFEKRTADGSEFESPKKKAKVE

SEQ ID NO: 2221 - protein, 2090 aa, synthetic construct
  source 1..2090: note = Description of Artificial Sequence: Synthetic polypeptide
MPAAKRVKLDGGDKKYSIGLDIGTNSVGWAVITDEYKVPSKKFKVLGNTDRHSIKKNLIGALLFDSGETAEATRLKRTARRRYTRRKNRICYLQEIFSNEMAKVDDSFFHRLEESFLVEEDKKHERHPIFGNIVDEVAYHEKYPTIYHLRKKLVDSTDKADLRLIYLALAHMIKFRGHFLIEGDLNPDNSDVDKLFIQLVQTYNQLFEENPINASGVDAKAILSARLSKSRRLENLIAQLPGEKKNGLFGNLIALSLGLTPNFKSNFDLAEDAKLQLSKDTYDDDLDNLLAQIGDQYADLFLAAKNLSDAILLSDILRVNTEITKAPLSASMIKRYDEHHQDLTLLKALVRQQLPEKYKEIFFDQSKNGYAGYIDGGASQEEFYKFIKPILEKMDGTEELLVKLNREDLLRKQRTFDNGSIPHQIHLGELHAILRRQEDFYPFLKDNREKIEKILTFRIPYYVGPLARGNSRFAWMTRKSEETITPWNFEEVVDKGASAQSFIERMTNFDKNLPNEKVLPKHSLLYEYFTVYNELTKVKYVTEGMRKPAFLSGEQKKAIVDLLFKTNRKVTVKQLKEDYFKKIECFDSVEISGVEDRFNASLGTYHDLLKIIKDKDFLDNEENEDILEDIVLTLTLFEDREMIEERLKTYAHLFDDKVMKQLKRRRYTGWGRLSRKLINGIRDKQSGKTILDFLKSDGFANRNFMQLIHDDSLTFKEDIQKAQVSGQGDSLHEHIANLAGSPAIKKGILQTVKVVDELVKVMGRHKPENIVIEMARENQTTQKGQKNSRERMKRIEEGIKELGSQILKEHPVENTQLQNEKLYLYYLQNGRDMYVDQELDINRLSDYDVDHIVPQSFLKDDSIDNKVLTRSDKARGKSDNVPSEEVVKKMKNYWRQLLNAKLITQRKFDNLTKAERGGLSELDKAGFIKRQLVETRQITKHVAQILDSRMNTKYDENDKLIREVKVITLKSKLVSDFRKDFQFYKVREINNYHHAHDAYLNAVVGTALIKKYPKLESEFVYGDYKVYDVRKMIAKSEQEIGKATAKYFFYSNIMNFFKTEITLANGEIRKRPLIETNGETGEIVWDKGRDFATVRKVLSMPQVNIVKKTEVQTGGFSKESILPKRNSDKLIARKKDWDPKKYGGFDSPTVAYSVLVVAKVEKGKSKKLKSVKELLGITIMERSSFEKNPIDFLEAKGYKEVKKDLIIKLPKYSLFELENGRKRMLASAGELQKGNELALPSKYVNFLYLASHYEKLKGSPEDNEQKQLFVEQHKHYLDEIIEQISEFSKRVILADANLDKVLSAYNKHRDKPIREQAENIIHLFTLTNLGAPAAFKYFDTTIDRKRYTSTKEVLDATLIHQSITGLYETRIDLSQLGGDGGGGGGGGGTLGIEDEYRLHETSTEPDVSLGSTWLSDFPQAWAETGGMGLAVRQAPLIIPLKATSTPVSIQQYPMSHEARLGIKPHIQRLLDQGILVPCQSPWNTPLLPVKKPGTNDYRPVQDLREVNKRVEDIHPTVPNPYNLLSGLPPSHQWYTVLDLKDAFFCLRLHPTSQPLFAFEWRDPGMGISGQLTWTRLPQGFKNSPTLFNEALHRDLADFRIQHPDLILLQYVDDILLAATSELDCQQGTRALLQTLGDLGYRASAKKAQICQKQVKYLGYLLREGQRWLTEARKETVMGQPVPKTPRQLREFLGTAGFCRLWIPGFAEMAAPLYPLTKPGTLFSWGPDQQKAYQEIKQALLTAPALGLPDLTKPFELFVDEKQGYAKGVLTQKLGPWRRPVAYLSKKLDPVAAGWPPCLRMVAAIAVLTKDAGKLTMGQPLVILAPHAVEALVKQPPDRWLSNARMTHYQAMLLDTDRVQFGPVVALNPATLLPLPEEGAPHDCLEILAETHGTRPDLTDQPIPDADHTWYTDGSSFLQEGQRKAGAAVTTETEVIWAGALPAGTSAQRAELIALTQALKMAEGKRLNVYTDSRYAFATAHIHGEIYRRRGWLTSEGREIKNKSEILALLKALFLPKRLSIIHCLGHQKGDSAEARGNRLADQAAREAAIKTPPDTSTLLAGKRTADGSEFEKRTADGSEFESPKKKAKVE

SEQ ID NO: 2222 - protein, 2094 aa, synthetic construct
  source 1..2094: note = Description of Artificial Sequence: Synthetic polypeptide
MPAAKRVKLDGGDKKYSIGLDIGTNSVGWAVITDEYKVPSKKFKVLGNTDRHSIKKNLIGALLFDSGETAEATRLKRTARRRYTRRKNRICYLQEIFSNEMAKVDDSFFHRLEESFLVEEDKKHERHPIFGNIVDEVAYHEKYPTIYHLRKKLVDSTDKADLRLIYLALAHMIKFRGHFLIEGDLNPDNSDVDKLFIQLVQTYNQLFEENPINASGVDAKAILSARLSKSRRLENLIAQLPGEKKNGLFGNLIALSLGLTPNFKSNFDLAEDAKLQLSKDTYDDDLDNLLAQIGDQYADLFLAAKNLSDAILLSDILRVNTEITKAPLSASMIKRYDEHHQDLTLLKALVRQQLPEKYKEIFFDQSKNGYAGYIDGGASQEEFYKFIKPILEKMDGTEELLVKLNREDLLRKQRTFDNGSIPHQIHLGELHAILRRQEDFYPFLKDNREKIEKILTFRIPYYVGPLARGNSRFAWMTRKSEETITPWNFEEVVDKGASAQSFIERMTNFDKNLPNEKVLPKHSLLYEYFTVYNELTKVKYVTEGMRKPAFLSGEQKKAIVDLLFKTNRKVTVKQLKEDYFKKIECFDSVEISGVEDRFNASLGTYHDLLKIIKDKDFLDNEENEDILEDIVLTLTLFEDREMIEERLKTYAHLFDDKVMKQLKRRRYTGWGRLSRKLINGIRDKQSGKTILDFLKSDGFANRNFMQLIHDDSLTFKEDIQKAQVSGQGDSLHEHIANLAGSPAIKKGILQTVKVVDELVKVMGRHKPENIVIEMARENQTTQKGQKNSRERMKRIEEGIKELGSQILKEHPVENTQLQNEKLYLYYLQNGRDMYVDQELDINRLSDYDVDHIVPQSFLKDDSIDNKVLTRSDKARGKSDNVPSEEVVKKMKNYWRQLLNAKLITQRKFDNLTKAERGGLSELDKAGFIKRQLVETRQITKHVAQILDSRMNTKYDENDKLIREVKVITLKSKLVSDFRKDFQFYKVREINNYHHAHDAYLNAVVGTALIKKYPKLESEFVYGDYKVYDVRKMIAKSEQEIGKATAKYFFYSNIMNFFKTEITLANGEIRKRPLIETNGETGEIVWDKGRDFATVRKVLSMPQVNIVKKTEVQTGGFSKESILPKRNSDKLIARKKDWDPKKYGGFDSPTVAYSVLVVAKVEKGKSKKLKSVKELLGITIMERSSFEKNPIDFLEAKGYKEVKKDLIIKLPKYSLFELENGRKRMLASAGELQKGNELALPSKYVNFLYLASHYEKLKGSPEDNEQKQLFVEQHKHYLDEIIEQISEFSKRVILADANLDKVLSAYNKHRDKPIREQAENIIHLFTLTNLGAPAAFKYFDTTIDRKRYTSTKEVLDATLIHQSITGLYETRIDLSQLGGDGGGSSGGSPAPGGTLGIEDEYRLHETSTEPDVSLGSTWLSDFPQAWAETGGMGLAVRQAPLIIPLKATSTPVSIQQYPMSHEARLGIKPHIQRLLDQGILVPCQSPWNTPLLPVKKPGTNDYRPVQDLREVNKRVEDIHPTVPNPYNLLSGLPPSHQWYTVLDLKDAFFCLRLHPTSQPLFAFEWRDPGMGISGQLTWTRLPQGFKNSPTLFNEALHRDLADFRIQHPDLILLQYVDDILLAATSELDCQQGTRALLQTLGDLGYRASAKKAQICQKQVKYLGYLLREGQRWLTEARKETVMGQPVPKTPRQLREFLGTAGFCRLWIPGFAEMAAPLYPLTKPGTLFSWGPDQQKAYQEIKQALLTAPALGLPDLTKPFELFVDEKQGYAKGVLTQKLGPWRRPVAYLSKKLDPVAAGWPPCLRMVAAIAVLTKDAGKLTMGQPLVILAPHAVEALVKQPPDRWLSNARMTHYQAMLLDTDRVQFGPVVALNPATLLPLPEEGAPHDCLEILAETHGTRPDLTDQPIPDADHTWYTDGSSFLQEGQRKAGAAVTTETEVIWAGALPAGTSAQRAELIALTQALKMAEGKRLNVYTDSRYAFATAHIHGEIYRRRGWLTSEGREIKNKSEILALLKALFLPKRLSIIHCLGHQKGDSAEARGNRLADQAAREAAIKTPPDTSTLLAGKRTADGSEFEKRTADGSEFESPKKKAKVE

SEQ ID NO: 2223 - protein, 2096 aa, synthetic construct
  source 1..2096: note = Description of Artificial Sequence: Synthetic polypeptide
MPAAKRVKLDGGDKKYSIGLDIGTNSVGWAVITDEYKVPSKKFKVLGNTDRHSIKKNLIGALLFDSGETAEATRLKRTARRRYTRRKNRICYLQEIFSNEMAKVDDSFFHRLEESFLVEEDKKHERHPIFGNIVDEVAYHEKYPTIYHLRKKLVDSTDKADLRLIYLALAHMIKFRGHFLIEGDLNPDNSDVDKLFIQLVQTYNQLFEENPINASGVDAKAILSARLSKSRRLENLIAQLPGEKKNGLFGNLIALSLGLTPNFKSNFDLAEDAKLQLSKDTYDDDLDNLLAQIGDQYADLFLAAKNLSDAILLSDILRVNTEITKAPLSASMIKRYDEHHQDLTLLKALVRQQLPEKYKEIFFDQSKNGYAGYIDGGASQEEFYKFIKPILEKMDGTEELLVKLNREDLLRKQRTFDNGSIPHQIHLGELHAILRRQEDFYPFLKDNREKIEKILTFRIPYYVGPLARGNSRFAWMTRKSEETITPWNFEEVVDKGASAQSFIERMTNFDKNLPNEKVLPKHSLLYEYFTVYNELTKVKYVTEGMRKPAFLSGEQKKAIVDLLFKTNRKVTVKQLKEDYFKKIECFDSVEISGVEDRFNASLGTYHDLLKIIKDKDFLDNEENEDILEDIVLTLTLFEDREMIEERLKTYAHLFDDKVMKQLKRRRYTGWGRLSRKLINGIRDKQSGKTILDFLKSDGFANRNFMQLIHDDSLTFKEDIQKAQVSGQGDSLHEHIANLAGSPAIKKGILQTVKVVDELVKVMGRHKPENIVIEMARENQTTQKGQKNSRERMKRIEEGIKELGSQILKEHPVENTQLQNEKLYLYYLQNGRDMYVDQELDINRLSDYDVDHIVPQSFLKDDSIDNKVLTRSDKARGKSDNVPSEEVVKKMKNYWRQLLNAKLITQRKFDNLTKAERGGLSELDKAGFIKRQLVETRQITKHVAQILDSRMNTKYDENDKLIREVKVITLKSKLVSDFRKDFQFYKVREINNYHHAHDAYLNAVVGTALIKKYPKLESEFVYGDYKVYDVRKMIAKSEQEIGKATAKYFFYSNIMNFFKTEITLANGEIRKRPLIETNGETGEIVWDKGRDFATVRKVLSMPQVNIVKKTEVQTGGFSKESILPKRNSDKLIARKKDWDPKKYGGFDSPTVAYSVLVVAKVEKGKSKKLKSVKELLGITIMERSSFEKNPIDFLEAKGYKEVKKDLIIKLPKYSLFELENGRKRMLASAGELQKGNELALPSKYVNFLYLASHYEKLKGSPEDNEQKQLFVEQHKHYLDEIIEQISEFSKRVILADANLDKVLSAYNKHRDKPIREQAENIIHLFTLTNLGAPAAFKYFDTTIDRKRYTSTKEVLDATLIHQSITGLYETRIDLSQLGGDGGEAAAKPAPGGGGGTLNIEDEYRLHETSKEPDVSLGSTWLSDFPQAWAETGGMGLAVRQAPLIIPLKATSTPVSIKQYPMSQEARLGIKPHIQRLLDQGILVPCQSPWNTPLLPVKKPGTNDYRPVQDLREVNKRVEDIHPTVPNPYNLLSGLPPSHQWYTVLDLKDAFFCLRLHPTSQPLFAFEWRDPEMGISGQLTWTRLPQGFKNSPTLFDEALHRDLAGFRIQHPDLILLQYVDDLLLAATSELDCQQGTRALLQTLGDLGYRASAKKAQICQKQVKYLGYLLKEGQRWLTEARKETVMGQPIPKTPRQLREFLGTAGFCRLWIPGFAEMAAPLYPLTKTGTLFNWGPDQQKAFQEIKQALLTAPALGLPDLTKPFELFVDEKQGYAKGVLTQKLGPWRRPVAYLSKKLDPVAAGWPPCLRMVAAIAVLTKDAGKLTMGQPLVILAPHAVEALVKQPPDRWLSNARMTHYQALLLDTDRVQFGPVVALNPATLLPLPEEGLQHDCLDILAEAHGTRSDLMDQPLPDADHTWYTDGSSFLQEGQRKAGAAVTTETEVIWARALPAGTSAQRAELIALTQALKMAEGKKLNVYTDSRYAFATAHIHGEIYRRRGLLTSEGKEIKNKDEILALLKALFLPKRLSIIHCPGHQKGNSAEARGNRMADQAAREVATRETPETSTLLAGKRTADGSEFEKRTADGSEFESPKKKAKVE

SEQ ID NO: 2224 - protein, 2115 aa, synthetic construct
  source 1..2115: note = Description of Artificial Sequence: Synthetic polypeptide
MPAAKRVKLDGGDKKYSIGLDIGTNSVGWAVITDEYKVPSKKFKVLGNTDRHSIKKNLIGALLFDSGETAEATRLKRTARRRYTRRKNRICYLQEIFSNEMAKVDDSFFHRLEESFLVEEDKKHERHPIFGNIVDEVAYHEKYPTIYHLRKKLVDSTDKADLRLIYLALAHMIKFRGHFLIEGDLNPDNSDVDKLFIQLVQTYNQLFEENPINASGVDAKAILSARLSKSRRLENLIAQLPGEKKNGLFGNLIALSLGLTPNFKSNFDLAEDAKLQLSKDTYDDDLDNLLAQIGDQYADLFLAAKNLSDAILLSDILRVNTEITKAPLSASMIKRYDEHHQDLTLLKALVRQQLPEKYKEIFFDQSKNGYAGYIDGGASQEEFYKFIKPILEKMDGTEELLVKLNREDLLRKQRTFDNGSIPHQIHLGELHAILRRQEDFYPFLKDNREKIEKILTFRIPYYVGPLARGNSRFAWMTRKSEETITPWNFEEVVDKGASAQSFIERMTNFDKNLPNEKVLPKHSLLYEYFTVYNELTKVKYVTEGMRKPAFLSGEQKKAIVDLLFKTNRKVTVKQLKEDYFKKIECFDSVEISGVEDRFNASLGTYHDLLKIIKDKDFLDNEENEDILEDIVLTLTLFEDREMIEERLKTYAHLFDDKVMKQLKRRRYTGWGRLSRKLINGIRDKQSGKTILDFLKSDGFANRNFMQLIHDDSLTFKEDIQKAQVSGQGDSLHEHIANLAGSPAIKKGILQTVKVVDELVKVMGRHKPENIVIEMARENQTTQKGQKNSRERMKRIEEGIKELGSQILKEHPVENTQLQNEKLYLYYLQNGRDMYVDQELDINRLSDYDVDHIVPQSFLKDDSIDNKVLTRSDKARGKSDNVPSEEVVKKMKNYWRQLLNAKLITQRKFDNLTKAERGGLSELDKAGFIKRQLVETRQITKHVAQILDSRMNTKYDENDKLIREVKVITLKSKLVSDFRKDFQFYKVREINNYHHAHDAYLNAVVGTALIKKYPKLESEFVYGDYKVYDVRKMIAKSEQEIGKATAKYFFYSNIMNFFKTEITLANGEIRKRPLIETNGETGEIVWDKGRDFATVRKVLSMPQVNIVKKTEVQTGGFSKESILPKRNSDKLIARKKDWDPKKYGGFDSPTVAYSVLVVAKVEKGKSKKLKSVKELLGITIMERSSFEKNPIDFLEAKGYKEVKKDLIIKLPKYSLFELENGRKRMLASAGELQKGNELALPSKYVNFLYLASHYEKLKGSPEDNEQKQLFVEQHKHYLDEIIEQISEFSKRVILADANLDKVLSAYNKHRDKPIREQAENIIHLFTLTNLGAPAAFKYFDTTIDRKRYTSTKEVLDATLIHQSITGLYETRIDLSQLGGDGGGGGGSGGGGSGGGGSGGGGSGGGGSGGGGSGGTLNIEDEYRLHETSKEPDVSLGSTWLSDFPQAWAETGGMGLAVRQAPLIIPLKATSTPVSIKQYPMSQEARLGIKPHIQRLLDQGILVPCQSPWNTPLLPVKKPGTNDYRPVQDLREVNKRVEDIHPTVPNPYNLLSGLPPSHQWYTVLDLKDAFFCLRLHPTSQPLFAFEWRDPEMGISGQLTWTRLPQGFKNSPTLFNEALHRDLAGFRIQHPDLILLQYVDDLLLAATSELDCQQGTRALLQTLGDLGYRASAKKAQICQKQVKYLGYLLKEGQRWLTEARKETVMGQPIPKTPRQLREFLGTAGFCRLWIPGFAEMAAPLYPLTKPGTLFNWGPDQQKAFQEIKQALLTAPALGLPDLTKPFELFVDEKQGYAKGVLTQKLGPWRRPVAYLSKKLDPVAAGWPPCLRMVAAIAVLTKDAGKLTMGQPLVILAPHAVEALVKQPPDRWLSNARMTHYQALLLDTDRVQFGPVVALNPATLLPLPEEGLQHDCLDILAEAHGTRSDLMDQPLPDADHTWYTDGSSFLQEGQRKAGAAVTTETEVIWARALPAGTSAQRAELIALTQALKMAEGKKLNVYTDSRYAFATAHIHGEIYRRRGWLTSEGKEIKNKDEILALLKALFLPKRLSIIHCPGHQKGNSAEARGNRMADQAAREVATRETPETSTLLAGKRTADGSEFEKRTADGSEFESPKKKAKVE

SEQ ID NO: 2225 - protein, 2096 aa, synthetic construct
  source 1..2096: note = Description of Artificial Sequence: Synthetic polypeptide
MPAAKRVKLDGGDKKYSIGLDIGTNSVGWAVITDEYKVPSKKFKVLGNTDRHSIKKNLIGALLFDSGETAEATRLKRTARRRYTRRKNRICYLQEIFSNEMAKVDDSFFHRLEESFLVEEDKKHERHPIFGNIVDEVAYHEKYPTIYHLRKKLVDSTDKADLRLIYLALAHMIKFRGHFLIEGDLNPDNSDVDKLFIQLVQTYNQLFEENPINASGVDAKAILSARLSKSRRLENLIAQLPGEKKNGLFGNLIALSLGLTPNFKSNFDLAEDAKLQLSKDTYDDDLDNLLAQIGDQYADLFLAAKNLSDAILLSDILRVNTEITKAPLSASMIKRYDEHHQDLTLLKALVRQQLPEKYKEIFFDQSKNGYAGYIDGGASQEEFYKFIKPILEKMDGTEELLVKLNREDLLRKQRTFDNGSIPHQIHLGELHAILRRQEDFYPFLKDNREKIEKILTFRIPYYVGPLARGNSRFAWMTRKSEETITPWNFEEVVDKGASAQSFIERMTNFDKNLPNEKVLPKHSLLYEYFTVYNELTKVKYVTEGMRKPAFLSGEQKKAIVDLLFKTNRKVTVKQLKEDYFKKIECFDSVEISGVEDRFNASLGTYHDLLKIIKDKDFLDNEENEDILEDIVLTLTLFEDREMIEERLKTYAHLFDDKVMKQLKRRRYTGWGRLSRKLINGIRDKQSGKTILDFLKSDGFANRNFMQLIHDDSLTFKEDIQKAQVSGQGDSLHEHIANLAGSPAIKKGILQTVKVVDELVKVMGRHKPENIVIEMARENQTTQKGQKNSRERMKRIEEGIKELGSQILKEHPVENTQLQNEKLYLYYLQNGRDMYVDQELDINRLSDYDVDHIVPQSFLKDDSIDNKVLTRSDKARGKSDNVPSEEVVKKMKNYWRQLLNAKLITQRKFDNLTKAERGGLSELDKAGFIKRQLVETRQITKHVAQILDSRMNTKYDENDKLIREVKVITLKSKLVSDFRKDFQFYKVREINNYHHAHDAYLNAVVGTALIKKYPKLESEFVYGDYKVYDVRKMIAKSEQEIGKATAKYFFYSNIMNFFKTEITLANGEIRKRPLIETNGETGEIVWDKGRDFATVRKVLSMPQVNIVKKTEVQTGGFSKESILPKRNSDKLIARKKDWDPKKYGGFDSPTVAYSVLVVAKVEKGKSKKLKSVKELLGITIMERSSFEKNPIDFLEAKGYKEVKKDLIIKLPKYSLFELENGRKRMLASAGELQKGNELALPSKYVNFLYLASHYEKLKGSPEDNEQKQLFVEQHKHYLDEIIEQISEFSKRVILADANLDKVLSAYNKHRDKPIREQAENIIHLFTLTNLGAPAAFKYFDTTIDRKRYTSTKEVLDATLIHQSITGLYETRIDLSQLGGDGGPAPGSSEAAAKGGTLNIEDEYRLHETSKEPDVSLGSTWLSDFPQAWAETGGMGLAVRQAPLIIPLKATSTPVSIKQYPMSQEARLGIKPHIQRLLDQGILVPCQSPWNTPLLPVKKPGTNDYRPVQDLREVNKRVEDIHPTVPNPYNLLSGLPPSHQWYTVLDLKDAFFCLRLHPTSQPLFAFEWRDPEMGISGQLTWTRLPQGFKNSPTLFNEALHRDLAGFRIQHPDLILLQYVDDLLLAATSELDCQQGTRALLQTLGDLGYRASAKKAQICQKQVKYLGYLLKEGQRWLTEARKETVMGQPIPKTPRQLREFLGTAGFCRLWIPGFAEMAAPLYPLTKPGTLFNWGPDQQKAFQEIKQALLTAPALGLPDLTKPFELFVDEKQGYAKGVLTQKLGPWRRPVAYLSKKLDPVAAGWPPCLRMVAAIAVLTKDAGKLTMGQPLVILAPHAVEALVKQPPDRWLSNARMTHYQALLLDTDRVQFGPVVALNPATLLPLPEEGLQHDCLDILAEAHGTRSDLMDQPLPDADHTWYTDGSSFLQEGQRKAGAAVTTETEVIWARALPAGTSAQRAELIALTQALKMAEGKKLNVYTDSRYAFATAHIHGEIYRRRGWLTSEGKEIKNKDEILALLKALFLPKRLSIIHCPGHQKGNSAEARGNRMADQAAREVATRETPETSTLLAGKRTADGSEFEKRTADGSEFESPKKKAKVE

SEQ ID NO: 2226 - protein, 2100 aa, synthetic construct
  source 1..2100: note = Description of Artificial Sequence: Synthetic polypeptide
MPAAKRVKLDGGDKKYSIGLDIGTNSVGWAVITDEYKVPSKKFKVLGNTDRHSIKKNLIGALLFDSGETAEATRLKRTARRRYTRRKNRICYLQEIFSNEMAKVDDSFFHRLEESFLVEEDKKHERHPIFGNIVDEVAYHEKYPTIYHLRKKLVDSTDKADLRLIYLALAHMIKFRGHFLIEGDLNPDNSDVDKLFIQLVQTYNQLFEENPINASGVDAKAILSARLSKSRRLENLIAQLPGEKKNGLFGNLIALSLGLTPNFKSNFDLAEDAKLQLSKDTYDDDLDNLLAQIGDQYADLFLAAKNLSDAILLSDILRVNTEITKAPLSASMIKRYDEHHQDLTLLKALVRQQLPEKYKEIFFDQSKNGYAGYIDGGASQEEFYKFIKPILEKMDGTEELLVKLNREDLLRKQRTFDNGSIPHQIHLGELHAILRRQEDFYPFLKDNREKIEKILTFRIPYYVGPLARGNSRFAWMTRKSEETITPWNFEEVVDKGASAQSFIERMTNFDKNLPNEKVLPKHSLLYEYFTVYNELTKVKYVTEGMRKPAFLSGEQKKAIVDLLFKTNRKVTVKQLKEDYFKKIECFDSVEISGVEDRFNASLGTYHDLLKIIKDKDFLDNEENEDILEDIVLTLTLFEDREMIEERLKTYAHLFDDKVMKQLKRRRYTGWGRLSRKLINGIRDKQSGKTILDFLKSDGFANRNFMQLIHDDSLTFKEDIQKAQVSGQGDSLHEHIANLAGSPAIKKGILQTVKVVDELVKVMGRHKPENIVIEMARENQTTQKGQKNSRERMKRIEEGIKELGSQILKEHPVENTQLQNEKLYLYYLQNGRDMYVDQELDINRLSDYDVDHIVPQSFLKDDSIDNKVLTRSDKARGKSDNVPSEEVVKKMKNYWRQLLNAKLITQRKFDNLTKAERGGLSELDKAGFIKRQLVETRQITKHVAQILDSRMNTKYDENDKLIREVKVITLKSKLVSDFRKDFQFYKVREINNYHHAHDAYLNAVVGTALIKKYPKLESEFVYGDYKVYDVRKMIAKSEQEIGKATAKYFFYSNIMNFFKTEITLANGEIRKRPLIETNGETGEIVWDKGRDFATVRKVLSMPQVNIVKKTEVQTGGFSKESILPKRNSDKLIARKKDWDPKKYGGFDSPTVAYSVLVVAKVEKGKSKKLKSVKELLGITIMERSSFEKNPIDFLEAKGYKEVKKDLIIKLPKYSLFELENGRKRMLASAGELQKGNELALPSKYVNFLYLASHYEKLKGSPEDNEQKQLFVEQHKHYLDEIIEQISEFSKRVILADANLDKVLSAYNKHRDKPIREQAENIIHLFTLTNLGAPAAFKYFDTTIDRKRYTSTKEVLDATLIHQSITGLYETRIDLSQLGGDGGEAAAKGGGGSEAAAKGGTLNIEDEYRLHETSKEPDVSLGSTWLSDFPQAWAETGGMGLAVRQAPLIIPLKATSTPVSIKQYPMSQEARLGIKPHIQRLLDQGILVPCQSPWNTPLLPVKKPGTNDYRPVQDLREVNKRVEDIHPTVPNPYNLLSGLPPSHQWYTVLDLKDAFFCLRLHPTSQPLFAFEWRDPEMGISGQLTWTRLPQGFKNSPTLFNEALHRDLAGFRIQHPDLILLQYVDDLLLAATSELDCQQGTRALLQTLGDLGYRASAKKAQICQKQVKYLGYLLKEGQRWLTEARKETVMGQPIPKTPRQLREFLGTAGFCRLWIPGFAEMAAPLYPLTKPGTLFNWGPDQQKAFQEIKQALLTAPALGLPDLTKPFELFVDEKQGYAKGVLTQKLGPWRRPVAYLSKKLDPVAAGWPPCLRMVAAIAVLTKDAGKLTMGQPLVILAPHAVEALVKQPPDRWLSNARMTHYQALLLDTDRVQFGPVVALNPATLLPLPEEGLQHDCLDILAEAHGTRSDLMDQPLPDADHTWYTDGSSFLQEGQRKAGAAVTTETEVIWARALPAGTSAQRAELIALTQALKMAEGKKLNVYTDSRYAFATAHIHGEIYRRRGWLTSEGKEIKNKDEILALLKALFLPKRLSIIHCPGHQKGNSAEARGNRMADQAAREVATRETPETSTLLAGKRTADGSEFEKRTADGSEFESPKKKAKVE

SEQ ID NO: 2227 - protein, 2091 aa, synthetic construct
  source 1..2091: note = Description of Artificial Sequence: Synthetic polypeptide
MPAAKRVKLDGGDKKYSIGLDIGTNSVGWAVITDEYKVPSKKFKVLGNTDRHSIKKNLIGALLFDSGETAEATRLKRTARRRYTRRKNRICYLQEIFSNEMAKVDDSFFHRLEESFLVEEDKKHERHPIFGNIVDEVAYHEKYPTIYHLRKKLVDSTDKADLRLIYLALAHMIKFRGHFLIEGDLNPDNSDVDKLFIQLVQTYNQLFEENPINASGVDAKAILSARLSKSRRLENLIAQLPGEKKNGLFGNLIALSLGLTPNFKSNFDLAEDAKLQLSKDTYDDDLDNLLAQIGDQYADLFLAAKNLSDAILLSDILRVNTEITKAPLSASMIKRYDEHHQDLTLLKALVRQQLPEKYKEIFFDQSKNGYAGYIDGGASQEEFYKFIKPILEKMDGTEELLVKLNREDLLRKQRTFDNGSIPHQIHLGELHAILRRQEDFYPFLKDNREKIEKILTFRIPYYVGPLARGNSRFAWMTRKSEETITPWNFEEVVDKGASAQSFIERMTNFDKNLPNEKVLPKHSLLYEYFTVYNELTKVKYVTEGMRKPAFLSGEQKKAIVDLLFKTNRKVTVKQLKEDYFKKIECFDSVEISGVEDRFNASLGTYHDLLKIIKDKDFLDNEENEDILEDIVLTLTLFEDREMIEERLKTYAHLFDDKVMKQLKRRRYTGWGRLSRKLINGIRDKQSGKTILDFLKSDGFANRNFMQLIHDDSLTFKEDIQKAQVSGQGDSLHEHIANLAGSPAIKKGILQTVKVVDELVKVMGRHKPENIVIEMARENQTTQKGQKNSRERMKRIEEGIKELGSQILKEHPVENTQLQNEKLYLYYLQNGRDMYVDQELDINRLSDYDVDHIVPQSFLKDDSIDNKVLTRSDKARGKSDNVPSEEVVKKMKNYWRQLLNAKLITQRKFDNLTKAERGGLSELDKAGFIKRQLVETRQITKHVAQILDSRMNTKYDENDKLIREVKVITLKSKLVSDFRKDFQFYKVREINNYHHAHDAYLNAVVGTALIKKYPKLESEFVYGDYKVYDVRKMIAKSEQEIGKATAKYFFYSNIMNFFKTEITLANGEIRKRPLIETNGETGEIVWDKGRDFATVRKVLSMPQVNIVKKTEVQTGGFSKESILPKRNSDKLIARKKDWDPKKYGGFDSPTVAYSVLVVAKVEKGKSKKLKSVKELLGITIMERSSFEKNPIDFLEAKGYKEVKKDLIIKLPKYSLFELENGRKRMLASAGELQKGNELALPSKYVNFLYLASHYEKLKGSPEDNEQKQLFVEQHKHYLDEIIEQISEFSKRVILADANLDKVLSAYNKHRDKPIREQAENIIHLFTLTNLGAPAAFKYFDTTIDRKRYTSTKEVLDATLIHQSITGLYETRIDLSQLGGDGGGSSGSSGGTLNIEDEYRLHETSKEPDVSLGSTWLSDFPQAWAETGGMGLAVRQAPLIIPLKATSTPVSIKQYPMSQEARLGIKPHIQRLLDQGILVPCQSPWNTPLLPVKKPGTNDYRPVQDLREVNKRVEDIHPTVPNPYNLLSGLPPSHQWYTVLDLKDAFFCLRLHPTSQPLFAFEWRDPEMGISGQLTWTRLPQGFKNSPTLFNEALHRDLAGFRIQHPDLILLQYVDDLLLAATSELDCQQGTRALLQTLGDLGYRASAKKAQICQKQVKYLGYLLKEGQRWLTEARKETVMGQPIPKTPRQLREFLGTAGFCRLWIPGFAEMAAPLYPLTKPGTLFNWGPDQQKAFQEIKQALLTAPALGLPDLTKPFELFVDEKQGYAKGVLTQKLGPWRRPVAYLSKKLDPVAAGWPPCLRMVAAIAVLTKDAGKLTMGQPLVILAPHAVEALVKQPPDRWLSNARMTHYQALLLDTDRVQFGPVVALNPATLLPLPEEGLQHDCLDILAEAHGTRSDLMDQPLPDADHTWYTDGSSFLQEGQRKAGAAVTTETEVIWARALPAGTSAQRAELIALTQALKMAEGKKLNVYTDSRYAFATAHIHGEIYRRRGWLTSEGKEIKNKDEILALLKALFLPKRLSIIHCPGHQKGNSAEARGNRMADQAAREVATRETPETSTLLAGKRTADGSEFEKRTADGSEFESPKKKAKVE

SEQ ID NO: 2228 - protein, 2097 aa, synthetic construct
  source 1..2097: note = Description of Artificial Sequence: Synthetic polypeptide
MPAAKRVKLDGGDKKYSIGLDIGTNSVGWAVITDEYKVPSKKFKVLGNTDRHSIKKNLIGALLFDSGETAEATRLKRTARRRYTRRKNRICYLQEIFSNEMAKVDDSFFHRLEESFLVEEDKKHERHPIFGNIVDEVAYHEKYPTIYHLRKKLVDSTDKADLRLIYLALAHMIKFRGHFLIEGDLNPDNSDVDKLFIQLVQTYNQLFEENPINASGVDAKAILSARLSKSRRLENLIAQLPGEKKNGLFGNLIALSLGLTPNFKSNFDLAEDAKLQLSKDTYDDDLDNLLAQIGDQYADLFLAAKNLSDAILLSDILRVNTEITKAPLSASMIKRYDEHHQDLTLLKALVRQQLPEKYKEIFFDQSKNGYAGYIDGGASQEEFYKFIKPILEKMDGTEELLVKLNREDLLRKQRTFDNGSIPHQIHLGELHAILRRQEDFYPFLKDNREKIEKILTFRIPYYVGPLARGNSRFAWMTRKSEETITPWNFEEVVDKGASAQSFIERMTNFDKNLPNEKVLPKHSLLYEYFTVYNELTKVKYVTEGMRKPAFLSGEQKKAIVDLLFKTNRKVTVKQLKEDYFKKIECFDSVEISGVEDRFNASLGTYHDLLKIIKDKDFLDNEENEDILEDIVLTLTLFEDREMIEERLKTYAHLFDDKVMKQLKRRRYTGWGRLSRKLINGIRDKQSGKTILDFLKSDGFANRNFMQLIHDDSLTFKEDIQKAQVSGQGDSLHEHIANLAGSPAIKKGILQTVKVVDELVKVMGRHKPENIVIEMARENQTTQKGQKNSRERMKRIEEGIKELGSQILKEHPVENTQLQNEKLYLYYLQNGRDMYVDQELDINRLSDYDVDHIVPQSFLKDDSIDNKVLTRSDKARGKSDNVPSEEVVKKMKNYWRQLLNAKLITQRKFDNLTKAERGGLSELDKAGFIKRQLVETRQITKHVAQILDSRMNTKYDENDKLIREVKVITLKSKLVSDFRKDFQFYKVREINNYHHAHDAYLNAVVGTALIKKYPKLESEFVYGDYKVYDVRKMIAKSEQEIGKATAKYFFYSNIMNFFKTEITLANGEIRKRPLIETNGETGEIVWDKGRDFATVRKVLSMPQVNIVKKTEVQTGGFSKESILPKRNSDKLIARKKDWDPKKYGGFDSPTVAYSVLVVAKVEKGKSKKLKSVKELLGITIMERSSFEKNPIDFLEAKGYKEVKKDLIIKLPKYSLFELENGRKRMLASAGELQKGNELALPSKYVNFLYLASHYEKLKGSPEDNEQKQLFVEQHKHYLDEIIEQISEFSKRVILADANLDKVLSAYNKHRDKPIREQAENIIHLFTLTNLGAPAAFKYFDTTIDRKRYTSTKEVLDATLIHQSITGLYETRIDLSQLGGDGGGSAGSAAGSGEFGGTLNIEDEYRLHETSKEPDVSLGSTWLSDFPQAWAETGGMGLAVRQAPLIIPLKATSTPVSIKQYPMSQEARLGIKPHIQRLLDQGILVPCQSPWNTPLLPVKKPGTNDYRPVQDLREVNKRVEDIHPTVPNPYNLLSGLPPSHQWYTVLDLKDAFFCLRLHPTSQPLFAFEWRDPEMGISGQLTWTRLPQGFKNSPTLFNEALHRDLAGFRIQHPDLILLQYVDDLLLAATSELDCQQGTRALLQTLGDLGYRASAKKAQICQKQVKYLGYLLKEGQRWLTEARKETVMGQPIPKTPRQLREFLGTAGFCRLWIPGFAEMAAPLYPLTKPGTLFNWGPDQQKAFQEIKQALLTAPALGLPDLTKPFELFVDEKQGYAKGVLTQKLGPWRRPVAYLSKKLDPVAAGWPPCLRMVAAIAVLTKDAGKLTMGQPLVILAPHAVEALVKQPPDRWLSNARMTHYQALLLDTDRVQFGPVVALNPATLLPLPEEGLQHDCLDILAEAHGTRSDLMDQPLPDADHTWYTDGSSFLQEGQRKAGAAVTTETEVIWARALPAGTSAQRAELIALTQALKMAEGKKLNVYTDSRYAFATAHIHGEIYRRRGWLTSEGKEIKNKDEILALLKALFLPKRLSIIHCPGHQKGNSAEARGNRMADQAAREVATRETPETSTLLAGKRTADGSEFEKRTADGSEFESPKKKAKVE

SEQ ID NO: 2229 - protein, 2088 aa, synthetic construct
  source 1..2088: note = Description of Artificial Sequence: Synthetic polypeptide
MPAAKRVKLDGGDKKYSIGLDIGTNSVGWAVITDEYKVPSKKFKVLGNTDRHSIKKNLIGALLFDSGETAEATRLKRTARRRYTRRKNRICYLQEIFSNEMAKVDDSFFHRLEESFLVEEDKKHERHPIFGNIVDEVAYHEKYPTIYHLRKKLVDSTDKADLRLIYLALAHMIKFRGHFLIEGDLNPDNSDVDKLFIQLVQTYNQLFEENPINASGVDAKAILSARLSKSRRLENLIAQLPGEKKNGLFGNLIALSLGLTPNFKSNFDLAEDAKLQLSKDTYDDDLDNLLAQIGDQYADLFLAAKNLSDAILLSDILRVNTEITKAPLSASMIKRYDEHHQDLTLLKALVRQQLPEKYKEIFFDQSKNGYAGYIDGGASQEEFYKFIKPILEKMDGTEELLVKLNREDLLRKQRTFDNGSIPHQIHLGELHAILRRQEDFYPFLKDNREKIEKILTFRIPYYVGPLARGNSRFAWMTRKSEETITPWNFEEVVDKGASAQSFIERMTNFDKNLPNEKVLPKHSLLYEYFTVYNELTKVKYVTEGMRKPAFLSGEQKKAIVDLLFKTNRKVTVKQLKEDYFKKIECFDSVEISGVEDRFNASLGTYHDLLKIIKDKDFLDNEENEDILEDIVLTLTLFEDREMIEERLKTYAHLFDDKVMKQLKRRRYTGWGRLSRKLINGIRDKQSGKTILDFLKSDGFANRNFMQLIHDDSLTFKEDIQKAQVSGQGDSLHEHIANLAGSPAIKKGILQTVKVVDELVKVMGRHKPENIVIEMARENQTTQKGQKNSRERMKRIEEGIKELGSQILKEHPVENTQLQNEKLYLYYLQNGRDMYVDQELDINRLSDYDVDHIVPQSFLKDDSIDNKVLTRSDKARGKSDNVPSEEVVKKMKNYWRQLLNAKLITQRKFDNLTKAERGGLSELDKAGFIKRQLVETRQITKHVAQILDSRMNTKYDENDKLIREVKVITLKSKLVSDFRKDFQFYKVREINNYHHAHDAYLNAVVGTALIKKYPKLESEFVYGDYKVYDVRKMIAKSEQEIGKATAKYFFYSNIMNFFKTEITLANGEIRKRPLIETNGETGEIVWDKGRDFATVRKVLSMPQVNIVKKTEVQTGGFSKESILPKRNSDKLIARKKDWDPKKYGGFDSPTVAYSVLVVAKVEKGKSKKLKSVKELLGITIMERSSFEKNPIDFLEAKGYKEVKKDLIIKLPKYSLFELENGRKRMLASAGELQKGNELALPSKYVNFLYLASHYEKLKGSPEDNEQKQLFVEQHKHYLDEIIEQISEFSKRVILADANLDKVLSAYNKHRDKPIREQAENIIHLFTLTNLGAPAAFKYFDTTIDRKRYTSTKEVLDATLIHQSITGLYETRIDLSQLGGDGGGGGGGTLNIEDEYRLHETSKEPDVSLGSTWLSDFPQAWAETGGMGLAVRQAPLIIPLKATSTPVSIKQYPMSQEARLGIKPHIQRLLDQGILVPCQSPWNTPLLPVKKPGTNDYRPVQDLREVNKRVEDIHPTVPNPYNLLSGLPPSHQWYTVLDLKDAFFCLRLHPTSQPLFAFEWRDPEMGISGQLTWTRLPQGFKNSPTLFNEALHRDLAGFRIQHPDLILLQYVDDLLLAATSELDCQQGTRALLQTLGDLGYRASAKKAQICQKQVKYLGYLLKEGQRWLTEARKETVMGQPIPKTPRQLREFLGTAGFCRLWIPGFAEMAAPLYPLTKPGTLFNWGPDQQKAFQEIKQALLTAPALGLPDLTKPFELFVDEKQGYAKGVLTQKLGPWRRPVAYLSKKLDPVAAGWPPCLRMVAAIAVLTKDAGKLTMGQPLVILAPHAVEALVKQPPDRWLSNARMTHYQALLLDTDRVQFGPVVALNPATLLPLPEEGLQHDCLDILAEAHGTRSDLMDQPLPDADHTWYTDGSSFLQEGQRKAGAAVTTETEVIWARALPAGTSAQRAELIALTQALKMAEGKKLNVYTDSRYAFATAHIHGEIYRRRGWLTSEGKEIKNKDEILALLKALFLPKRLSIIHCPGHQKGNSAEARGNRMADQAAREVATRETPETSTLLAGKRTADGSEFEKRTADGSEFESPKKKAKVE

SEQ ID NO: 2230 - protein, 2096 aa, synthetic construct
  source 1..2096: note = Description of Artificial Sequence: Synthetic polypeptide
MPAAKRVKLDGGDKKYSIGLDIGTNSVGWAVITDEYKVPSKKFKVLGNTDRHSIKKNLIGALLFDSGETAEATRLKRTARRRYTRRKNRICYLQEIFSNEMAKVDDSFFHRLEESFLVEEDKKHERHPIFGNIVDEVAYHEKYPTIYHLRKKLVDSTDKADLRLIYLALAHMIKFRGHFLIEGDLNPDNSDVDKLFIQLVQTYNQLFEENPINASGVDAKAILSARLSKSRRLENLIAQLPGEKKNGLFGNLIALSLGLTPNFKSNFDLAEDAKLQLSKDTYDDDLDNLLAQIGDQYADLFLAAKNLSDAILLSDILRVNTEITKAPLSASMIKRYDEHHQDLTLLKALVRQQLPEKYKEIFFDQSKNGYAGYIDGGASQEEFYKFIKPILEKMDGTEELLVKLNREDLLRKQRTFDNGSIPHQIHLGELHAILRRQEDFYPFLKDNREKIEKILTFRIPYYVGPLARGNSRFAWMTRKSEETITPWNFEEVVDKGASAQSFIERMTNFDKNLPNEKVLPKHSLLYEYFTVYNELTKVKYVTEGMRKPAFLSGEQKKAIVDLLFKTNRKVTVKQLKEDYFKKIECFDSVEISGVEDRFNASLGTYHDLLKIIKDKDFLDNEENEDILEDIVLTLTLFEDREMIEERLKTYAHLFDDKVMKQLKRRRYTGWGRLSRKLINGIRDKQSGKTILDFLKSDGFANRNFMQLIHDDSLTFKEDIQKAQVSGQGDSLHEHIANLAGSPAIKKGILQTVKVVDELVKVMGRHKPENIVIEMARENQTTQKGQKNSRERMKRIEEGIKELGSQILKEHPVENTQLQNEKLYLYYLQNGRDMYVDQELDINRLSDYDVDHIVPQSFLKDDSIDNKVLTRSDKARGKSDNVPSEEVVKKMKNYWRQLLNAKLITQRKFDNLTKAERGGLSELDKAGFIKRQLVETRQITKHVAQILDSRMNTKYDENDKLIREVKVITLKSKLVSDFRKDFQFYKVREINNYHHAHDAYLNAVVGTALIKKYPKLESEFVYGDYKVYDVRKMIAKSEQEIGKATAKYFFYSNIMNFFKTEITLANGEIRKRPLIETNGETGEIVWDKGRDFATVRKVLSMPQVNIVKKTEVQTGGFSKESILPKRNSDKLIARKKDWDPKKYGGFDSPTVAYSVLVVAKVEKGKSKKLKSVKELLGITIMERSSFEKNPIDFLEAKGYKEVKKDLIIKLPKYSLFELENGRKRMLASAGELQKGNELALPSKYVNFLYLASHYEKLKGSPEDNEQKQLFVEQHKHYLDEIIEQISEFSKRVILADANLDKVLSAYNKHRDKPIREQAENIIHLFTLTNLGAPAAFKYFDTTIDRKRYTSTKEVLDATLIHQSITGLYETRIDLSQLGGDGGEAAAKPAPGGGGGTLNIEDEYRLHETSKEPDVSLGSTWLSDFPQAWAETGGMGLAVRQAPLIIPLKATSTPVSIKQYPMSQEARLGIKPHIQRLLDQGILVPCQSPWNTPLLPVKKPGTNDYRPVQDLREVNKRVEDIHPTVPNPYNLLSGLPPSHQWYTVLDLKDAFFCLRLHPTSQPLFAFEWRDPEMGISGQLTWTRLPQGFKNSPTLFNEALHRDLAGFRIQHPDLILLQYVDDLLLAATSELDCQQGTRALLQTLGDLGYRASAKKAQICQKQVKYLGYLLKEGQRWLTEARKETVMGQPIPKTPRQLREFLGTAGFCRLWIPGFAEMAAPLYPLTKPGTLFNWGPDQQKAFQEIKQALLTAPALGLPDLTKPFELFVDEKQGYAKGVLTQKLGPWRRPVAYLSKKLDPVAAGWPPCLRMVAAIAVLTKDAGKLTMGQPLVILAPHAVEALVKQPPDRWLSNARMTHYQALLLDTDRVQFGPVVALNPATLLPLPEEGLQHDCLDILAEAHGTRSDLMDQPLPDADHTWYTDGSSFLQEGQRKAGAAVTTETEVIWARALPAGTSAQRAELIALTQALKMAEGKKLNVYTDSRYAFATAHIHGEIYRRRGWLTSEGKEIKNKDEILALLKALFLPKRLSIIHCPGHQKGNSAEARGNRMADQAAREVATRETPETSTLLAGKRTADGSEFEKRTADGSEFESPKKKAKVE

SEQ ID NO: 2231 - protein, 2094 aa, synthetic construct
  source 1..2094: note = Description of Artificial Sequence: Synthetic polypeptide
MPAAKRVKLDGGDKKYSIGLDIGTNSVGWAVITDEYKVPSKKFKVLGNTDRHSIKKNLIGALLFDSGETAEATRLKRTARRRYTRRKNRICYLQEIFSNEMAKVDDSFFHRLEESFLVEEDKKHERHPIFGNIVDEVAYHEKYPTIYHLRKKLVDSTDKADLRLIYLALAHMIKFRGHFLIEGDLNPDNSDVDKLFIQLVQTYNQLFEENPINASGVDAKAILSARLSKSRRLENLIAQLPGEKKNGLFGNLIALSLGLTPNFKSNFDLAEDAKLQLSKDTYDDDLDNLLAQIGDQYADLFLAAKNLSDAILLSDILRVNTEITKAPLSASMIKRYDEHHQDLTLLKALVRQQLPEKYKEIFFDQSKNGYAGYIDGGASQEEFYKFIKPILEKMDGTEELLVKLNREDLLRKQRTFDNGSIPHQIHLGELHAILRRQEDFYPFLKDNREKIEKILTFRIPYYVGPLARGNSRFAWMTRKSEETITPWNFEEVVDKGASAQSFIERMTNFDKNLPNEKVLPKHSLLYEYFTVYNELTKVKYVTEGMRKPAFLSGEQKKAIVDLLFKTNRKVTVKQLKEDYFKKIECFDSVEISGVEDRFNASLGTYHDLLKIIKDKDFLDNEENEDILEDIVLTLTLFEDREMIEERLKTYAHLFDDKVMKQLKRRRYTGWGRLSRKLINGIRDKQSGKTILDFLKSDGFANRNFMQLIHDDSLTFKEDIQKAQVSGQGDSLHEHIANLAGSPAIKKGILQTVKVVDELVKVMGRHKPENIVIEMARENQTTQKGQKNSRERMKRIEEGIKELGSQILKEHPVENTQLQNEKLYLYYLQNGRDMYVDQELDINRLSDYDVDHIVPQSFLKDDSIDNKVLTRSDKARGKSDNVPSEEVVKKMKNYWRQLLNAKLITQRKFDNLTKAERGGLSELDKAGFIKRQLVETRQITKHVAQILDSRMNTKYDENDKLIREVKVITLKSKLVSDFRKDFQFYKVREINNYHHAHDAYLNAVVGTALIKKYPKLESEFVYGDYKVYDVRKMIAKSEQEIGKATAKYFFYSNIMNFFKTEITLANGEIRKRPLIETNGETGEIVWDKGRDFATVRKVLSMPQVNIVKKTEVQTGGFSKESILPKRNSDKLIARKKDWDPKKYGGFDSPTVAYSVLVVAKVEKGKSKKLKSVKELLGITIMERSSFEKNPIDFLEAKGYKEVKKDLIIKLPKYSLFELENGRKRMLASAGELQKGNELALPSKYVNFLYLASHYEKLKGSPEDNEQKQLFVEQHKHYLDEIIEQISEFSKRVILADANLDKVLSAYNKHRDKPIREQAENIIHLFTLTNLGAPAAFKYFDTTIDRKRYTSTKEVLDATLIHQSITGLYETRIDLSQLGGDGGGGGGGSGSSGGTLNIEDEYRLHETSKEPDVSLGSTWLSDFPQAWAETGGMGLAVRQAPLIIPLKATSTPVSIKQYPMSQEARLGIKPHIQRLLDQGILVPCQSPWNTPLLPVKKPGTNDYRPVQDLREVNKRVEDIHPTVPNPYNLLSGLPPSHQWYTVLDLKDAFFCLRLHPTSQPLFAFEWRDPEMGISGQLTWTRLPQGFKNSPTLFNEALHRDLAGFRIQHPDLILLQYVDDLLLAATSELDCQQGTRALLQTLGDLGYRASAKKAQICQKQVKYLGYLLKEGQRWLTEARKETVMGQPIPKTPRQLREFLGTAGFCRLWIPGFAEMAAPLYPLTKPGTLFNWGPDQQKAFQEIKQALLTAPALGLPDLTKPFELFVDEKQGYAKGVLTQKLGPWRRPVAYLSKKLDPVAAGWPPCLRMVAAIAVLTKDAGKLTMGQPLVILAPHAVEALVKQPPDRWLSNARMTHYQALLLDTDRVQFGPVVALNPATLLPLPEEGLQHDCLDILAEAHGTRSDLMDQPLPDADHTWYTDGSSFLQEGQRKAGAAVTTETEVIWARALPAGTSAQRAELIALTQALKMAEGKKLNVYTDSRYAFATAHIHGEIYRRRGWLTSEGKEIKNKDEILALLKALFLPKRLSIIHCPGHQKGNSAEARGNRMADQAAREVATRETPETSTLLAGKRTADGSEFEKRTADGSEFESPKKKAKVE

SEQ ID NO: 2232 - protein, 2096 aa, synthetic construct
  source 1..2096: note = Description of Artificial Sequence: Synthetic polypeptide
MPAAKRVKLDGGDKKYSIGLDIGTNSVGWAVITDEYKVPSKKFKVLGNTDRHSIKKNLIGALLFDSGETAEATRLKRTARRRYTRRKNRICYLQEIFSNEMAKVDDSFFHRLEESFLVEEDKKHERHPIFGNIVDEVAYHEKYPTIYHLRKKLVDSTDKADLRLIYLALAHMIKFRGHFLIEGDLNPDNSDVDKLFIQLVQTYNQLFEENPINASGVDAKAILSARLSKSRRLENLIAQLPGEKKNGLFGNLIALSLGLTPNFKSNFDLAEDAKLQLSKDTYDDDLDNLLAQIGDQYADLFLAAKNLSDAILLSDILRVNTEITKAPLSASMIKRYDEHHQDLTLLKALVRQQLPEKYKEIFFDQSKNGYAGYIDGGASQEEFYKFIKPILEKMDGTEELLVKLNREDLLRKQRTFDNGSIPHQIHLGELHAILRRQEDFYPFLKDNREKIEKILTFRIPYYVGPLARGNSRFAWMTRKSEETITPWNFEEVVDKGASAQSFIERMTNFDKNLPNEKVLPKHSLLYEYFTVYNELTKVKYVTEGMRKPAFLSGEQKKAIVDLLFKTNRKVTVKQLKEDYFKKIECFDSVEISGVEDRFNASLGTYHDLLKIIKDKDFLDNEENEDILEDIVLTLTLFEDREMIEERLKTYAHLFDDKVMKQLKRRRYTGWGRLSRKLINGIRDKQSGKTILDFLKSDGFANRNFMQLIHDDSLTFKEDIQKAQVSGQGDSLHEHIANLAGSPAIKKGILQTVKVVDELVKVMGRHKPENIVIEMARENQTTQKGQKNSRERMKRIEEGIKELGSQILKEHPVENTQLQNEKLYLYYLQNGRDMYVDQELDINRLSDYDVDHIVPQSFLKDDSIDNKVLTRSDKARGKSDNVPSEEVVKKMKNYWRQLLNAKLITQRKFDNLTKAERGGLSELDKAGFIKRQLVETRQITKHVAQILDSRMNTKYDENDKLIREVKVITLKSKLVSDFRKDFQFYKVREINNYHHAHDAYLNAVVGTALIKKYPKLESEFVYGDYKVYDVRKMIAKSEQEIGKATAKYFFYSNIMNFFKTEITLANGEIRKRPLIETNGETGEIVWDKGRDFATVRKVLSMPQVNIVKKTEVQTGGFSKESILPKRNSDKLIARKKDWDPKKYGGFDSPTVAYSVLVVAKVEKGKSKKLKSVKELLGITIMERSSFEKNPIDFLEAKGYKEVKKDLIIKLPKYSLFELENGRKRMLASAGELQKGNELALPSKYVNFLYLASHYEKLKGSPEDNEQKQLFVEQHKHYLDEIIEQISEFSKRVILADANLDKVLSAYNKHRDKPIREQAENIIHLFTLTNLGAPAAFKYFDTTIDRKRYTSTKEVLDATLIHQSITGLYETRIDLSQLGGDGGPAPEAAAKGGSGGTLNIEDEYRLHETSKEPDVSLGSTWLSDFPQAWAETGGMGLAVRQAPLIIPLKATSTPVSIKQYPMSQEARLGIKPHIQRLLDQGILVPCQSPWNTPLLPVKKPGTNDYRPVQDLREVNKRVEDIHPTVPNPYNLLSGLPPSHQWYTVLDLKDAFFCLRLHPTSQPLFAFEWRDPEMGISGQLTWTRLPQGFKNSPTLFNEALHRDLAGFRIQHPDLILLQYVDDLLLAATSELDCQQGTRALLQTLGDLGYRASAKKAQICQKQVKYLGYLLKEGQRWLTEARKETVMGQPIPKTPRQLREFLGTAGFCRLWIPGFAEMAAPLYPLTKPGTLFNWGPDQQKAFQEIKQALLTAPALGLPDLTKPFELFVDEKQGYAKGVLTQKLGPWRRPVAYLSKKLDPVAAGWPPCLRMVAAIAVLTKDAGKLTMGQPLVILAPHAVEALVKQPPDRWLSNARMTHYQALLLDTDRVQFGPVVALNPATLLPLPEEGLQHDCLDILAEAHGTRSDLMDQPLPDADHTWYTDGSSFLQEGQRKAGAAVTTETEVIWARALPAGTSAQRAELIALTQALKMAEGKKLNVYTDSRYAFATAHIHGEIYRRRGWLTSEGKEIKNKDEILALLKALFLPKRLSIIHCPGHQKGNSAEARGNRMADQAAREVATRETPETSTLLAGKRTADGSEFEKRTADGSEFESPKKKAKVE

SEQ ID NO: 2233 - protein, 2093 aa, synthetic construct
  source 1..2093: note = Description of Artificial Sequence: Synthetic polypeptide
MPAAKRVKLDGGDKKYSIGLDIGTNSVGWAVITDEYKVPSKKFKVLGNTDRHSIKKNLIGALLFDSGETAEATRLKRTARRRYTRRKNRICYLQEIFSNEMAKVDDSFFHRLEESFLVEEDKKHERHPIFGNIVDEVAYHEKYPTIYHLRKKLVDSTDKADLRLIYLALAHMIKFRGHFLIEGDLNPDNSDVDKLFIQLVQTYNQLFEENPINASGVDAKAILSARLSKSRRLENLIAQLPGEKKNGLFGNLIALSLGLTPNFKSNFDLAEDAKLQLSKDTYDDDLDNLLAQIGDQYADLFLAAKNLSDAILLSDILRVNTEITKAPLSASMIKRYDEHHQDLTLLKALVRQQLPEKYKEIFFDQSKNGYAGYIDGGASQEEFYKFIKPILEKMDGTEELLVKLNREDLLRKQRTFDNGSIPHQIHLGELHAILRRQEDFYPFLKDNREKIEKILTFRIPYYVGPLARGNSRFAWMTRKSEETITPWNFEEVVDKGASAQSFIERMTNFDKNLPNEKVLPKHSLLYEYFTVYNELTKVKYVTEGMRKPAFLSGEQKKAIVDLLFKTNRKVTVKQLKEDYFKKIECFDSVEISGVEDRFNASLGTYHDLLKIIKDKDFLDNEENEDILEDIVLTLTLFEDREMIEERLKTYAHLFDDKVMKQLKRRRYTGWGRLSRKLINGIRDKQSGKTILDFLKSDGFANRNFMQLIHDDSLTFKEDIQKAQVSGQGDSLHEHIANLAGSPAIKKGILQTVKVVDELVKVMGRHKPENIVIEMARENQTTQKGQKNSRERMKRIEEGIKELGSQILKEHPVENTQLQNEKLYLYYLQNGRDMYVDQELDINRLSDYDVDHIVPQSFLKDDSIDNKVLTRSDKARGKSDNVPSEEVVKKMKNYWRQLLNAKLITQRKFDNLTKAERGGLSELDKAGFIKRQLVETRQITKHVAQILDSRMNTKYDENDKLIREVKVITLKSKLVSDFRKDFQFYKVREINNYHHAHDAYLNAVVGTALIKKYPKLESEFVYGDYKVYDVRKMIAKSEQEIGKATAKYFFYSNIMNFFKTEITLANGEIRKRPLIETNGETGEIVWDKGRDFATVRKVLSMPQVNIVKKTEVQTGGFSKESILPKRNSDKLIARKKDWDPKKYGGFDSPTVAYSVLVVAKVEKGKSKKLKSVKELLGITIMERSSFEKNPIDFLEAKGYKEVKKDLIIKLPKYSLFELENGRKRMLASAGELQKGNELALPSKYVNFLYLASHYEKLKGSPEDNEQKQLFVEQHKHYLDEIIEQISEFSKRVILADANLDKVLSAYNKHRDKPIREQAENIIHLFTLTNLGAPAAFKYFDTTIDRKRYTSTKEVLDATLIHQSITGLYETRIDLSQLGGDGGGSSEAAAKGGTLNIEDEYRLHETSKEPDVSLGSTWLSDFPQAWAETGGMGLAVRQAPLIIPLKATSTPVSIKQYPMSQEARLGIKPHIQRLLDQGILVPCQSPWNTPLLPVKKPGTNDYRPVQDLREVNKRVEDIHPTVPNPYNLLSGLPPSHQWYTVLDLKDAFFCLRLHPTSQPLFAFEWRDPEMGISGQLTWTRLPQGFKNSPTLFNEALHRDLAGFRIQHPDLILLQYVDDLLLAATSELDCQQGTRALLQTLGDLGYRASAKKAQICQKQVKYLGYLLKEGQRWLTEARKETVMGQPIPKTPRQLREFLGTAGFCRLWIPGFAEMAAPLYPLTKPGTLFNWGPDQQKAFQEIKQALLTAPALGLPDLTKPFELFVDEKQGYAKGVLTQKLGPWRRPVAYLSKKLDPVAAGWPPCLRMVAAIAVLTKDAGKLTMGQPLVILAPHAVEALVKQPPDRWLSNARMTHYQALLLDTDRVQFGPVVALNPATLLPLPEEGLQHDCLDILAEAHGTRSDLMDQPLPDADHTWYTDGSSFLQEGQRKAGAAVTTETEVIWARALPAGTSAQRAELIALTQALKMAEGKKLNVYTDSRYAFATAHIHGEIYRRRGWLTSEGKEIKNKDEILALLKALFLPKRLSIIHCPGHQKGNSAEARGNRMADQAAREVATRETPETSTLLAGKRTADGSEFEKRTADGSEFESPKKKAKVE

SEQ ID NO: 2234 - protein, 2094 aa, synthetic construct
  source 1..2094: note = Description of Artificial Sequence: Synthetic polypeptide
MPAAKRVKLDGGDKKYSIGLDIGTNSVGWAVITDEYKVPSKKFKVLGNTDRHSIKKNLIGALLFDSGETAEATRLKRTARRRYTRRKNRICYLQEIFSNEMAKVDDSFFHRLEESFLVEEDKKHERHPIFGNIVDEVAYHEKYPTIYHLRKKLVDSTDKADLRLIYLALAHMIKFRGHFLIEGDLNPDNSDVDKLFIQLVQTYNQLFEENPINASGVDAKAILSARLSKSRRLENLIAQLPGEKKNGLFGNLIALSLGLTPNFKSNFDLAEDAKLQLSKDTYDDDLDNLLAQIGDQYADLFLAAKNLSDAILLSDILRVNTEITKAPLSASMIKRYDEHHQDLTLLKALVRQQLPEKYKEIFFDQSKNGYAGYIDGGASQEEFYKFIKPILEKMDGTEELLVKLNREDLLRKQRTFDNGSIPHQIHLGELHAILRRQEDFYPFLKDNREKIEKILTFRIPYYVGPLARGNSRFAWMTRKSEETITPWNFEEVVDKGASAQSFIERMTNFDKNLPNEKVLPKHSLLYEYFTVYNELTKVKYVTEGMRKPAFLSGEQKKAIVDLLFKTNRKVTVKQLKEDYFKKIECFDSVEISGVEDRFNASLGTYHDLLKIIKDKDFLDNEENEDILEDIVLTLTLFEDREMIEERLKTYAHLFDDKVMKQLKRRRYTGWGRLSRKLINGIRDKQSGKTILDFLKSDGFANRNFMQLIHDDSLTFKEDIQKAQVSGQGDSLHEHIANLAGSPAIKKGILQTVKVVDELVKVMGRHKPENIVIEMARENQTTQKGQKNSRERMKRIEEGIKELGSQILKEHPVENTQLQNEKLYLYYLQNGRDMYVDQELDINRLSDYDVDHIVPQSFLKDDSIDNKVLTRSDKARGKSDNVPSEEVVKKMKNYWRQLLNAKLITQRKFDNLTKAERGGLSELDKAGFIKRQLVETRQITKHVAQILDSRMNTKYDENDKLIREVKVITLKSKLVSDFRKDFQFYKVREINNYHHAHDAYLNAVVGTALIKKYPKLESEFVYGDYKVYDVRKMIAKSEQEIGKATAKYFFYSNIMNFFKTEITLANGEIRKRPLIETNGETGEIVWDKGRDFATVRKVLSMPQVNIVKKTEVQTGGFSKESILPKRNSDKLIARKKDWDPKKYGGFDSPTVAYSVLVVAKVEKGKSKKLKSVKELLGITIMERSSFEKNPIDFLEAKGYKEVKKDLIIKLPKYSLFELENGRKRMLASAGELQKGNELALPSKYVNFLYLASHYEKLKGSPEDNEQKQLFVEQHKHYLDEIIEQISEFSKRVILADANLDKVLSAYNKHRDKPIREQAENIIHLFTLTNLGAPAAFKYFDTTIDRKRYTSTKEVLDATLIHQSITGLYETRIDLSQLGGDGGPAPGGGGSSGGTLNIEDEYRLHETSKEPDVSLGSTWLSDFPQAWAETGGMGLAVRQAPLIIPLKATSTPVSIKQYPMSQEARLGIKPHIQRLLDQGILVPCQSPWNTPLLPVKKPGTNDYRPVQDLREVNKRVEDIHPTVPNPYNLLSGLPPSHQWYTVLDLKDAFFCLRLHPTSQPLFAFEWRDPEMGISGQLTWTRLPQGFKNSPTLFNEALHRDLAGFRIQHPDLILLQYVDDLLLAATSELDCQQGTRALLQTLGDLGYRASAKKAQICQKQVKYLGYLLKEGQRWLTEARKETVMGQPIPKTPRQLREFLGTAGFCRLWIPGFAEMAAPLYPLTKPGTLFNWGPDQQKAFQEIKQALLTAPALGLPDLTKPFELFVDEKQGYAKGVLTQKLGPWRRPVAYLSKKLDPVAAGWPPCLRMVAAIAVLTKDAGKLTMGQPLVILAPHAVEALVKQPPDRWLSNARMTHYQALLLDTDRVQFGPVVALNPATLLPLPEEGLQHDCLDILAEAHGTRSDLMDQPLPDADHTWYTDGSSFLQEGQRKAGAAVTTETEVIWARALPAGTSAQRAELIALTQALKMAEGKKLNVYTDSRYAFATAHIHGEIYRRRGWLTSEGKEIKNKDEILALLKALFLPKRLSIIHCPGHQKGNSAEARGNRMADQAAREVATRETPETSTLLAGKRTADGSEFEKRTADGSEFESPKKKAKVE

SEQ ID NO: 2235 - protein, 2096 aa, synthetic construct
  source 1..2096: note = Description of Artificial Sequence: Synthetic polypeptide
MPAAKRVKLDGGDKKYSIGLDIGTNSVGWAVITDEYKVPSKKFKVLGNTDRHSIKKNLIGALLFDSGETAEATRLKRTARRRYTRRKNRICYLQEIFSNEMAKVDDSFFHRLEESFLVEEDKKHERHPIFGNIVDEVAYHEKYPTIYHLRKKLVDSTDKADLRLIYLALAHMIKFRGHFLIEGDLNPDNSDVDKLFIQLVQTYNQLFEENPINASGVDAKAILSARLSKSRRLENLIAQLPGEKKNGLFGNLIALSLGLTPNFKSNFDLAEDAKLQLSKDTYDDDLDNLLAQIGDQYADLFLAAKNLSDAILLSDILRVNTEITKAPLSASMIKRYDEHHQDLTLLKALVRQQLPEKYKEIFFDQSKNGYAGYIDGGASQEEFYKFIKPILEKMDGTEELLVKLNREDLLRKQRTFDNGSIPHQIHLGELHAILRRQEDFYPFLKDNREKIEKILTFRIPYYVGPLARGNSRFAWMTRKSEETITPWNFEEVVDKGASAQSFIERMTNFDKNLPNEKVLPKHSLLYEYFTVYNELTKVKYVTEGMRKPAFLSGEQKKAIVDLLFKTNRKVTVKQLKEDYFKKIECFDSVEISGVEDRFNASLGTYHDLLKIIKDKDFLDNEENEDILEDIVLTLTLFEDREMIEERLKTYAHLFDDKVMKQLKRRRYTGWGRLSRKLINGIRDKQSGKTILDFLKSDGFANRNFMQLIHDDSLTFKEDIQKAQVSGQGDSLHEHIANLAGSPAIKKGILQTVKVVDELVKVMGRHKPENIVIEMARENQTTQKGQKNSRERMKRIEEGIKELGSQILKEHPVENTQLQNEKLYLYYLQNGRDMYVDQELDINRLSDYDVDHIVPQSFLKDDSIDNKVLTRSDKARGKSDNVPSEEVVKKMKNYWRQLLNAKLITQRKFDNLTKAERGGLSELDKAGFIKRQLVETRQITKHVAQILDSRMNTKYDENDKLIREVKVITLKSKLVSDFRKDFQFYKVREINNYHHAHDAYLNAVVGTALIKKYPKLESEFVYGDYKVYDVRKMIAKSEQEIGKATAKYFFYSNIMNFFKTEITLANGEIRKRPLIETNGETGEIVWDKGRDFATVRKVLSMPQVNIVKKTEVQTGGFSKESILPKRNSDKLIARKKDWDPKKYGGFDSPTVAYSVLVVAKVEKGKSKKLKSVKELLGITIMERSSFEKNPIDFLEAKGYKEVKKDLIIKLPKYSLFELENGRKRMLASAGELQKGNELALPSKYVNFLYLASHYEKLKGSPEDNEQKQLFVEQHKHYLDEIIEQISEFSKRVILADANLDKVLSAYNKHRDKPIREQAENIIHLFTLTNLGAPAAFKYFDTTIDRKRYTSTKEVLDATLIHQSITGLYETRIDLSQLGGDGGEAAAKGSSPAPGGTLNIEDEYRLHETSKEPDVSLGSTWLSDFPQAWAETGGMGLAVRQAPLIIPLKATSTPVSIKQYPMSQEARLGIKPHIQRLLDQGILVPCQSPWNTPLLPVKKPGTNDYRPVQDLREVNKRVEDIHPTVPNPYNLLSGLPPSHQWYTVLDLKDAFFCLRLHPTSQPLFAFEWRDPEMGISGQLTWTRLPQGFKNSPTLFNEALHRDLAGFRIQHPDLILLQYVDDLLLAATSELDCQQGTRALLQTLGDLGYRASAKKAQICQKQVKYLGYLLKEGQRWLTEARKETVMGQPIPKTPRQLREFLGTAGFCRLWIPGFAEMAAPLYPLTKPGTLFNWGPDQQKAFQEIKQALLTAPALGLPDLTKPFELFVDEKQGYAKGVLTQKLGPWRRPVAYLSKKLDPVAAGWPPCLRMVAAIAVLTKDAGKLTMGQPLVILAPHAVEALVKQPPDRWLSNARMTHYQALLLDTDRVQFGPVVALNPATLLPLPEEGLQHDCLDILAEAHGTRSDLMDQPLPDADHTWYTDGSSFLQEGQRKAGAAVTTETEVIWARALPAGTSAQRAELIALTQALKMAEGKKLNVYTDSRYAFATAHIHGEIYRRRGWLTSEGKEIKNKDEILALLKALFLPKRLSIIHCPGHQKGNSAEARGNRMADQAAREVATRETPETSTLLAGKRTADGSEFEKRTADGSEFESPKKKAKVE

SEQ ID NO: 2236 - protein, 2095 aa, synthetic construct
  source 1..2095: note = Description of Artificial Sequence: Synthetic polypeptide
MPAAKRVKLDGGDKKYSIGLDIGTNSVGWAVITDEYKVPSKKFKVLGNTDRHSIKKNLIGALLFDSGETAEATRLKRTARRRYTRRKNRICYLQEIFSNEMAKVDDSFFHRLEESFLVEEDKKHERHPIFGNIVDEVAYHEKYPTIYHLRKKLVDSTDKADLRLIYLALAHMIKFRGHFLIEGDLNPDNSDVDKLFIQLVQTYNQLFEENPINASGVDAKAILSARLSKSRRLENLIAQLPGEKKNGLFGNLIALSLGLTPNFKSNFDLAEDAKLQLSKDTYDDDLDNLLAQIGDQYADLFLAAKNLSDAILLSDILRVNTEITKAPLSASMIKRYDEHHQDLTLLKALVRQQLPEKYKEIFFDQSKNGYAGYIDGGASQEEFYKFIKPILEKMDGTEELLVKLNREDLLRKQRTFDNGSIPHQIHLGELHAILRRQEDFYPFLKDNREKIEKILTFRIPYYVGPLARGNSRFAWMTRKSEETITPWNFEEVVDKGASAQSFIERMTNFDKNLPNEKVLPKHSLLYEYFTVYNELTKVKYVTEGMRKPAFLSGEQKKAIVDLLFKTNRKVTVKQLKEDYFKKIECFDSVEISGVEDRFNASLGTYHDLLKIIKDKDFLDNEENEDILEDIVLTLTLFEDREMIEERLKTYAHLFDDKVMKQLKRRRYTGWGRLSRKLINGIRDKQSGKTILDFLKSDGFANRNFMQLIHDDSLTFKEDIQKAQVSGQGDSLHEHIANLAGSPAIKKGILQTVKVVDELVKVMGRHKPENIVIEMARENQTTQKGQKNSRERMKRIEEGIKELGSQILKEHPVENTQLQNEKLYLYYLQNGRDMYVDQELDINRLSDYDVDHIVPQSFLKDDSIDNKVLTRSDKARGKSDNVPSEEVVKKMKNYWRQLLNAKLITQRKFDNLTKAERGGLSELDKAGFIKRQLVETRQITKHVAQILDSRMNTKYDENDKLIREVKVITLKSKLVSDFRKDFQFYKVREINNYHHAHDAYLNAVVGTALIKKYPKLESEFVYGDYKVYDVRKMIAKSEQEIGKATAKYFFYSNIMNFFKTEITLANGEIRKRPLIETNGETGEIVWDKGRDFATVRKVLSMPQVNIVKKTEVQTGGFSKESILPKRNSDKLIARKKDWDPKKYGGFDSPTVAYSVLVVAKVEKGKSKKLKSVKELLGITIMERSSFEKNPIDFLEAKGYKEVKKDLIIKLPKYSLFELENGRKRMLASAGELQKGNELALPSKYVNFLYLASHYEKLKGSPEDNEQKQLFVEQHKHYLDEIIEQISEFSKRVILADANLDKVLSAYNKHRDKPIREQAENIIHLFTLTNLGAPAAFKYFDTTIDRKRYTSTKEVLDATLIHQSITGLYETRIDLSQLGGDGGEAAAKEAAAKGGTLNIEDEYRLHETSKEPDVSLGSTWLSDFPQAWAETGGMGLAVRQAPLIIPLKATSTPVSIKQYPMSQEARLGIKPHIQRLLDQGILVPCQSPWNTPLLPVKKPGTNDYRPVQDLREVNKRVEDIHPTVPNPYNLLSGLPPSHQWYTVLDLKDAFFCLRLHPTSQPLFAFEWRDPEMGISGQLTWTRLPQGFKNSPTLFNEALHRDLAGFRIQHPDLILLQYVDDLLLAATSELDCQQGTRALLQTLGDLGYRASAKKAQICQKQVKYLGYLLKEGQRWLTEARKETVMGQPIPKTPRQLREFLGTAGFCRLWIPGFAEMAAPLYPLTKPGTLFNWGPDQQKAFQEIKQALLTAPALGLPDLTKPFELFVDEKQGYAKGVLTQKLGPWRRPVAYLSKKLDPVAAGWPPCLRMVAAIAVLTKDAGKLTMGQPLVILAPHAVEALVKQPPDRWLSNARMTHYQALLLDTDRVQFGPVVALNPATLLPLPEEGLQHDCLDILAEAHGTRSDLMDQPLPDADHTWYTDGSSFLQEGQRKAGAAVTTETEVIWARALPAGTSAQRAELIALTQALKMAEGKKLNVYTDSRYAFATAHIHGEIYRRRGWLTSEGKEIKNKDEILALLKALFLPKRLSIIHCPGHQKGNSAEARGNRMADQAAREVATRETPETSTLLAGKRTADGSEFEKRTADGSEFESPKKKAKVE

SEQ ID NO: 2237 - protein, 2105 aa, synthetic construct
  source 1..2105: note = Description of Artificial Sequence: Synthetic polypeptide
MPAAKRVKLDGGDKKYSIGLDIGTNSVGWAVITDEYKVPSKKFKVLGNTDRHSIKKNLIGALLFDSGETAEATRLKRTARRRYTRRKNRICYLQEIFSNEMAKVDDSFFHRLEESFLVEEDKKHERHPIFGNIVDEVAYHEKYPTIYHLRKKLVDSTDKADLRLIYLALAHMIKFRGHFLIEGDLNPDNSDVDKLFIQLVQTYNQLFEENPINASGVDAKAILSARLSKSRRLENLIAQLPGEKKNGLFGNLIALSLGLTPNFKSNFDLAEDAKLQLSKDTYDDDLDNLLAQIGDQYADLFLAAKNLSDAILLSDILRVNTEITKAPLSASMIKRYDEHHQDLTLLKALVRQQLPEKYKEIFFDQSKNGYAGYIDGGASQEEFYKFIKPILEKMDGTEELLVKLNREDLLRKQRTFDNGSIPHQIHLGELHAILRRQEDFYPFLKDNREKIEKILTFRIPYYVGPLARGNSRFAWMTRKSEETITPWNFEEVVDKGASAQSFIERMTNFDKNLPNEKVLPKHSLLYEYFTVYNELTKVKYVTEGMRKPAFLSGEQKKAIVDLLFKTNRKVTVKQLKEDYFKKIECFDSVEISGVEDRFNASLGTYHDLLKIIKDKDFLDNEENEDILEDIVLTLTLFEDREMIEERLKTYAHLFDDKVMKQLKRRRYTGWGRLSRKLINGIRDKQSGKTILDFLKSDGFANRNFMQLIHDDSLTFKEDIQKAQVSGQGDSLHEHIANLAGSPAIKKGILQTVKVVDELVKVMGRHKPENIVIEMARENQTTQKGQKNSRERMKRIEEGIKELGSQILKEHPVENTQLQNEKLYLYYLQNGRDMYVDQELDINRLSDYDVDHIVPQSFLKDDSIDNKVLTRSDKARGKSDNVPSEEVVKKMKNYWRQLLNAKLITQRKFDNLTKAERGGLSELDKAGFIKRQLVETRQITKHVAQILDSRMNTKYDENDKLIREVKVITLKSKLVSDFRKDFQFYKVREINNYHHAHDAYLNAVVGTALIKKYPKLESEFVYGDYKVYDVRKMIAKSEQEIGKATAKYFFYSNIMNFFKTEITLANGEIRKRPLIETNGETGEIVWDKGRDFATVRKVLSMPQVNIVKKTEVQTGGFSKESILPKRNSDKLIARKKDWDPKKYGGFDSPTVAYSVLVVAKVEKGKSKKLKSVKELLGITIMERSSFEKNPIDFLEAKGYKEVKKDLIIKLPKYSLFELENGRKRMLASAGELQKGNELALPSKYVNFLYLASHYEKLKGSPEDNEQKQLFVEQHKHYLDEIIEQISEFSKRVILADANLDKVLSAYNKHRDKPIREQAENIIHLFTLTNLGAPAAFKYFDTTIDRKRYTSTKEVLDATLIHQSITGLYETRIDLSQLGGDGGEAAAKEAAAKEAAAKEAAAKGGTLNIEDEYRLHETSKEPDVSLGSTWLSDFPQAWAETGGMGLAVRQAPLIIPLKATSTPVSIKQYPMSQEARLGIKPHIQRLLDQGILVPCQSPWNTPLLPVKKPGTNDYRPVQDLREVNKRVEDIHPTVPNPYNLLSGLPPSHQWYTVLDLKDAFFCLRLHPTSQPLFAFEWRDPEMGISGQLTWTRLPQGFKNSPTLFNEALHRDLAGFRIQHPDLILLQYVDDLLLAATSELDCQQGTRALLQTLGDLGYRASAKKAQICQKQVKYLGYLLKEGQRWLTEARKETVMGQPIPKTPRQLREFLGTAGFCRLWIPGFAEMAAPLYPLTKPGTLFNWGPDQQKAFQEIKQALLTAPALGLPDLTKPFELFVDEKQGYAKGVLTQKLGPWRRPVAYLSKKLDPVAAGWPPCLRMVAAIAVLTKDAGKLTMGQPLVILAPHAVEALVKQPPDRWLSNARMTHYQALLLDTDRVQFGPVVALNPATLLPLPEEGLQHDCLDILAEAHGTRSDLMDQPLPDADHTWYTDGSSFLQEGQRKAGAAVTTETEVIWARALPAGTSAQRAELIALTQALKMAEGKKLNVYTDSRYAFATAHIHGEIYRRRGWLTSEGKEIKNKDEILALLKALFLPKRLSIIHCPGHQKGNSAEARGNRMADQAAREVATRETPETSTLLAGKRTADGSEFEKRTADGSEFESPKKKAKVE

SEQ ID NO: 2238 - protein, 2093 aa, synthetic construct
  source 1..2093: note = Description of Artificial Sequence: Synthetic polypeptide
MPAAKRVKLDGGDKKYSIGLDIGTNSVGWAVITDEYKVPSKKFKVLGNTDRHSIKKNLIGALLFDSGETAEATRLKRTARRRYTRRKNRICYLQEIFSNEMAKVDDSFFHRLEESFLVEEDKKHERHPIFGNIVDEVAYHEKYPTIYHLRKKLVDSTDKADLRLIYLALAHMIKFRGHFLIEGDLNPDNSDVDKLFIQLVQTYNQLFEENPINASGVDAKAILSARLSKSRRLENLIAQLPGEKKNGLFGNLIALSLGLTPNFKSNFDLAEDAKLQLSKDTYDDDLDNLLAQIGDQYADLFLAAKNLSDAILLSDILRVNTEITKAPLSASMIKRYDEHHQDLTLLKALVRQQLPEKYKEIFFDQSKNGYAGYIDGGASQEEFYKFIKPILEKMDGTEELLVKLNREDLLRKQRTFDNGSIPHQIHLGELHAILRRQEDFYPFLKDNREKIEKILTFRIPYYVGPLARGNSRFAWMTRKSEETITPWNFEEVVDKGASAQSFIERMTNFDKNLPNEKVLPKHSLLYEYFTVYNELTKVKYVTEGMRKPAFLSGEQKKAIVDLLFKTNRKVTVKQLKEDYFKKIECFDSVEISGVEDRFNASLGTYHDLLKIIKDKDFLDNEENEDILEDIVLTLTLFEDREMIEERLKTYAHLFDDKVMKQLKRRRYTGWGRLSRKLINGIRDKQSGKTILDFLKSDGFANRNFMQLIHDDSLTFKEDIQKAQVSGQGDSLHEHIANLAGSPAIKKGILQTVKVVDELVKVMGRHKPENIVIEMARENQTTQKGQKNSRERMKRIEEGIKELGSQILKEHPVENTQLQNEKLYLYYLQNGRDMYVDQELDINRLSDYDVDHIVPQSFLKDDSIDNKVLTRSDKARGKSDNVPSEEVVKKMKNYWRQLLNAKLITQRKFDNLTKAERGGLSELDKAGFIKRQLVETRQITKHVAQILDSRMNTKYDENDKLIREVKVITLKSKLVSDFRKDFQFYKVREINNYHHAHDAYLNAVVGTALIKKYPKLESEFVYGDYKVYDVRKMIAKSEQEIGKATAKYFFYSNIMNFFKTEITLANGEIRKRPLIETNGETGEIVWDKGRDFATVRKVLSMPQVNIVKKTEVQTGGFSKESILPKRNSDKLIARKKDWDPKKYGGFDSPTVAYSVLVVAKVEKGKSKKLKSVKELLGITIMERSSFEKNPIDFLEAKGYKEVKKDLIIKLPKYSLFELENGRKRMLASAGELQKGNELALPSKYVNFLYLASHYEKLKGSPEDNEQKQLFVEQHKHYLDEIIEQISEFSKRVILADANLDKVLSAYNKHRDKPIREQAENIIHLFTLTNLGAPAAFKYFDTTIDRKRYTSTKEVLDATLIHQSITGLYETRIDLSQLGGDGGEAAAKGGSGGTLNIEDEYRLHETSKEPDVSLGSTWLSDFPQAWAETGGMGLAVRQAPLIIPLKATSTPVSIKQYPMSQEARLGIKPHIQRLLDQGILVPCQSPWNTPLLPVKKPGTNDYRPVQDLREVNKRVEDIHPTVPNPYNLLSGLPPSHQWYTVLDLKDAFFCLRLHPTSQPLFAFEWRDPEMGISGQLTWTRLPQGFKNSPTLFNEALHRDLAGFRIQHPDLILLQYVDDLLLAATSELDCQQGTRALLQTLGDLGYRASAKKAQICQKQVKYLGYLLKEGQRWLTEARKETVMGQPIPKTPRQLREFLGTAGFCRLWIPGFAEMAAPLYPLTKPGTLFNWGPDQQKAFQEIKQALLTAPALGLPDLTKPFELFVDEKQGYAKGVLTQKLGPWRRPVAYLSKKLDPVAAGWPPCLRMVAAIAVLTKDAGKLTMGQPLVILAPHAVEALVKQPPDRWLSNARMTHYQALLLDTDRVQFGPVVALNPATLLPLPEEGLQHDCLDILAEAHGTRSDLMDQPLPDADHTWYTDGSSFLQEGQRKAGAAVTTETEVIWARALPAGTSAQRAELIALTQALKMAEGKKLNVYTDSRYAFATAHIHGEIYRRRGWLTSEGKEIKNKDEILALLKALFLPKRLSIIHCPGHQKGNSAEARGNRMADQAAREVATRETPETSTLLAGKRTADGSEFEKRTADGSEFESPKKKAKVE

SEQ ID NO: 2239 - protein, 2096 aa, synthetic construct
  source 1..2096: note = Description of Artificial Sequence: Synthetic polypeptide
MPAAKRVKLDGGDKKYSIGLDIGTNSVGWAVITDEYKVPSKKFKVLGNTDRHSIKKNLIGALLFDSGETAEATRLKRTARRRYTRRKNRICYLQEIFSNEMAKVDDSFFHRLEESFLVEEDKKHERHPIFGNIVDEVAYHEKYPTIYHLRKKLVDSTDKADLRLIYLALAHMIKFRGHFLIEGDLNPDNSDVDKLFIQLVQTYNQLFEENPINASGVDAKAILSARLSKSRRLENLIAQLPGEKKNGLFGNLIALSLGLTPNFKSNFDLAEDAKLQLSKDTYDDDLDNLLAQIGDQYADLFLAAKNLSDAILLSDILRVNTEITKAPLSASMIKRYDEHHQDLTLLKALVRQQLPEKYKEIFFDQSKNGYAGYIDGGASQEEFYKFIKPILEKMDGTEELLVKLNREDLLRKQRTFDNGSIPHQIHLGELHAILRRQEDFYPFLKDNREKIEKILTFRIPYYVGPLARGNSRFAWMTRKSEETITPWNFEEVVDKGASAQSFIERMTNFDKNLPNEKVLPKHSLLYEYFTVYNELTKVKYVTEGMRKPAFLSGEQKKAIVDLLFKTNRKVTVKQLKEDYFKKIECFDSVEISGVEDRFNASLGTYHDLLKIIKDKDFLDNEENEDILEDIVLTLTLFEDREMIEERLKTYAHLFDDKVMKQLKRRRYTGWGRLSRKLINGIRDKQSGKTILDFLKSDGFANRNFMQLIHDDSLTFKEDIQKAQVSGQGDSLHEHIANLAGSPAIKKGILQTVKVVDELVKVMGRHKPENIVIEMARENQTTQKGQKNSRERMKRIEEGIKELGSQILKEHPVENTQLQNEKLYLYYLQNGRDMYVDQELDINRLSDYDVDHIVPQSFLKDDSIDNKVLTRSDKARGKSDNVPSEEVVKKMKNYWRQLLNAKLITQRKFDNLTKAERGGLSELDKAGFIKRQLVETRQITKHVAQILDSRMNTKYDENDKLIREVKVITLKSKLVSDFRKDFQFYKVREINNYHHAHDAYLNAVVGTALIKKYPKLESEFVYGDYKVYDVRKMIAKSEQEIGKATAKYFFYSNIMNFFKTEITLANGEIRKRPLIETNGETGEIVWDKGRDFATVRKVLSMPQVNIVKKTEVQTGGFSKESILPKRNSDKLIARKKDWDPKKYGGFDSPTVAYSVLVVAKVEKGKSKKLKSVKELLGITIMERSSFEKNPIDFLEAKGYKEVKKDLIIKLPKYSLFELENGRKRMLASAGELQKGNELALPSKYVNFLYLASHYEKLKGSPEDNEQKQLFVEQHKHYLDEIIEQISEFSKRVILADANLDKVLSAYNKHRDKPIREQAENIIHLFTLTNLGAPAAFKYFDTTIDRKRYTSTKEVLDATLIHQSITGLYETRIDLSQLGGDGGEAAAKGGSGSSGGTLNIEDEYRLHETSKEPDVSLGSTWLSDFPQAWAETGGMGLAVRQAPLIIPLKATSTPVSIKQYPMSQEARLGIKPHIQRLLDQGILVPCQSPWNTPLLPVKKPGTNDYRPVQDLREVNKRVEDIHPTVPNPYNLLSGLPPSHQWYTVLDLKDAFFCLRLHPTSQPLFAFEWRDPEMGISGQLTWTRLPQGFKNSPTLFNEALHRDLAGFRIQHPDLILLQYVDDLLLAATSELDCQQGTRALLQTLGDLGYRASAKKAQICQKQVKYLGYLLKEGQRWLTEARKETVMGQPIPKTPRQLREFLGTAGFCRLWIPGFAEMAAPLYPLTKPGTLFNWGPDQQKAFQEIKQALLTAPALGLPDLTKPFELFVDEKQGYAKGVLTQKLGPWRRPVAYLSKKLDPVAAGWPPCLRMVAAIAVLTKDAGKLTMGQPLVILAPHAVEALVKQPPDRWLSNARMTHYQALLLDTDRVQFGPVVALNPATLLPLPEEGLQHDCLDILAEAHGTRSDLMDQPLPDADHTWYTDGSSFLQEGQRKAGAAVTTETEVIWARALPAGTSAQRAELIALTQALKMAEGKKLNVYTDSRYAFATAHIHGEIYRRRGWLTSEGKEIKNKDEILALLKALFLPKRLSIIHCPGHQKGNSAEARGNRMADQAAREVATRETPETSTLLAGKRTADGSEFEKRTADGSEFESPKKKAKVE

SEQ ID NO: 2240 - protein, 2100 aa, synthetic construct
  source 1..2100: note = Description of Artificial Sequence: Synthetic polypeptide
MPAAKRVKLDGGDKKYSIGLDIGTNSVGWAVITDEYKVPSKKFKVLGNTDRHSIKKNLIGALLFDSGETAEATRLKRTARRRYTRRKNRICYLQEIFSNEMAKVDDSFFHRLEESFLVEEDKKHERHPIFGNIVDEVAYHEKYPTIYHLRKKLVDSTDKADLRLIYLALAHMIKFRGHFLIEGDLNPDNSDVDKLFIQLVQTYNQLFEENPINASGVDAKAILSARLSKSRRLENLIAQLPGEKKNGLFGNLIALSLGLTPNFKSNFDLAEDAKLQLSKDTYDDDLDNLLAQIGDQYADLFLAAKNLSDAILLSDILRVNTEITKAPLSASMIKRYDEHHQDLTLLKALVRQQLPEKYKEIFFDQSKNGYAGYIDGGASQEEFYKFIKPILEKMDGTEELLVKLNREDLLRKQRTFDNGSIPHQIHLGELHAILRRQEDFYPFLKDNREKIEKILTFRIPYYVGPLARGNSRFAWMTRKSEETITPWNFEEVVDKGASAQSFIERMTNFDKNLPNEKVLPKHSLLYEYFTVYNELTKVKYVTEGMRKPAFLSGEQKKAIVDLLFKTNRKVTVKQLKEDYFKKIECFDSVEISGVEDRFNASLGTYHDLLKIIKDKDFLDNEENEDILEDIVLTLTLFEDREMIEERLKTYAHLFDDKVMKQLKRRRYTGWGRLSRKLINGIRDKQSGKTILDFLKSDGFANRNFMQLIHDDSLTFKEDIQKAQVSGQGDSLHEHIANLAGSPAIKKGILQTVKVVDELVKVMGRHKPENIVIEMARENQTTQKGQKNSRERMKRIEEGIKELGSQILKEHPVENTQLQNEKLYLYYLQNGRDMYVDQELDINRLSDYDVDHIVPQSFLKDDSIDNKVLTRSDKARGKSDNVPSEEVVKKMKNYWRQLLNAKLITQRKFDNLTKAERGGLSELDKAGFIKRQLVETRQITKHVAQILDSRMNTKYDENDKLIREVKVITLKSKLVSDFRKDFQFYKVREINNYHHAHDAYLNAVVGTALIKKYPKLESEFVYGDYKVYDVRKMIAKSEQEIGKATAKYFFYSNIMNFFKTEITLANGEIRKRPLIETNGETGEIVWDKGRDFATVRKVLSMPQVNIVKKTEVQTGGFSKESILPKRNSDKLIARKKDWDPKKYGGFDSPTVAYSVLVVAKVEKGKSKKLKSVKELLGITIMERSSFEKNPIDFLEAKGYKEVKKDLIIKLPKYSLFELENGRKRMLASAGELQKGNELALPSKYVNFLYLASHYEKLKGSPEDNEQKQLFVEQHKHYLDEIIEQISEFSKRVILADANLDKVLSAYNKHRDKPIREQAENIIHLFTLTNLGAPAAFKYFDTTIDRKRYTSTKEVLDATLIHQSITGLYETRIDLSQLGGDGGGGGGSGGGGSGGGGSGGTLNIEDEYRLHETSKEPDVSLGSTWLSDFPQAWAETGGMGLAVRQAPLIIPLKATSTPVSIKQYPMSQEARLGIKPHIQRLLDQGILVPCQSPWNTPLLPVKKPGTNDYRPVQDLREVNKRVEDIHPTVPNPYNLLSGLPPSHQWYTVLDLKDAFFCLRLHPTSQPLFAFEWRDPEMGISGQLTWTRLPQGFKNSPTLFNEALHRDLAGFRIQHPDLILLQYVDDLLLAATSELDCQQGTRALLQTLGDLGYRASAKKAQICQKQVKYLGYLLKEGQRWLTEARKETVMGQPIPKTPRQLREFLGTAGFCRLWIPGFAEMAAPLYPLTKPGTLFNWGPDQQKAFQEIKQALLTAPALGLPDLTKPFELFVDEKQGYAKGVLTQKLGPWRRPVAYLSKKLDPVAAGWPPCLRMVAAIAVLTKDAGKLTMGQPLVILAPHAVEALVKQPPDRWLSNARMTHYQALLLDTDRVQFGPVVALNPATLLPLPEEGLQHDCLDILAEAHGTRSDLMDQPLPDADHTWYTDGSSFLQEGQRKAGAAVTTETEVIWARALPAGTSAQRAELIALTQALKMAEGKKLNVYTDSRYAFATAHIHGEIYRRRGWLTSEGKEIKNKDEILALLKALFLPKRLSIIHCPGHQKGNSAEARGNRMADQAAREVATRETPETSTLLAGKRTADGSEFEKRTADGSEFESPKKKAKVE

SEQ ID NO: 2241 - protein, 2093 aa, synthetic construct
  source 1..2093: note = Description of Artificial Sequence: Synthetic polypeptide
MPAAKRVKLDGGDKKYSIGLDIGTNSVGWAVITDEYKVPSKKFKVLGNTDRHSIKKNLIGALLFDSGETAEATRLKRTARRRYTRRKNRICYLQEIFSNEMAKVDDSFFHRLEESFLVEEDKKHERHPIFGNIVDEVAYHEKYPTIYHLRKKLVDSTDKADLRLIYLALAHMIKFRGHFLIEGDLNPDNSDVDKLFIQLVQTYNQLFEENPINASGVDAKAILSARLSKSRRLENLIAQLPGEKKNGLFGNLIALSLGLTPNFKSNFDLAEDAKLQLSKDTYDDDLDNLLAQIGDQYADLFLAAKNLSDAILLSDILRVNTEITKAPLSASMIKRYDEHHQDLTLLKALVRQQLPEKYKEIFFDQSKNGYAGYIDGGASQEEFYKFIKPILEKMDGTEELLVKLNREDLLRKQRTFDNGSIPHQIHLGELHAILRRQEDFYPFLKDNREKIEKILTFRIPYYVGPLARGNSRFAWMTRKSEETITPWNFEEVVDKGASAQSFIERMTNFDKNLPNEKVLPKHSLLYEYFTVYNELTKVKYVTEGMRKPAFLSGEQKKAIVDLLFKTNRKVTVKQLKEDYFKKIECFDSVEISGVEDRFNASLGTYHDLLKIIKDKDFLDNEENEDILEDIVLTLTLFEDREMIEERLKTYAHLFDDKVMKQLKRRRYTGWGRLSRKLINGIRDKQSGKTILDFLKSDGFANRNFMQLIHDDSLTFKEDIQKAQVSGQGDSLHEHIANLAGSPAIKKGILQTVKVVDELVKVMGRHKPENIVIEMARENQTTQKGQKNSRERMKRIEEGIKELGSQILKEHPVENTQLQNEKLYLYYLQNGRDMYVDQELDINRLSDYDVDHIVPQSFLKDDSIDNKVLTRSDKARGKSDNVPSEEVVKKMKNYWRQLLNAKLITQRKFDNLTKAERGGLSELDKAGFIKRQLVETRQITKHVAQILDSRMNTKYDENDKLIREVKVITLKSKLVSDFRKDFQFYKVREINNYHHAHDAYLNAVVGTALIKKYPKLESEFVYGDYKVYDVRKMIAKSEQEIGKATAKYFFYSNIMNFFKTEITLANGEIRKRPLIETNGETGEIVWDKGRDFATVRKVLSMPQVNIVKKTEVQTGGFSKESILPKRNSDKLIARKKDWDPKKYGGFDSPTVAYSVLVVAKVEKGKSKKLKSVKELLGITIMERSSFEKNPIDFLEAKGYKEVKKDLIIKLPKYSLFELENGRKRMLASAGELQKGNELALPSKYVNFLYLASHYEKLKGSPEDNEQKQLFVEQHKHYLDEIIEQISEFSKRVILADANLDKVLSAYNKHRDKPIREQAENIIHLFTLTNLGAPAAFKYFDTTIDRKRYTSTKEVLDATLIHQSITGLYETRIDLSQLGGDGGGGGEAAAKGGTLNIEDEYRLHETSKEPDVSLGSTWLSDFPQAWAETGGMGLAVRQAPLIIPLKATSTPVSIKQYPMSQEARLGIKPHIQRLLDQGILVPCQSPWNTPLLPVKKPGTNDYRPVQDLREVNKRVEDIHPTVPNPYNLLSGLPPSHQWYTVLDLKDAFFCLRLHPTSQPLFAFEWRDPEMGISGQLTWTRLPQGFKNSPTLFNEALHRDLAGFRIQHPDLILLQYVDDLLLAATSELDCQQGTRALLQTLGDLGYRASAKKAQICQKQVKYLGYLLKEGQRWLTEARKETVMGQPIPKTPRQLREFLGTAGFCRLWIPGFAEMAAPLYPLTKPGTLFNWGPDQQKAFQEIKQALLTAPALGLPDLTKPFELFVDEKQGYAKGVLTQKLGPWRRPVAYLSKKLDPVAAGWPPCLRMVAAIAVLTKDAGKLTMGQPLVILAPHAVEALVKQPPDRWLSNARMTHYQALLLDTDRVQFGPVVALNPATLLPLPEEGLQHDCLDILAEAHGTRSDLMDQPLPDADHTWYTDGSSFLQEGQRKAGAAVTTETEVIWARALPAGTSAQRAELIALTQALKMAEGKKLNVYTDSRYAFATAHIHGEIYRRRGWLTSEGKEIKNKDEILALLKALFLPKRLSIIHCPGHQKGNSAEARGNRMADQAAREVATRETPETSTLLAGKRTADGSEFEKRTADGSEFESPKKKAKVE

SEQ ID NO: 2242 - protein, 2088 aa, synthetic construct
  source 1..2088: note = Description of Artificial Sequence: Synthetic polypeptide
MPAAKRVKLDGGDKKYSIGLDIGTNSVGWAVITDEYKVPSKKFKVLGNTDRHSIKKNLIGALLFDSGETAEATRLKRTARRRYTRRKNRICYLQEIFSNEMAKVDDSFFHRLEESFLVEEDKKHERHPIFGNIVDEVAYHEKYPTIYHLRKKLVDSTDKADLRLIYLALAHMIKFRGHFLIEGDLNPDNSDVDKLFIQLVQTYNQLFEENPINASGVDAKAILSARLSKSRRLENLIAQLPGEKKNGLFGNLIALSLGLTPNFKSNFDLAEDAKLQLSKDTYDDDLDNLLAQIGDQYADLFLAAKNLSDAILLSDILRVNTEITKAPLSASMIKRYDEHHQDLTLLKALVRQQLPEKYKEIFFDQSKNGYAGYIDGGASQEEFYKFIKPILEKMDGTEELLVKLNREDLLRKQRTFDNGSIPHQIHLGELHAILRRQEDFYPFLKDNREKIEKILTFRIPYYVGPLARGNSRFAWMTRKSEETITPWNFEEVVDKGASAQSFIERMTNFDKNLPNEKVLPKHSLLYEYFTVYNELTKVKYVTEGMRKPAFLSGEQKKAIVDLLFKTNRKVTVKQLKEDYFKKIECFDSVEISGVEDRFNASLGTYHDLLKIIKDKDFLDNEENEDILEDIVLTLTLFEDREMIEERLKTYAHLFDDKVMKQLKRRRYTGWGRLSRKLINGIRDKQSGKTILDFLKSDGFANRNFMQLIHDDSLTFKEDIQKAQVSGQGDSLHEHIANLAGSPAIKKGILQTVKVVDELVKVMGRHKPENIVIEMARENQTTQKGQKNSRERMKRIEEGIKELGSQILKEHPVENTQLQNEKLYLYYLQNGRDMYVDQELDINRLSDYDVDHIVPQSFLKDDSIDNKVLTRSDKARGKSDNVPSEEVVKKMKNYWRQLLNAKLITQRKFDNLTKAERGGLSELDKAGFIKRQLVETRQITKHVAQILDSRMNTKYDENDKLIREVKVITLKSKLVSDFRKDFQFYKVREINNYHHAHDAYLNAVVGTALIKKYPKLESEFVYGDYKVYDVRKMIAKSEQEIGKATAKYFFYSNIMNFFKTEITLANGEIRKRPLIETNGETGEIVWDKGRDFATVRKVLSMPQVNIVKKTEVQTGGFSKESILPKRNSDKLIARKKDWDPKKYGGFDSPTVAYSVLVVAKVEKGKSKKLKSVKELLGITIMERSSFEKNPIDFLEAKGYKEVKKDLIIKLPKYSLFELENGRKRMLASAGELQKGNELALPSKYVNFLYLASHYEKLKGSPEDNEQKQLFVEQHKHYLDEIIEQISEFSKRVILADANLDKVLSAYNKHRDKPIREQAENIIHLFTLTNLGAPAAFKYFDTTIDRKRYTSTKEVLDATLIHQSITGLYETRIDLSQLGGDGGGSSGGTLNIEDEYRLHETSKEPDVSLGSTWLSDFPQAWAETGGMGLAVRQAPLIIPLKATSTPVSIKQYPMSQEARLGIKPHIQRLLDQGILVPCQSPWNTPLLPVKKPGTNDYRPVQDLREVNKRVEDIHPTVPNPYNLLSGLPPSHQWYTVLDLKDAFFCLRLHPTSQPLFAFEWRDPEMGISGQLTWTRLPQGFKNSPTLFNEALHRDLAGFRIQHPDLILLQYVDDLLLAATSELDCQQGTRALLQTLGDLGYRASAKKAQICQKQVKYLGYLLKEGQRWLTEARKETVMGQPIPKTPRQLREFLGTAGFCRLWIPGFAEMAAPLYPLTKPGTLFNWGPDQQKAFQEIKQALLTAPALGLPDLTKPFELFVDEKQGYAKGVLTQKLGPWRRPVAYLSKKLDPVAAGWPPCLRMVAAIAVLTKDAGKLTMGQPLVILAPHAVEALVKQPPDRWLSNARMTHYQALLLDTDRVQFGPVVALNPATLLPLPEEGLQHDCLDILAEAHGTRSDLMDQPLPDADHTWYTDGSSFLQEGQRKAGAAVTTETEVIWARALPAGTSAQRAELIALTQALKMAEGKKLNVYTDSRYAFATAHIHGEIYRRRGWLTSEGKEIKNKDEILALLKALFLPKRLSIIHCPGHQKGNSAEARGNRMADQAAREVATRETPETSTLLAGKRTADGSEFEKRTADGSEFESPKKKAKVE

SEQ ID NO: 2243 - protein, 2090 aa, synthetic construct
  source 1..2090: note = Description of Artificial Sequence: Synthetic polypeptide
MPAAKRVKLDGGDKKYSIGLDIGTNSVGWAVITDEYKVPSKKFKVLGNTDRHSIKKNLIGALLFDSGETAEATRLKRTARRRYTRRKNRICYLQEIFSNEMAKVDDSFFHRLEESFLVEEDKKHERHPIFGNIVDEVAYHEKYPTIYHLRKKLVDSTDKADLRLIYLALAHMIKFRGHFLIEGDLNPDNSDVDKLFIQLVQTYNQLFEENPINASGVDAKAILSARLSKSRRLENLIAQLPGEKKNGLFGNLIALSLGLTPNFKSNFDLAEDAKLQLSKDTYDDDLDNLLAQIGDQYADLFLAAKNLSDAILLSDILRVNTEITKAPLSASMIKRYDEHHQDLTLLKALVRQQLPEKYKEIFFDQSKNGYAGYIDGGASQEEFYKFIKPILEKMDGTEELLVKLNREDLLRKQRTFDNGSIPHQIHLGELHAILRRQEDFYPFLKDNREKIEKILTFRIPYYVGPLARGNSRFAWMTRKSEETITPWNFEEVVDKGASAQSFIERMTNFDKNLPNEKVLPKHSLLYEYFTVYNELTKVKYVTEGMRKPAFLSGEQKKAIVDLLFKTNRKVTVKQLKEDYFKKIECFDSVEISGVEDRFNASLGTYHDLLKIIKDKDFLDNEENEDILEDIVLTLTLFEDREMIEERLKTYAHLFDDKVMKQLKRRRYTGWGRLSRKLINGIRDKQSGKTILDFLKSDGFANRNFMQLIHDDSLTFKEDIQKAQVSGQGDSLHEHIANLAGSPAIKKGILQTVKVVDELVKVMGRHKPENIVIEMARENQTTQKGQKNSRERMKRIEEGIKELGSQILKEHPVENTQLQNEKLYLYYLQNGRDMYVDQELDINRLSDYDVDHIVPQSFLKDDSIDNKVLTRSDKARGKSDNVPSEEVVKKMKNYWRQLLNAKLITQRKFDNLTKAERGGLSELDKAGFIKRQLVETRQITKHVAQILDSRMNTKYDENDKLIREVKVITLKSKLVSDFRKDFQFYKVREINNYHHAHDAYLNAVVGTALIKKYPKLESEFVYGDYKVYDVRKMIAKSEQEIGKATAKYFFYSNIMNFFKTEITLANGEIRKRPLIETNGETGEIVWDKGRDFATVRKVLSMPQVNIVKKTEVQTGGFSKESILPKRNSDKLIARKKDWDPKKYGGFDSPTVAYSVLVVAKVEKGKSKKLKSVKELLGITIMERSSFEKNPIDFLEAKGYKEVKKDLIIKLPKYSLFELENGRKRMLASAGELQKGNELALPSKYVNFLYLASHYEKLKGSPEDNEQKQLFVEQHKHYLDEIIEQISEFSKRVILADANLDKVLSAYNKHRDKPIREQAENIIHLFTLTNLGAPAAFKYFDTTIDRKRYTSTKEVLDATLIHQSITGLYETRIDLSQLGGDGGPAPAPGGTLNIEDEYRLHETSKEPDVSLGSTWLSDFPQAWAETGGMGLAVRQAPLIIPLKATSTPVSIKQYPMSQEARLGIKPHIQRLLDQGILVPCQSPWNTPLLPVKKPGTNDYRPVQDLREVNKRVEDIHPTVPNPYNLLSGLPPSHQWYTVLDLKDAFFCLRLHPTSQPLFAFEWRDPEMGISGQLTWTRLPQGFKNSPTLFNEALHRDLAGFRIQHPDLILLQYVDDLLLAATSELDCQQGTRALLQTLGDLGYRASAKKAQICQKQVKYLGYLLKEGQRWLTEARKETVMGQPIPKTPRQLREFLGTAGFCRLWIPGFAEMAAPLYPLTKPGTLFNWGPDQQKAFQEIKQALLTAPALGLPDLTKPFELFVDEKQGYAKGVLTQKLGPWRRPVAYLSKKLDPVAAGWPPCLRMVAAIAVLTKDAGKLTMGQPLVILAPHAVEALVKQPPDRWLSNARMTHYQALLLDTDRVQFGPVVALNPATLLPLPEEGLQHDCLDILAEAHGTRSDLMDQPLPDADHTWYTDGSSFLQEGQRKAGAAVTTETEVIWARALPAGTSAQRAELIALTQALKMAEGKKLNVYTDSRYAFATAHIHGEIYRRRGWLTSEGKEIKNKDEILALLKALFLPKRLSIIHCPGHQKGNSAEARGNRMADQAAREVATRETPETSTLLAGKRTADGSEFEKRTADGSEFESPKKKAKVE

SEQ ID NO: 2244 - protein, 2096 aa, synthetic construct
  source 1..2096: note = Description of Artificial Sequence: Synthetic polypeptide
MPAAKRVKLDGGDKKYSIGLDIGTNSVGWAVITDEYKVPSKKFKVLGNTDRHSIKKNLIGALLFDSGETAEATRLKRTARRRYTRRKNRICYLQEIFSNEMAKVDDSFFHRLEESFLVEEDKKHERHPIFGNIVDEVAYHEKYPTIYHLRKKLVDSTDKADLRLIYLALAHMIKFRGHFLIEGDLNPDNSDVDKLFIQLVQTYNQLFEENPINASGVDAKAILSARLSKSRRLENLIAQLPGEKKNGLFGNLIALSLGLTPNFKSNFDLAEDAKLQLSKDTYDDDLDNLLAQIGDQYADLFLAAKNLSDAILLSDILRVNTEITKAPLSASMIKRYDEHHQDLTLLKALVRQQLPEKYKEIFFDQSKNGYAGYIDGGASQEEFYKFIKPILEKMDGTEELLVKLNREDLLRKQRTFDNGSIPHQIHLGELHAILRRQEDFYPFLKDNREKIEKILTFRIPYYVGPLARGNSRFAWMTRKSEETITPWNFEEVVDKGASAQSFIERMTNFDKNLPNEKVLPKHSLLYEYFTVYNELTKVKYVTEGMRKPAFLSGEQKKAIVDLLFKTNRKVTVKQLKEDYFKKIECFDSVEISGVEDRFNASLGTYHDLLKIIKDKDFLDNEENEDILEDIVLTLTLFEDREMIEERLKTYAHLFDDKVMKQLKRRRYTGWGRLSRKLINGIRDKQSGKTILDFLKSDGFANRNFMQLIHDDSLTFKEDIQKAQVSGQGDSLHEHIANLAGSPAIKKGILQTVKVVDELVKVMGRHKPENIVIEMARENQTTQKGQKNSRERMKRIEEGIKELGSQILKEHPVENTQLQNEKLYLYYLQNGRDMYVDQELDINRLSDYDVDHIVPQSFLKDDSIDNKVLTRSDKARGKSDNVPSEEVVKKMKNYWRQLLNAKLITQRKFDNLTKAERGGLSELDKAGFIKRQLVETRQITKHVAQILDSRMNTKYDENDKLIREVKVITLKSKLVSDFRKDFQFYKVREINNYHHAHDAYLNAVVGTALIKKYPKLESEFVYGDYKVYDVRKMIAKSEQEIGKATAKYFFYSNIMNFFKTEITLANGEIRKRPLIETNGETGEIVWDKGRDFATVRKVLSMPQVNIVKKTEVQTGGFSKESILPKRNSDKLIARKKDWDPKKYGGFDSPTVAYSVLVVAKVEKGKSKKLKSVKELLGITIMERSSFEKNPIDFLEAKGYKEVKKDLIIKLPKYSLFELENGRKRMLASAGELQKGNELALPSKYVNFLYLASHYEKLKGSPEDNEQKQLFVEQHKHYLDEIIEQISEFSKRVILADANLDKVLSAYNKHRDKPIREQAENIIHLFTLTNLGAPAAFKYFDTTIDRKRYTSTKEVLDATLIHQSITGLYETRIDLSQLGGDGGGSSEAAAKGGSGGTLNIEDEYRLHETSKEPDVSLGSTWLSDFPQAWAETGGMGLAVRQAPLIIPLKATSTPVSIKQYPMSQEARLGIKPHIQRLLDQGILVPCQSPWNTPLLPVKKPGTNDYRPVQDLREVNKRVEDIHPTVPNPYNLLSGLPPSHQWYTVLDLKDAFFCLRLHPTSQPLFAFEWRDPEMGISGQLTWTRLPQGFKNSPTLFNEALHRDLAGFRIQHPDLILLQYVDDLLLAATSELDCQQGTRALLQTLGDLGYRASAKKAQICQKQVKYLGYLLKEGQRWLTEARKETVMGQPIPKTPRQLREFLGTAGFCRLWIPGFAEMAAPLYPLTKPGTLFNWGPDQQKAFQEIKQALLTAPALGLPDLTKPFELFVDEKQGYAKGVLTQKLGPWRRPVAYLSKKLDPVAAGWPPCLRMVAAIAVLTKDAGKLTMGQPLVILAPHAVEALVKQPPDRWLSNARMTHYQALLLDTDRVQFGPVVALNPATLLPLPEEGLQHDCLDILAEAHGTRSDLMDQPLPDADHTWYTDGSSFLQEGQRKAGAAVTTETEVIWARALPAGTSAQRAELIALTQALKMAEGKKLNVYTDSRYAFATAHIHGEIYRRRGWLTSEGKEIKNKDEILALLKALFLPKRLSIIHCPGHQKGNSAEARGNRMADQAAREVATRETPETSTLLAGKRTADGSEFEKRTADGSEFESPKKKAKVE

SEQ ID NO: 2245 - protein, 2091 aa, synthetic construct
  source 1..2091: note = Description of Artificial Sequence: Synthetic polypeptide
MPAAKRVKLDGGDKKYSIGLDIGTNSVGWAVITDEYKVPSKKFKVLGNTDRHSIKKNLIGALLFDSGETAEATRLKRTARRRYTRRKNRICYLQEIFSNEMAKVDDSFFHRLEESFLVEEDKKHERHPIFGNIVDEVAYHEKYPTIYHLRKKLVDSTDKADLRLIYLALAHMIKFRGHFLIEGDLNPDNSDVDKLFIQLVQTYNQLFEENPINASGVDAKAILSARLSKSRRLENLIAQLPGEKKNGLFGNLIALSLGLTPNFKSNFDLAEDAKLQLSKDTYDDDLDNLLAQIGDQYADLFLAAKNLSDAILLSDILRVNTEITKAPLSASMIKRYDEHHQDLTLLKALVRQQLPEKYKEIFFDQSKNGYAGYIDGGASQEEFYKFIKPILEKMDGTEELLVKLNREDLLRKQRTFDNGSIPHQIHLGELHAILRRQEDFYPFLKDNREKIEKILTFRIPYYVGPLARGNSRFAWMTRKSEETITPWNFEEVVDKGASAQSFIERMTNFDKNLPNEKVLPKHSLLYEYFTVYNELTKVKYVTEGMRKPAFLSGEQKKAIVDLLFKTNRKVTVKQLKEDYFKKIECFDSVEISGVEDRFNASLGTYHDLLKIIKDKDFLDNEENEDILEDIVLTLTLFEDREMIEERLKTYAHLFDDKVMKQLKRRRYTGWGRLSRKLINGIRDKQSGKTILDFLKSDGFANRNFMQLIHDDSLTFKEDIQKAQVSGQGDSLHEHIANLAGSPAIKKGILQTVKVVDELVKVMGRHKPENIVIEMARENQTTQKGQKNSRERMKRIEEGIKELGSQILKEHPVENTQLQNEKLYLYYLQNGRDMYVDQELDINRLSDYDVDHIVPQSFLKDDSIDNKVLTRSDKARGKSDNVPSEEVVKKMKNYWRQLLNAKLITQRKFDNLTKAERGGLSELDKAGFIKRQLVETRQITKHVAQILDSRMNTKYDENDKLIREVKVITLKSKLVSDFRKDFQFYKVREINNYHHAHDAYLNAVVGTALIKKYPKLESEFVYGDYKVYDVRKMIAKSEQEIGKATAKYFFYSNIMNFFKTEITLANGEIRKRPLIETNGETGEIVWDKGRDFATVRKVLSMPQVNIVKKTEVQTGGFSKESILPKRNSDKLIARKKDWDPKKYGGFDSPTVAYSVLVVAKVEKGKSKKLKSVKELLGITIMERSSFEKNPIDFLEAKGYKEVKKDLIIKLPKYSLFELENGRKRMLASAGELQKGNELALPSKYVNFLYLASHYEKLKGSPEDNEQKQLFVEQHKHYLDEIIEQISEFSKRVILADANLDKVLSAYNKHRDKPIREQAENIIHLFTLTNLGAPAAFKYFDTTIDRKRYTSTKEVLDATLIHQSITGLYETRIDLSQLGGDGGPAPGGSGGTLNIEDEYRLHETSKEPDVSLGSTWLSDFPQAWAETGGMGLAVRQAPLIIPLKATSTPVSIKQYPMSQEARLGIKPHIQRLLDQGILVPCQSPWNTPLLPVKKPGTNDYRPVQDLREVNKRVEDIHPTVPNPYNLLSGLPPSHQWYTVLDLKDAFFCLRLHPTSQPLFAFEWRDPEMGISGQLTWTRLPQGFKNSPTLFNEALHRDLAGFRIQHPDLILLQYVDDLLLAATSELDCQQGTRALLQTLGDLGYRASAKKAQICQKQVKYLGYLLKEGQRWLTEARKETVMGQPIPKTPRQLREFLGTAGFCRLWIPGFAEMAAPLYPLTKPGTLFNWGPDQQKAFQEIKQALLTAPALGLPDLTKPFELFVDEKQGYAKGVLTQKLGPWRRPVAYLSKKLDPVAAGWPPCLRMVAAIAVLTKDAGKLTMGQPLVILAPHAVEALVKQPPDRWLSNARMTHYQALLLDTDRVQFGPVVALNPATLLPLPEEGLQHDCLDILAEAHGTRSDLMDQPLPDADHTWYTDGSSFLQEGQRKAGAAVTTETEVIWARALPAGTSAQRAELIALTQALKMAEGKKLNVYTDSRYAFATAHIHGEIYRRRGWLTSEGKEIKNKDEILALLKALFLPKRLSIIHCPGHQKGNSAEARGNRMADQAAREVATRETPETSTLLAGKRTADGSEFEKRTADGSEFESPKKKAKVE

SEQ ID NO: 2246 - protein, 2096 aa, synthetic construct
  source 1..2096: note = Description of Artificial Sequence: Synthetic polypeptide
MPAAKRVKLDGGDKKYSIGLDIGTNSVGWAVITDEYKVPSKKFKVLGNTDRHSIKKNLIGALLFDSGETAEATRLKRTARRRYTRRKNRICYLQEIFSNEMAKVDDSFFHRLEESFLVEEDKKHERHPIFGNIVDEVAYHEKYPTIYHLRKKLVDSTDKADLRLIYLALAHMIKFRGHFLIEGDLNPDNSDVDKLFIQLVQTYNQLFEENPINASGVDAKAILSARLSKSRRLENLIAQLPGEKKNGLFGNLIALSLGLTPNFKSNFDLAEDAKLQLSKDTYDDDLDNLLAQIGDQYADLFLAAKNLSDAILLSDILRVNTEITKAPLSASMIKRYDEHHQDLTLLKALVRQQLPEKYKEIFFDQSKNGYAGYIDGGASQEEFYKFIKPILEKMDGTEELLVKLNREDLLRKQRTFDNGSIPHQIHLGELHAILRRQEDFYPFLKDNREKIEKILTFRIPYYVGPLARGNSRFAWMTRKSEETITPWNFEEVVDKGASAQSFIERMTNFDKNLPNEKVLPKHSLLYEYFTVYNELTKVKYVTEGMRKPAFLSGEQKKAIVDLLFKTNRKVTVKQLKEDYFKKIECFDSVEISGVEDRFNASLGTYHDLLKIIKDKDFLDNEENEDILEDIVLTLTLFEDREMIEERLKTYAHLFDDKVMKQLKRRRYTGWGRLSRKLINGIRDKQSGKTILDFLKSDGFANRNFMQLIHDDSLTFKEDIQKAQVSGQGDSLHEHIANLAGSPAIKKGILQTVKVVDELVKVMGRHKPENIVIEMARENQTTQKGQKNSRERMKRIEEGIKELGSQILKEHPVENTQLQNEKLYLYYLQNGRDMYVDQELDINRLSDYDVDHIVPQSFLKDDSIDNKVLTRSDKARGKSDNVPSEEVVKKMKNYWRQLLNAKLITQRKFDNLTKAERGGLSELDKAGFIKRQLVETRQITKHVAQILDSRMNTKYDENDKLIREVKVITLKSKLVSDFRKDFQFYKVREINNYHHAHDAYLNAVVGTALIKKYPKLESEFVYGDYKVYDVRKMIAKSEQEIGKATAKYFFYSNIMNFFKTEITLANGEIRKRPLIETNGETGEIVWDKGRDFATVRKVLSMPQVNIVKKTEVQTGGFSKESILPKRNSDKLIARKKDWDPKKYGGFDSPTVAYSVLVVAKVEKGKSKKLKSVKELLGITIMERSSFEKNPIDFLEAKGYKEVKKDLIIKLPKYSLFELENGRKRMLASAGELQKGNELALPSKYVNFLYLASHYEKLKGSPEDNEQKQLFVEQHKHYLDEIIEQISEFSKRVILADANLDKVLSAYNKHRDKPIREQAENIIHLFTLTNLGAPAAFKYFDTTIDRKRYTSTKEVLDATLIHQSITGLYETRIDLSQLGGDGGGGGGGSEAAAKGGTLNIEDEYRLHETSKEPDVSLGSTWLSDFPQAWAETGGMGLAVRQAPLIIPLKATSTPVSIKQYPMSQEARLGIKPHIQRLLDQGILVPCQSPWNTPLLPVKKPGTNDYRPVQDLREVNKRVEDIHPTVPNPYNLLSGLPPSHQWYTVLDLKDAFFCLRLHPTSQPLFAFEWRDPEMGISGQLTWTRLPQGFKNSPTLFNEALHRDLAGFRIQHPDLILLQYVDDLLLAATSELDCQQGTRALLQTLGDLGYRASAKKAQICQKQVKYLGYLLKEGQRWLTEARKETVMGQPIPKTPRQLREFLGTAGFCRLWIPGFAEMAAPLYPLTKPGTLFNWGPDQQKAFQEIKQALLTAPALGLPDLTKPFELFVDEKQGYAKGVLTQKLGPWRRPVAYLSKKLDPVAAGWPPCLRMVAAIAVLTKDAGKLTMGQPLVILAPHAVEALVKQPPDRWLSNARMTHYQALLLDTDRVQFGPVVALNPATLLPLPEEGLQHDCLDILAEAHGTRSDLMDQPLPDADHTWYTDGSSFLQEGQRKAGAAVTTETEVIWARALPAGTSAQRAELIALTQALKMAEGKKLNVYTDSRYAFATAHIHGEIYRRRGWLTSEGKEIKNKDEILALLKALFLPKRLSIIHCPGHQKGNSAEARGNRMADQAAREVATRETPETSTLLAGKRTADGSEFEKRTADGSEFESPKKKAKVE

SEQ ID NO: 2247 - protein, 2096 aa, synthetic construct
  source 1..2096: note = Description of Artificial Sequence: Synthetic polypeptide
MPAAKRVKLDGGDKKYSIGLDIGTNSVGWAVITDEYKVPSKKFKVLGNTDRHSIKKNLIGALLFDSGETAEATRLKRTARRRYTRRKNRICYLQEIFSNEMAKVDDSFFHRLEESFLVEEDKKHERHPIFGNIVDEVAYHEKYPTIYHLRKKLVDSTDKADLRLIYLALAHMIKFRGHFLIEGDLNPDNSDVDKLFIQLVQTYNQLFEENPINASGVDAKAILSARLSKSRRLENLIAQLPGEKKNGLFGNLIALSLGLTPNFKSNFDLAEDAKLQLSKDTYDDDLDNLLAQIGDQYADLFLAAKNLSDAILLSDILRVNTEITKAPLSASMIKRYDEHHQDLTLLKALVRQQLPEKYKEIFFDQSKNGYAGYIDGGASQEEFYKFIKPILEKMDGTEELLVKLNREDLLRKQRTFDNGSIPHQIHLGELHAILRRQEDFYPFLKDNREKIEKILTFRIPYYVGPLARGNSRFAWMTRKSEETITPWNFEEVVDKGASAQSFIERMTNFDKNLPNEKVLPKHSLLYEYFTVYNELTKVKYVTEGMRKPAFLSGEQKKAIVDLLFKTNRKVTVKQLKEDYFKKIECFDSVEISGVEDRFNASLGTYHDLLKIIKDKDFLDNEENEDILEDIVLTLTLFEDREMIEERLKTYAHLFDDKVMKQLKRRRYTGWGRLSRKLINGIRDKQSGKTILDFLKSDGFANRNFMQLIHDDSLTFKEDIQKAQVSGQGDSLHEHIANLAGSPAIKKGILQTVKVVDELVKVMGRHKPENIVIEMARENQTTQKGQKNSRERMKRIEEGIKELGSQILKEHPVENTQLQNEKLYLYYLQNGRDMYVDQELDINRLSDYDVDHIVPQSFLKDDSIDNKVLTRSDKARGKSDNVPSEEVVKKMKNYWRQLLNAKLITQRKFDNLTKAERGGLSELDKAGFIKRQLVETRQITKHVAQILDSRMNTKYDENDKLIREVKVITLKSKLVSDFRKDFQFYKVREINNYHHAHDAYLNAVVGTALIKKYPKLESEFVYGDYKVYDVRKMIAKSEQEIGKATAKYFFYSNIMNFFKTEITLANGEIRKRPLIETNGETGEIVWDKGRDFATVRKVLSMPQVNIVKKTEVQTGGFSKESILPKRNSDKLIARKKDWDPKKYGGFDSPTVAYSVLVVAKVEKGKSKKLKSVKELLGITIMERSSFEKNPIDFLEAKGYKEVKKDLIIKLPKYSLFELENGRKRMLASAGELQKGNELALPSKYVNFLYLASHYEKLKGSPEDNEQKQLFVEQHKHYLDEIIEQISEFSKRVILADANLDKVLSAYNKHRDKPIREQAENIIHLFTLTNLGAPAAFKYFDTTIDRKRYTSTKEVLDATLIHQSITGLYETRIDLSQLGGDGGPAPAPAPAPAPGGTLNIEDEYRLHETSKEPDVSLGSTWLSDFPQAWAETGGMGLAVRQAPLIIPLKATSTPVSIKQYPMSQEARLGIKPHIQRLLDQGILVPCQSPWNTPLLPVKKPGTNDYRPVQDLREVNKRVEDIHPTVPNPYNLLSGLPPSHQWYTVLDLKDAFFCLRLHPTSQPLFAFEWRDPEMGISGQLTWTRLPQGFKNSPTLFNEALHRDLAGFRIQHPDLILLQYVDDLLLAATSELDCQQGTRALLQTLGDLGYRASAKKAQICQKQVKYLGYLLKEGQRWLTEARKETVMGQPIPKTPRQLREFLGTAGFCRLWIPGFAEMAAPLYPLTKPGTLFNWGPDQQKAFQEIKQALLTAPALGLPDLTKPFELFVDEKQGYAKGVLTQKLGPWRRPVAYLSKKLDPVAAGWPPCLRMVAAIAVLTKDAGKLTMGQPLVILAPHAVEALVKQPPDRWLSNARMTHYQALLLDTDRVQFGPVVALNPATLLPLPEEGLQHDCLDILAEAHGTRSDLMDQPLPDADHTWYTDGSSFLQEGQRKAGAAVTTETEVIWARALPAGTSAQRAELIALTQALKMAEGKKLNVYTDSRYAFATAHIHGEIYRRRGWLTSEGKEIKNKDEILALLKALFLPKRLSIIHCPGHQKGNSAEARGNRMADQAAREVATRETPETSTLLAGKRTADGSEFEKRTADGSEFESPKKKAKVE

SEQ ID NO: 2248 - protein, 2096 aa, synthetic construct
  source 1..2096: note = Description of Artificial Sequence: Synthetic polypeptide
MPAAKRVKLDGGDKKYSIGLDIGTNSVGWAVITDEYKVPSKKFKVLGNTDRHSIKKNLIGALLFDSGETAEATRLKRTARRRYTRRKNRICYLQEIFSNEMAKVDDSFFHRLEESFLVEEDKKHERHPIFGNIVDEVAYHEKYPTIYHLRKKLVDSTDKADLRLIYLALAHMIKFRGHFLIEGDLNPDNSDVDKLFIQLVQTYNQLFEENPINASGVDAKAILSARLSKSRRLENLIAQLPGEKKNGLFGNLIALSLGLTPNFKSNFDLAEDAKLQLSKDTYDDDLDNLLAQIGDQYADLFLAAKNLSDAILLSDILRVNTEITKAPLSASMIKRYDEHHQDLTLLKALVRQQLPEKYKEIFFDQSKNGYAGYIDGGASQEEFYKFIKPILEKMDGTEELLVKLNREDLLRKQRTFDNGSIPHQIHLGELHAILRRQEDFYPFLKDNREKIEKILTFRIPYYVGPLARGNSRFAWMTRKSEETITPWNFEEVVDKGASAQSFIERMTNFDKNLPNEKVLPKHSLLYEYFTVYNELTKVKYVTEGMRKPAFLSGEQKKAIVDLLFKTNRKVTVKQLKEDYFKKIECFDSVEISGVEDRFNASLGTYHDLLKIIKDKDFLDNEENEDILEDIVLTLTLFEDREMIEERLKTYAHLFDDKVMKQLKRRRYTGWGRLSRKLINGIRDKQSGKTILDFLKSDGFANRNFMQLIHDDSLTFKEDIQKAQVSGQGDSLHEHIANLAGSPAIKKGILQTVKVVDELVKVMGRHKPENIVIEMARENQTTQKGQKNSRERMKRIEEGIKELGSQILKEHPVENTQLQNEKLYLYYLQNGRDMYVDQELDINRLSDYDVDHIVPQSFLKDDSIDNKVLTRSDKARGKSDNVPSEEVVKKMKNYWRQLLNAKLITQRKFDNLTKAERGGLSELDKAGFIKRQLVETRQITKHVAQILDSRMNTKYDENDKLIREVKVITLKSKLVSDFRKDFQFYKVREINNYHHAHDAYLNAVVGTALIKKYPKLESEFVYGDYKVYDVRKMIAKSEQEIGKATAKYFFYSNIMNFFKTEITLANGEIRKRPLIETNGETGEIVWDKGRDFATVRKVLSMPQVNIVKKTEVQTGGFSKESILPKRNSDKLIARKKDWDPKKYGGFDSPTVAYSVLVVAKVEKGKSKKLKSVKELLGITIMERSSFEKNPIDFLEAKGYKEVKKDLIIKLPKYSLFELENGRKRMLASAGELQKGNELALPSKYVNFLYLASHYEKLKGSPEDNEQKQLFVEQHKHYLDEIIEQISEFSKRVILADANLDKVLSAYNKHRDKPIREQAENIIHLFTLTNLGAPAAFKYFDTTIDRKRYTSTKEVLDATLIHQSITGLYETRIDLSQLGGDGGPAPGGSEAAAKGGTLNIEDEYRLHETSKEPDVSLGSTWLSDFPQAWAETGGMGLAVRQAPLIIPLKATSTPVSIKQYPMSQEARLGIKPHIQRLLDQGILVPCQSPWNTPLLPVKKPGTNDYRPVQDLREVNKRVEDIHPTVPNPYNLLSGLPPSHQWYTVLDLKDAFFCLRLHPTSQPLFAFEWRDPEMGISGQLTWTRLPQGFKNSPTLFNEALHRDLAGFRIQHPDLILLQYVDDLLLAATSELDCQQGTRALLQTLGDLGYRASAKKAQICQKQVKYLGYLLKEGQRWLTEARKETVMGQPIPKTPRQLREFLGTAGFCRLWIPGFAEMAAPLYPLTKPGTLFNWGPDQQKAFQEIKQALLTAPALGLPDLTKPFELFVDEKQGYAKGVLTQKLGPWRRPVAYLSKKLDPVAAGWPPCLRMVAAIAVLTKDAGKLTMGQPLVILAPHAVEALVKQPPDRWLSNARMTHYQALLLDTDRVQFGPVVALNPATLLPLPEEGLQHDCLDILAEAHGTRSDLMDQPLPDADHTWYTDGSSFLQEGQRKAGAAVTTETEVIWARALPAGTSAQRAELIALTQALKMAEGKKLNVYTDSRYAFATAHIHGEIYRRRGWLTSEGKEIKNKDEILALLKALFLPKRLSIIHCPGHQKGNSAEARGNRMADQAAREVATRETPETSTLLAGKRTADGSEFEKRTADGSEFESPKKKAKVE

SEQ ID NO: 2249 - protein, 2115 aa, synthetic construct
  source 1..2115: note = Description of Artificial Sequence: Synthetic polypeptide
MPAAKRVKLDGGDKKYSIGLDIGTNSVGWAVITDEYKVPSKKFKVLGNTDRHSIKKNLIGALLFDSGETAEATRLKRTARRRYTRRKNRICYLQEIFSNEMAKVDDSFFHRLEESFLVEEDKKHERHPIFGNIVDEVAYHEKYPTIYHLRKKLVDSTDKADLRLIYLALAHMIKFRGHFLIEGDLNPDNSDVDKLFIQLVQTYNQLFEENPINASGVDAKAILSARLSKSRRLENLIAQLPGEKKNGLFGNLIALSLGLTPNFKSNFDLAEDAKLQLSKDTYDDDLDNLLAQIGDQYADLFLAAKNLSDAILLSDILRVNTEITKAPLSASMIKRYDEHHQDLTLLKALVRQQLPEKYKEIFFDQSKNGYAGYIDGGASQEEFYKFIKPILEKMDGTEELLVKLNREDLLRKQRTFDNGSIPHQIHLGELHAILRRQEDFYPFLKDNREKIEKILTFRIPYYVGPLARGNSRFAWMTRKSEETITPWNFEEVVDKGASAQSFIERMTNFDKNLPNEKVLPKHSLLYEYFTVYNELTKVKYVTEGMRKPAFLSGEQKKAIVDLLFKTNRKVTVKQLKEDYFKKIECFDSVEISGVEDRFNASLGTYHDLLKIIKDKDFLDNEENEDILEDIVLTLTLFEDREMIEERLKTYAHLFDDKVMKQLKRRRYTGWGRLSRKLINGIRDKQSGKTILDFLKSDGFANRNFMQLIHDDSLTFKEDIQKAQVSGQGDSLHEHIANLAGSPAIKKGILQTVKVVDELVKVMGRHKPENIVIEMARENQTTQKGQKNSRERMKRIEEGIKELGSQILKEHPVENTQLQNEKLYLYYLQNGRDMYVDQELDINRLSDYDVDHIVPQSFLKDDSIDNKVLTRSDKARGKSDNVPSEEVVKKMKNYWRQLLNAKLITQRKFDNLTKAERGGLSELDKAGFIKRQLVETRQITKHVAQILDSRMNTKYDENDKLIREVKVITLKSKLVSDFRKDFQFYKVREINNYHHAHDAYLNAVVGTALIKKYPKLESEFVYGDYKVYDVRKMIAKSEQEIGKATAKYFFYSNIMNFFKTEITLANGEIRKRPLIETNGETGEIVWDKGRDFATVRKVLSMPQVNIVKKTEVQTGGFSKESILPKRNSDKLIARKKDWDPKKYGGFDSPTVAYSVLVVAKVEKGKSKKLKSVKELLGITIMERSSFEKNPIDFLEAKGYKEVKKDLIIKLPKYSLFELENGRKRMLASAGELQKGNELALPSKYVNFLYLASHYEKLKGSPEDNEQKQLFVEQHKHYLDEIIEQISEFSKRVILADANLDKVLSAYNKHRDKPIREQAENIIHLFTLTNLGAPAAFKYFDTTIDRKRYTSTKEVLDATLIHQSITGLYETRIDLSQLGGDGGEAAAKEAAAKEAAAKEAAAKEAAAKEAAAKGGTLNIEDEYRLHETSKEPDVSLGSTWLSDFPQAWAETGGMGLAVRQAPLIIPLKATSTPVSIKQYPMSQEARLGIKPHIQRLLDQGILVPCQSPWNTPLLPVKKPGTNDYRPVQDLREVNKRVEDIHPTVPNPYNLLSGLPPSHQWYTVLDLKDAFFCLRLHPTSQPLFAFEWRDPEMGISGQLTWTRLPQGFKNSPTLFNEALHRDLAGFRIQHPDLILLQYVDDLLLAATSELDCQQGTRALLQTLGDLGYRASAKKAQICQKQVKYLGYLLKEGQRWLTEARKETVMGQPIPKTPRQLREFLGTAGFCRLWIPGFAEMAAPLYPLTKPGTLFNWGPDQQKAFQEIKQALLTAPALGLPDLTKPFELFVDEKQGYAKGVLTQKLGPWRRPVAYLSKKLDPVAAGWPPCLRMVAAIAVLTKDAGKLTMGQPLVILAPHAVEALVKQPPDRWLSNARMTHYQALLLDTDRVQFGPVVALNPATLLPLPEEGLQHDCLDILAEAHGTRSDLMDQPLPDADHTWYTDGSSFLQEGQRKAGAAVTTETEVIWARALPAGTSAQRAELIALTQALKMAEGKKLNVYTDSRYAFATAHIHGEIYRRRGWLTSEGKEIKNKDEILALLKALFLPKRLSIIHCPGHQKGNSAEARGNRMADQAAREVATRETPETSTLLAGKRTADGSEFEKRTADGSEFESPKKKAKVE

SEQ ID NO: 2250 - protein, 2097 aa, synthetic construct
  source 1..2097: note = Description of Artificial Sequence: Synthetic polypeptide
MPAAKRVKLDGGDKKYSIGLDIGTNSVGWAVITDEYKVPSKKFKVLGNTDRHSIKKNLIGALLFDSGETAEATRLKRTARRRYTRRKNRICYLQEIFSNEMAKVDDSFFHRLEESFLVEEDKKHERHPIFGNIVDEVAYHEKYPTIYHLRKKLVDSTDKADLRLIYLALAHMIKFRGHFLIEGDLNPDNSDVDKLFIQLVQTYNQLFEENPINASGVDAKAILSARLSKSRRLENLIAQLPGEKKNGLFGNLIALSLGLTPNFKSNFDLAEDAKLQLSKDTYDDDLDNLLAQIGDQYADLFLAAKNLSDAILLSDILRVNTEITKAPLSASMIKRYDEHHQDLTLLKALVRQQLPEKYKEIFFDQSKNGYAGYIDGGASQEEFYKFIKPILEKMDGTEELLVKLNREDLLRKQRTFDNGSIPHQIHLGELHAILRRQEDFYPFLKDNREKIEKILTFRIPYYVGPLARGNSRFAWMTRKSEETITPWNFEEVVDKGASAQSFIERMTNFDKNLPNEKVLPKHSLLYEYFTVYNELTKVKYVTEGMRKPAFLSGEQKKAIVDLLFKTNRKVTVKQLKEDYFKKIECFDSVEISGVEDRFNASLGTYHDLLKIIKDKDFLDNEENEDILEDIVLTLTLFEDREMIEERLKTYAHLFDDKVMKQLKRRRYTGWGRLSRKLINGIRDKQSGKTILDFLKSDGFANRNFMQLIHDDSLTFKEDIQKAQVSGQGDSLHEHIANLAGSPAIKKGILQTVKVVDELVKVMGRHKPENIVIEMARENQTTQKGQKNSRERMKRIEEGIKELGSQILKEHPVENTQLQNEKLYLYYLQNGRDMYVDQELDINRLSDYDVDHIVPQSFLKDDSIDNKVLTRSDKARGKSDNVPSEEVVKKMKNYWRQLLNAKLITQRKFDNLTKAERGGLSELDKAGFIKRQLVETRQITKHVAQILDSRMNTKYDENDKLIREVKVITLKSKLVSDFRKDFQFYKVREINNYHHAHDAYLNAVVGTALIKKYPKLESEFVYGDYKVYDVRKMIAKSEQEIGKATAKYFFYSNIMNFFKTEITLANGEIRKRPLIETNGETGEIVWDKGRDFATVRKVLSMPQVNIVKKTEVQTGGFSKESILPKRNSDKLIARKKDWDPKKYGGFDSPTVAYSVLVVAKVEKGKSKKLKSVKELLGITIMERSSFEKNPIDFLEAKGYKEVKKDLIIKLPKYSLFELENGRKRMLASAGELQKGNELALPSKYVNFLYLASHYEKLKGSPEDNEQKQLFVEQHKHYLDEIIEQISEFSKRVILADANLDKVLSAYNKHRDKPIREQAENIIHLFTLTNLGAPAAFKYFDTTIDRKRYTSTKEVLDATLIHQSITGLYETRIDLSQLGGDGGGGSGGSGGSGGSGGTLNIEDEYRLHETSKEPDVSLGSTWLSDFPQAWAETGGMGLAVRQAPLIIPLKATSTPVSIKQYPMSQEARLGIKPHIQRLLDQGILVPCQSPWNTPLLPVKKPGTNDYRPVQDLREVNKRVEDIHPTVPNPYNLLSGLPPSHQWYTVLDLKDAFFCLRLHPTSQPLFAFEWRDPEMGISGQLTWTRLPQGFKNSPTLFNEALHRDLAGFRIQHPDLILLQYVDDLLLAATSELDCQQGTRALLQTLGDLGYRASAKKAQICQKQVKYLGYLLKEGQRWLTEARKETVMGQPIPKTPRQLREFLGTAGFCRLWIPGFAEMAAPLYPLTKPGTLFNWGPDQQKAFQEIKQALLTAPALGLPDLTKPFELFVDEKQGYAKGVLTQKLGPWRRPVAYLSKKLDPVAAGWPPCLRMVAAIAVLTKDAGKLTMGQPLVILAPHAVEALVKQPPDRWLSNARMTHYQALLLDTDRVQFGPVVALNPATLLPLPEEGLQHDCLDILAEAHGTRSDLMDQPLPDADHTWYTDGSSFLQEGQRKAGAAVTTETEVIWARALPAGTSAQRAELIALTQALKMAEGKKLNVYTDSRYAFATAHIHGEIYRRRGWLTSEGKEIKNKDEILALLKALFLPKRLSIIHCPGHQKGNSAEARGNRMADQAAREVATRETPETSTLLAGKRTADGSEFEKRTADGSEFESPKKKAKVE

SEQ ID NO: 2251 - protein, 2096 aa, synthetic construct
  source 1..2096: note = Description of Artificial Sequence: Synthetic polypeptide
MPAAKRVKLDGGDKKYSIGLDIGTNSVGWAVITDEYKVPSKKFKVLGNTDRHSIKKNLIGALLFDSGETAEATRLKRTARRRYTRRKNRICYLQEIFSNEMAKVDDSFFHRLEESFLVEEDKKHERHPIFGNIVDEVAYHEKYPTIYHLRKKLVDSTDKADLRLIYLALAHMIKFRGHFLIEGDLNPDNSDVDKLFIQLVQTYNQLFEENPINASGVDAKAILSARLSKSRRLENLIAQLPGEKKNGLFGNLIALSLGLTPNFKSNFDLAEDAKLQLSKDTYDDDLDNLLAQIGDQYADLFLAAKNLSDAILLSDILRVNTEITKAPLSASMIKRYDEHHQDLTLLKALVRQQLPEKYKEIFFDQSKNGYAGYIDGGASQEEFYKFIKPILEKMDGTEELLVKLNREDLLRKQRTFDNGSIPHQIHLGELHAILRRQEDFYPFLKDNREKIEKILTFRIPYYVGPLARGNSRFAWMTRKSEETITPWNFEEVVDKGASAQSFIERMTNFDKNLPNEKVLPKHSLLYEYFTVYNELTKVKYVTEGMRKPAFLSGEQKKAIVDLLFKTNRKVTVKQLKEDYFKKIECFDSVEISGVEDRFNASLGTYHDLLKIIKDKDFLDNEENEDILEDIVLTLTLFEDREMIEERLKTYAHLFDDKVMKQLKRRRYTGWGRLSRKLINGIRDKQSGKTILDFLKSDGFANRNFMQLIHDDSLTFKEDIQKAQVSGQGDSLHEHIANLAGSPAIKKGILQTVKVVDELVKVMGRHKPENIVIEMARENQTTQKGQKNSRERMKRIEEGIKELGSQILKEHPVENTQLQNEKLYLYYLQNGRDMYVDQELDINRLSDYDVDHIVPQSFLKDDSIDNKVLTRSDKARGKSDNVPSEEVVKKMKNYWRQLLNAKLITQRKFDNLTKAERGGLSELDKAGFIKRQLVETRQITKHVAQILDSRMNTKYDENDKLIREVKVITLKSKLVSDFRKDFQFYKVREINNYHHAHDAYLNAVVGTALIKKYPKLESEFVYGDYKVYDVRKMIAKSEQEIGKATAKYFFYSNIMNFFKTEITLANGEIRKRPLIETNGETGEIVWDKGRDFATVRKVLSMPQVNIVKKTEVQTGGFSKESILPKRNSDKLIARKKDWDPKKYGGFDSPTVAYSVLVVAKVEKGKSKKLKSVKELLGITIMERSSFEKNPIDFLEAKGYKEVKKDLIIKLPKYSLFELENGRKRMLASAGELQKGNELALPSKYVNFLYLASHYEKLKGSPEDNEQKQLFVEQHKHYLDEIIEQISEFSKRVILADANLDKVLSAYNKHRDKPIREQAENIIHLFTLTNLGAPAAFKYFDTTIDRKRYTSTKEVLDATLIHQSITGLYETRIDLSQLGGDGGGGSEAAAKPAPGGTLNIEDEYRLHETSKEPDVSLGSTWLSDFPQAWAETGGMGLAVRQAPLIIPLKATSTPVSIKQYPMSQEARLGIKPHIQRLLDQGILVPCQSPWNTPLLPVKKPGTNDYRPVQDLREVNKRVEDIHPTVPNPYNLLSGLPPSHQWYTVLDLKDAFFCLRLHPTSQPLFAFEWRDPEMGISGQLTWTRLPQGFKNSPTLFNEALHRDLAGFRIQHPDLILLQYVDDLLLAATSELDCQQGTRALLQTLGDLGYRASAKKAQICQKQVKYLGYLLKEGQRWLTEARKETVMGQPIPKTPRQLREFLGTAGFCRLWIPGFAEMAAPLYPLTKPGTLFNWGPDQQKAFQEIKQALLTAPALGLPDLTKPFELFVDEKQGYAKGVLTQKLGPWRRPVAYLSKKLDPVAAGWPPCLRMVAAIAVLTKDAGKLTMGQPLVILAPHAVEALVKQPPDRWLSNARMTHYQALLLDTDRVQFGPVVALNPATLLPLPEEGLQHDCLDILAEAHGTRSDLMDQPLPDADHTWYTDGSSFLQEGQRKAGAAVTTETEVIWARALPAGTSAQRAELIALTQALKMAEGKKLNVYTDSRYAFATAHIHGEIYRRRGWLTSEGKEIKNKDEILALLKALFLPKRLSIIHCPGHQKGNSAEARGNRMADQAAREVATRETPETSTLLAGKRTADGSEFEKRTADGSEFESPKKKAKVE

SEQ ID NO: 2252 - protein, 2100 aa, synthetic construct
  source 1..2100: note = Description of Artificial Sequence: Synthetic polypeptide
MPAAKRVKLDGGDKKYSIGLDIGTNSVGWAVITDEYKVPSKKFKVLGNTDRHSIKKNLIGALLFDSGETAEATRLKRTARRRYTRRKNRICYLQEIFSNEMAKVDDSFFHRLEESFLVEEDKKHERHPIFGNIVDEVAYHEKYPTIYHLRKKLVDSTDKADLRLIYLALAHMIKFRGHFLIEGDLNPDNSDVDKLFIQLVQTYNQLFEENPINASGVDAKAILSARLSKSRRLENLIAQLPGEKKNGLFGNLIALSLGLTPNFKSNFDLAEDAKLQLSKDTYDDDLDNLLAQIGDQYADLFLAAKNLSDAILLSDILRVNTEITKAPLSASMIKRYDEHHQDLTLLKALVRQQLPEKYKEIFFDQSKNGYAGYIDGGASQEEFYKFIKPILEKMDGTEELLVKLNREDLLRKQRTFDNGSIPHQIHLGELHAILRRQEDFYPFLKDNREKIEKILTFRIPYYVGPLARGNSRFAWMTRKSEETITPWNFEEVVDKGASAQSFIERMTNFDKNLPNEKVLPKHSLLYEYFTVYNELTKVKYVTEGMRKPAFLSGEQKKAIVDLLFKTNRKVTVKQLKEDYFKKIECFDSVEISGVEDRFNASLGTYHDLLKIIKDKDFLDNEENEDILEDIVLTLTLFEDREMIEERLKTYAHLFDDKVMKQLKRRRYTGWGRLSRKLINGIRDKQSGKTILDFLKSDGFANRNFMQLIHDDSLTFKEDIQKAQVSGQGDSLHEHIANLAGSPAIKKGILQTVKVVDELVKVMGRHKPENIVIEMARENQTTQKGQKNSRERMKRIEEGIKELGSQILKEHPVENTQLQNEKLYLYYLQNGRDMYVDQELDINRLSDYDVDHIVPQSFLKDDSIDNKVLTRSDKARGKSDNVPSEEVVKKMKNYWRQLLNAKLITQRKFDNLTKAERGGLSELDKAGFIKRQLVETRQITKHVAQILDSRMNTKYDENDKLIREVKVITLKSKLVSDFRKDFQFYKVREINNYHHAHDAYLNAVVGTALIKKYPKLESEFVYGDYKVYDVRKMIAKSEQEIGKATAKYFFYSNIMNFFKTEITLANGEIRKRPLIETNGETGEIVWDKGRDFATVRKVLSMPQVNIVKKTEVQTGGFSKESILPKRNSDKLIARKKDWDPKKYGGFDSPTVAYSVLVVAKVEKGKSKKLKSVKELLGITIMERSSFEKNPIDFLEAKGYKEVKKDLIIKLPKYSLFELENGRKRMLASAGELQKGNELALPSKYVNFLYLASHYEKLKGSPEDNEQKQLFVEQHKHYLDEIIEQISEFSKRVILADANLDKVLSAYNKHRDKPIREQAENIIHLFTLTNLGAPAAFKYFDTTIDRKRYTSTKEVLDATLIHQSITGLYETRIDLSQLGGDGGEAAAKEAAAKEAAAKGGTLNIEDEYRLHETSKEPDVSLGSTWLSDFPQAWAETGGMGLAVRQAPLIIPLKATSTPVSIKQYPMSQEARLGIKPHIQRLLDQGILVPCQSPWNTPLLPVKKPGTNDYRPVQDLREVNKRVEDIHPTVPNPYNLLSGLPPSHQWYTVLDLKDAFFCLRLHPTSQPLFAFEWRDPEMGISGQLTWTRLPQGFKNSPTLFNEALHRDLAGFRIQHPDLILLQYVDDLLLAATSELDCQQGTRALLQTLGDLGYRASAKKAQICQKQVKYLGYLLKEGQRWLTEARKETVMGQPIPKTPRQLREFLGTAGFCRLWIPGFAEMAAPLYPLTKPGTLFNWGPDQQKAFQEIKQALLTAPALGLPDLTKPFELFVDEKQGYAKGVLTQKLGPWRRPVAYLSKKLDPVAAGWPPCLRMVAAIAVLTKDAGKLTMGQPLVILAPHAVEALVKQPPDRWLSNARMTHYQALLLDTDRVQFGPVVALNPATLLPLPEEGLQHDCLDILAEAHGTRSDLMDQPLPDADHTWYTDGSSFLQEGQRKAGAAVTTETEVIWARALPAGTSAQRAELIALTQALKMAEGKKLNVYTDSRYAFATAHIHGEIYRRRGWLTSEGKEIKNKDEILALLKALFLPKRLSIIHCPGHQKGNSAEARGNRMADQAAREVATRETPETSTLLAGKRTADGSEFEKRTADGSEFESPKKKAKVE

SEQ ID NO: 2253 - protein, 2096 aa, synthetic construct
  source 1..2096: note = Description of Artificial Sequence: Synthetic polypeptide
MPAAKRVKLDGGDKKYSIGLDIGTNSVGWAVITDEYKVPSKKFKVLGNTDRHSIKKNLIGALLFDSGETAEATRLKRTARRRYTRRKNRICYLQEIFSNEMAKVDDSFFHRLEESFLVEEDKKHERHPIFGNIVDEVAYHEKYPTIYHLRKKLVDSTDKADLRLIYLALAHMIKFRGHFLIEGDLNPDNSDVDKLFIQLVQTYNQLFEENPINASGVDAKAILSARLSKSRRLENLIAQLPGEKKNGLFGNLIALSLGLTPNFKSNFDLAEDAKLQLSKDTYDDDLDNLLAQIGDQYADLFLAAKNLSDAILLSDILRVNTEITKAPLSASMIKRYDEHHQDLTLLKALVRQQLPEKYKEIFFDQSKNGYAGYIDGGASQEEFYKFIKPILEKMDGTEELLVKLNREDLLRKQRTFDNGSIPHQIHLGELHAILRRQEDFYPFLKDNREKIEKILTFRIPYYVGPLARGNSRFAWMTRKSEETITPWNFEEVVDKGASAQSFIERMTNFDKNLPNEKVLPKHSLLYEYFTVYNELTKVKYVTEGMRKPAFLSGEQKKAIVDLLFKTNRKVTVKQLKEDYFKKIECFDSVEISGVEDRFNASLGTYHDLLKIIKDKDFLDNEENEDILEDIVLTLTLFEDREMIEERLKTYAHLFDDKVMKQLKRRRYTGWGRLSRKLINGIRDKQSGKTILDFLKSDGFANRNFMQLIHDDSLTFKEDIQKAQVSGQGDSLHEHIANLAGSPAIKKGILQTVKVVDELVKVMGRHKPENIVIEMARENQTTQKGQKNSRERMKRIEEGIKELGSQILKEHPVENTQLQNEKLYLYYLQNGRDMYVDQELDINRLSDYDVDHIVPQSFLKDDSIDNKVLTRSDKARGKSDNVPSEEVVKKMKNYWRQLLNAKLITQRKFDNLTKAERGGLSELDKAGFIKRQLVETRQITKHVAQILDSRMNTKYDENDKLIREVKVITLKSKLVSDFRKDFQFYKVREINNYHHAHDAYLNAVVGTALIKKYPKLESEFVYGDYKVYDVRKMIAKSEQEIGKATAKYFFYSNIMNFFKTEITLANGEIRKRPLIETNGETGEIVWDKGRDFATVRKVLSMPQVNIVKKTEVQTGGFSKESILPKRNSDKLIARKKDWDPKKYGGFDSPTVAYSVLVVAKVEKGKSKKLKSVKELLGITIMERSSFEKNPIDFLEAKGYKEVKKDLIIKLPKYSLFELENGRKRMLASAGELQKGNELALPSKYVNFLYLASHYEKLKGSPEDNEQKQLFVEQHKHYLDEIIEQISEFSKRVILADANLDKVLSAYNKHRDKPIREQAENIIHLFTLTNLGAPAAFKYFDTTIDRKRYTSTKEVLDATLIHQSITGLYETRIDLSQLGGDGGPAPEAAAKGSSGGTLNIEDEYRLHETSKEPDVSLGSTWLSDFPQAWAETGGMGLAVRQAPLIIPLKATSTPVSIKQYPMSQEARLGIKPHIQRLLDQGILVPCQSPWNTPLLPVKKPGTNDYRPVQDLREVNKRVEDIHPTVPNPYNLLSGLPPSHQWYTVLDLKDAFFCLRLHPTSQPLFAFEWRDPEMGISGQLTWTRLPQGFKNSPTLFNEALHRDLAGFRIQHPDLILLQYVDDLLLAATSELDCQQGTRALLQTLGDLGYRASAKKAQICQKQVKYLGYLLKEGQRWLTEARKETVMGQPIPKTPRQLREFLGTAGFCRLWIPGFAEMAAPLYPLTKPGTLFNWGPDQQKAFQEIKQALLTAPALGLPDLTKPFELFVDEKQGYAKGVLTQKLGPWRRPVAYLSKKLDPVAAGWPPCLRMVAAIAVLTKDAGKLTMGQPLVILAPHAVEALVKQPPDRWLSNARMTHYQALLLDTDRVQFGPVVALNPATLLPLPEEGLQHDCLDILAEAHGTRSDLMDQPLPDADHTWYTDGSSFLQEGQRKAGAAVTTETEVIWARALPAGTSAQRAELIALTQALKMAEGKKLNVYTDSRYAFATAHIHGEIYRRRGWLTSEGKEIKNKDEILALLKALFLPKRLSIIHCPGHQKGNSAEARGNRMADQAAREVATRETPETSTLLAGKRTADGSEFEKRTADGSEFESPKKKAKVE

SEQ ID NO: 2254 - protein, 2090 aa, synthetic construct
  source 1..2090: note = Description of Artificial Sequence: Synthetic polypeptide
MPAAKRVKLDGGDKKYSIGLDIGTNSVGWAVITDEYKVPSKKFKVLGNTDRHSIKKNLIGALLFDSGETAEATRLKRTARRRYTRRKNRICYLQEIFSNEMAKVDDSFFHRLEESFLVEEDKKHERHPIFGNIVDEVAYHEKYPTIYHLRKKLVDSTDKADLRLIYLALAHMIKFRGHFLIEGDLNPDNSDVDKLFIQLVQTYNQLFEENPINASGVDAKAILSARLSKSRRLENLIAQLPGEKKNGLFGNLIALSLGLTPNFKSNFDLAEDAKLQLSKDTYDDDLDNLLAQIGDQYADLFLAAKNLSDAILLSDILRVNTEITKAPLSASMIKRYDEHHQDLTLLKALVRQQLPEKYKEIFFDQSKNGYAGYIDGGASQEEFYKFIKPILEKMDGTEELLVKLNREDLLRKQRTFDNGSIPHQIHLGELHAILRRQEDFYPFLKDNREKIEKILTFRIPYYVGPLARGNSRFAWMTRKSEETITPWNFEEVVDKGASAQSFIERMTNFDKNLPNEKVLPKHSLLYEYFTVYNELTKVKYVTEGMRKPAFLSGEQKKAIVDLLFKTNRKVTVKQLKEDYFKKIECFDSVEISGVEDRFNASLGTYHDLLKIIKDKDFLDNEENEDILEDIVLTLTLFEDREMIEERLKTYAHLFDDKVMKQLKRRRYTGWGRLSRKLINGIRDKQSGKTILDFLKSDGFANRNFMQLIHDDSLTFKEDIQKAQVSGQGDSLHEHIANLAGSPAIKKGILQTVKVVDELVKVMGRHKPENIVIEMARENQTTQKGQKNSRERMKRIEEGIKELGSQILKEHPVENTQLQNEKLYLYYLQNGRDMYVDQELDINRLSDYDVDHIVPQSFLKDDSIDNKVLTRSDKARGKSDNVPSEEVVKKMKNYWRQLLNAKLITQRKFDNLTKAERGGLSELDKAGFIKRQLVETRQITKHVAQILDSRMNTKYDENDKLIREVKVITLKSKLVSDFRKDFQFYKVREINNYHHAHDAYLNAVVGTALIKKYPKLESEFVYGDYKVYDVRKMIAKSEQEIGKATAKYFFYSNIMNFFKTEITLANGEIRKRPLIETNGETGEIVWDKGRDFATVRKVLSMPQVNIVKKTEVQTGGFSKESILPKRNSDKLIARKKDWDPKKYGGFDSPTVAYSVLVVAKVEKGKSKKLKSVKELLGITIMERSSFEKNPIDFLEAKGYKEVKKDLIIKLPKYSLFELENGRKRMLASAGELQKGNELALPSKYVNFLYLASHYEKLKGSPEDNEQKQLFVEQHKHYLDEIIEQISEFSKRVILADANLDKVLSAYNKHRDKPIREQAENIIHLFTLTNLGAPAAFKYFDTTIDRKRYTSTKEVLDATLIHQSITGLYETRIDLSQLGGDGGGGGGGGGTLNIEDEYRLHETSKEPDVSLGSTWLSDFPQAWAETGGMGLAVRQAPLIIPLKATSTPVSIKQYPMSQEARLGIKPHIQRLLDQGILVPCQSPWNTPLLPVKKPGTNDYRPVQDLREVNKRVEDIHPTVPNPYNLLSGLPPSHQWYTVLDLKDAFFCLRLHPTSQPLFAFEWRDPEMGISGQLTWTRLPQGFKNSPTLFNEALHRDLAGFRIQHPDLILLQYVDDLLLAATSELDCQQGTRALLQTLGDLGYRASAKKAQICQKQVKYLGYLLKEGQRWLTEARKETVMGQPIPKTPRQLREFLGTAGFCRLWIPGFAEMAAPLYPLTKPGTLFNWGPDQQKAFQEIKQALLTAPALGLPDLTKPFELFVDEKQGYAKGVLTQKLGPWRRPVAYLSKKLDPVAAGWPPCLRMVAAIAVLTKDAGKLTMGQPLVILAPHAVEALVKQPPDRWLSNARMTHYQALLLDTDRVQFGPVVALNPATLLPLPEEGLQHDCLDILAEAHGTRSDLMDQPLPDADHTWYTDGSSFLQEGQRKAGAAVTTETEVIWARALPAGTSAQRAELIALTQALKMAEGKKLNVYTDSRYAFATAHIHGEIYRRRGWLTSEGKEIKNKDEILALLKALFLPKRLSIIHCPGHQKGNSAEARGNRMADQAAREVATRETPETSTLLAGKRTADGSEFEKRTADGSEFESPKKKAKVE

SEQ ID NO: 2255 - protein, 2096 aa, synthetic construct
  source 1..2096: note = Description of Artificial Sequence: Synthetic polypeptide
MPAAKRVKLDGGDKKYSIGLDIGTNSVGWAVITDEYKVPSKKFKVLGNTDRHSIKKNLIGALLFDSGETAEATRLKRTARRRYTRRKNRICYLQEIFSNEMAKVDDSFFHRLEESFLVEEDKKHERHPIFGNIVDEVAYHEKYPTIYHLRKKLVDSTDKADLRLIYLALAHMIKFRGHFLIEGDLNPDNSDVDKLFIQLVQTYNQLFEENPINASGVDAKAILSARLSKSRRLENLIAQLPGEKKNGLFGNLIALSLGLTPNFKSNFDLAEDAKLQLSKDTYDDDLDNLLAQIGDQYADLFLAAKNLSDAILLSDILRVNTEITKAPLSASMIKRYDEHHQDLTLLKALVRQQLPEKYKEIFFDQSKNGYAGYIDGGASQEEFYKFIKPILEKMDGTEELLVKLNREDLLRKQRTFDNGSIPHQIHLGELHAILRRQEDFYPFLKDNREKIEKILTFRIPYYVGPLARGNSRFAWMTRKSEETITPWNFEEVVDKGASAQSFIERMTNFDKNLPNEKVLPKHSLLYEYFTVYNELTKVKYVTEGMRKPAFLSGEQKKAIVDLLFKTNRKVTVKQLKEDYFKKIECFDSVEISGVEDRFNASLGTYHDLLKIIKDKDFLDNEENEDILEDIVLTLTLFEDREMIEERLKTYAHLFDDKVMKQLKRRRYTGWGRLSRKLINGIRDKQSGKTILDFLKSDGFANRNFMQLIHDDSLTFKEDIQKAQVSGQGDSLHEHIANLAGSPAIKKGILQTVKVVDELVKVMGRHKPENIVIEMARENQTTQKGQKNSRERMKRIEEGIKELGSQILKEHPVENTQLQNEKLYLYYLQNGRDMYVDQELDINRLSDYDVDHIVPQSFLKDDSIDNKVLTRSDKARGKSDNVPSEEVVKKMKNYWRQLLNAKLITQRKFDNLTKAERGGLSELDKAGFIKRQLVETRQITKHVAQILDSRMNTKYDENDKLIREVKVITLKSKLVSDFRKDFQFYKVREINNYHHAHDAYLNAVVGTALIKKYPKLESEFVYGDYKVYDVRKMIAKSEQEIGKATAKYFFYSNIMNFFKTEITLANGEIRKRPLIETNGETGEIVWDKGRDFATVRKVLSMPQVNIVKKTEVQTGGFSKESILPKRNSDKLIARKKDWDPKKYGGFDSPTVAYSVLVVAKVEKGKSKKLKSVKELLGITIMERSSFEKNPIDFLEAKGYKEVKKDLIIKLPKYSLFELENGRKRMLASAGELQKGNELALPSKYVNFLYLASHYEKLKGSPEDNEQKQLFVEQHKHYLDEIIEQISEFSKRVILADANLDKVLSAYNKHRDKPIREQAENIIHLFTLTNLGAPAAFKYFDTTIDRKRYTSTKEVLDATLIHQSITGLYETRIDLSQLGGDGGEAAAKPAPGSSGGTLNIEDEYRLHETSKEPDVSLGSTWLSDFPQAWAETGGMGLAVRQAPLIIPLKATSTPVSIKQYPMSQEARLGIKPHIQRLLDQGILVPCQSPWNTPLLPVKKPGTNDYRPVQDLREVNKRVEDIHPTVPNPYNLLSGLPPSHQWYTVLDLKDAFFCLRLHPTSQPLFAFEWRDPEMGISGQLTWTRLPQGFKNSPTLFNEALHRDLAGFRIQHPDLILLQYVDDLLLAATSELDCQQGTRALLQTLGDLGYRASAKKAQICQKQVKYLGYLLKEGQRWLTEARKETVMGQPIPKTPRQLREFLGTAGFCRLWIPGFAEMAAPLYPLTKPGTLFNWGPDQQKAFQEIKQALLTAPALGLPDLTKPFELFVDEKQGYAKGVLTQKLGPWRRPVAYLSKKLDPVAAGWPPCLRMVAAIAVLTKDAGKLTMGQPLVILAPHAVEALVKQPPDRWLSNARMTHYQALLLDTDRVQFGPVVALNPATLLPLPEEGLQHDCLDILAEAHGTRSDLMDQPLPDADHTWYTDGSSFLQEGQRKAGAAVTTETEVIWARALPAGTSAQRAELIALTQALKMAEGKKLNVYTDSRYAFATAHIHGEIYRRRGWLTSEGKEIKNKDEILALLKALFLPKRLSIIHCPGHQKGNSAEARGNRMADQAAREVATRETPETSTLLAGKRTADGSEFEKRTADGSEFESPKKKAKVE

SEQ ID NO: 2256 - protein, 2096 aa, synthetic construct
  source 1..2096: note = Description of Artificial Sequence: Synthetic polypeptide
MPAAKRVKLDGGDKKYSIGLDIGTNSVGWAVITDEYKVPSKKFKVLGNTDRHSIKKNLIGALLFDSGETAEATRLKRTARRRYTRRKNRICYLQEIFSNEMAKVDDSFFHRLEESFLVEEDKKHERHPIFGNIVDEVAYHEKYPTIYHLRKKLVDSTDKADLRLIYLALAHMIKFRGHFLIEGDLNPDNSDVDKLFIQLVQTYNQLFEENPINASGVDAKAILSARLSKSRRLENLIAQLPGEKKNGLFGNLIALSLGLTPNFKSNFDLAEDAKLQLSKDTYDDDLDNLLAQIGDQYADLFLAAKNLSDAILLSDILRVNTEITKAPLSASMIKRYDEHHQDLTLLKALVRQQLPEKYKEIFFDQSKNGYAGYIDGGASQEEFYKFIKPILEKMDGTEELLVKLNREDLLRKQRTFDNGSIPHQIHLGELHAILRRQEDFYPFLKDNREKIEKILTFRIPYYVGPLARGNSRFAWMTRKSEETITPWNFEEVVDKGASAQSFIERMTNFDKNLPNEKVLPKHSLLYEYFTVYNELTKVKYVTEGMRKPAFLSGEQKKAIVDLLFKTNRKVTVKQLKEDYFKKIECFDSVEISGVEDRFNASLGTYHDLLKIIKDKDFLDNEENEDILEDIVLTLTLFEDREMIEERLKTYAHLFDDKVMKQLKRRRYTGWGRLSRKLINGIRDKQSGKTILDFLKSDGFANRNFMQLIHDDSLTFKEDIQKAQVSGQGDSLHEHIANLAGSPAIKKGILQTVKVVDELVKVMGRHKPENIVIEMARENQTTQKGQKNSRERMKRIEEGIKELGSQILKEHPVENTQLQNEKLYLYYLQNGRDMYVDQELDINRLSDYDVDHIVPQSFLKDDSIDNKVLTRSDKARGKSDNVPSEEVVKKMKNYWRQLLNAKLITQRKFDNLTKAERGGLSELDKAGFIKRQLVETRQITKHVAQILDSRMNTKYDENDKLIREVKVITLKSKLVSDFRKDFQFYKVREINNYHHAHDAYLNAVVGTALIKKYPKLESEFVYGDYKVYDVRKMIAKSEQEIGKATAKYFFYSNIMNFFKTEITLANGEIRKRPLIETNGETGEIVWDKGRDFATVRKVLSMPQVNIVKKTEVQTGGFSKESILPKRNSDKLIARKKDWDPKKYGGFDSPTVAYSVLVVAKVEKGKSKKLKSVKELLGITIMERSSFEKNPIDFLEAKGYKEVKKDLIIKLPKYSLFELENGRKRMLASAGELQKGNELALPSKYVNFLYLASHYEKLKGSPEDNEQKQLFVEQHKHYLDEIIEQISEFSKRVILADANLDKVLSAYNKHRDKPIREQAENIIHLFTLTNLGAPAAFKYFDTTIDRKRYTSTKEVLDATLIHQSITGLYETRIDLSQLGGDGGEAAAKGGGGGSGGTLNIEDEYRLHETSKEPDVSLGSTWLSDFPQAWAETGGMGLAVRQAPLIIPLKATSTPVSIKQYPMSQEARLGIKPHIQRLLDQGILVPCQSPWNTPLLPVKKPGTNDYRPVQDLREVNKRVEDIHPTVPNPYNLLSGLPPSHQWYTVLDLKDAFFCLRLHPTSQPLFAFEWRDPEMGISGQLTWTRLPQGFKNSPTLFNEALHRDLAGFRIQHPDLILLQYVDDLLLAATSELDCQQGTRALLQTLGDLGYRASAKKAQICQKQVKYLGYLLKEGQRWLTEARKETVMGQPIPKTPRQLREFLGTAGFCRLWIPGFAEMAAPLYPLTKPGTLFNWGPDQQKAFQEIKQALLTAPALGLPDLTKPFELFVDEKQGYAKGVLTQKLGPWRRPVAYLSKKLDPVAAGWPPCLRMVAAIAVLTKDAGKLTMGQPLVILAPHAVEALVKQPPDRWLSNARMTHYQALLLDTDRVQFGPVVALNPATLLPLPEEGLQHDCLDILAEAHGTRSDLMDQPLPDADHTWYTDGSSFLQEGQRKAGAAVTTETEVIWARALPAGTSAQRAELIALTQALKMAEGKKLNVYTDSRYAFATAHIHGEIYRRRGWLTSEGKEIKNKDEILALLKALFLPKRLSIIHCPGHQKGNSAEARGNRMADQAAREVATRETPETSTLLAGKRTADGSEFEKRTADGSEFESPKKKAKVE

SEQ ID NO: 2257 - protein, 2096 aa, synthetic construct
  source 1..2096: note = Description of Artificial Sequence: Synthetic polypeptide
MPAAKRVKLDGGDKKYSIGLDIGTNSVGWAVITDEYKVPSKKFKVLGNTDRHSIKKNLIGALLFDSGETAEATRLKRTARRRYTRRKNRICYLQEIFSNEMAKVDDSFFHRLEESFLVEEDKKHERHPIFGNIVDEVAYHEKYPTIYHLRKKLVDSTDKADLRLIYLALAHMIKFRGHFLIEGDLNPDNSDVDKLFIQLVQTYNQLFEENPINASGVDAKAILSARLSKSRRLENLIAQLPGEKKNGLFGNLIALSLGLTPNFKSNFDLAEDAKLQLSKDTYDDDLDNLLAQIGDQYADLFLAAKNLSDAILLSDILRVNTEITKAPLSASMIKRYDEHHQDLTLLKALVRQQLPEKYKEIFFDQSKNGYAGYIDGGASQEEFYKFIKPILEKMDGTEELLVKLNREDLLRKQRTFDNGSIPHQIHLGELHAILRRQEDFYPFLKDNREKIEKILTFRIPYYVGPLARGNSRFAWMTRKSEETITPWNFEEVVDKGASAQSFIERMTNFDKNLPNEKVLPKHSLLYEYFTVYNELTKVKYVTEGMRKPAFLSGEQKKAIVDLLFKTNRKVTVKQLKEDYFKKIECFDSVEISGVEDRFNASLGTYHDLLKIIKDKDFLDNEENEDILEDIVLTLTLFEDREMIEERLKTYAHLFDDKVMKQLKRRRYTGWGRLSRKLINGIRDKQSGKTILDFLKSDGFANRNFMQLIHDDSLTFKEDIQKAQVSGQGDSLHEHIANLAGSPAIKKGILQTVKVVDELVKVMGRHKPENIVIEMARENQTTQKGQKNSRERMKRIEEGIKELGSQILKEHPVENTQLQNEKLYLYYLQNGRDMYVDQELDINRLSDYDVDHIVPQSFLKDDSIDNKVLTRSDKARGKSDNVPSEEVVKKMKNYWRQLLNAKLITQRKFDNLTKAERGGLSELDKAGFIKRQLVETRQITKHVAQILDSRMNTKYDENDKLIREVKVITLKSKLVSDFRKDFQFYKVREINNYHHAHDAYLNAVVGTALIKKYPKLESEFVYGDYKVYDVRKMIAKSEQEIGKATAKYFFYSNIMNFFKTEITLANGEIRKRPLIETNGETGEIVWDKGRDFATVRKVLSMPQVNIVKKTEVQTGGFSKESILPKRNSDKLIARKKDWDPKKYGGFDSPTVAYSVLVVAKVEKGKSKKLKSVKELLGITIMERSSFEKNPIDFLEAKGYKEVKKDLIIKLPKYSLFELENGRKRMLASAGELQKGNELALPSKYVNFLYLASHYEKLKGSPEDNEQKQLFVEQHKHYLDEIIEQISEFSKRVILADANLDKVLSAYNKHRDKPIREQAENIIHLFTLTNLGAPAAFKYFDTTIDRKRYTSTKEVLDATLIHQSITGLYETRIDLSQLGGDGGEAAAKGGSPAPGGTLNIEDEYRLHETSKEPDVSLGSTWLSDFPQAWAETGGMGLAVRQAPLIIPLKATSTPVSIKQYPMSQEARLGIKPHIQRLLDQGILVPCQSPWNTPLLPVKKPGTNDYRPVQDLREVNKRVEDIHPTVPNPYNLLSGLPPSHQWYTVLDLKDAFFCLRLHPTSQPLFAFEWRDPEMGISGQLTWTRLPQGFKNSPTLFNEALHRDLAGFRIQHPDLILLQYVDDLLLAATSELDCQQGTRALLQTLGDLGYRASAKKAQICQKQVKYLGYLLKEGQRWLTEARKETVMGQPIPKTPRQLREFLGTAGFCRLWIPGFAEMAAPLYPLTKPGTLFNWGPDQQKAFQEIKQALLTAPALGLPDLTKPFELFVDEKQGYAKGVLTQKLGPWRRPVAYLSKKLDPVAAGWPPCLRMVAAIAVLTKDAGKLTMGQPLVILAPHAVEALVKQPPDRWLSNARMTHYQALLLDTDRVQFGPVVALNPATLLPLPEEGLQHDCLDILAEAHGTRSDLMDQPLPDADHTWYTDGSSFLQEGQRKAGAAVTTETEVIWARALPAGTSAQRAELIALTQALKMAEGKKLNVYTDSRYAFATAHIHGEIYRRRGWLTSEGKEIKNKDEILALLKALFLPKRLSIIHCPGHQKGNSAEARGNRMADQAAREVATRETPETSTLLAGKRTADGSEFEKRTADGSEFESPKKKAKVE

SEQ ID NO: 2258 - protein, 2088 aa, synthetic construct
  source 1..2088: note = Description of Artificial Sequence: Synthetic polypeptide
MPAAKRVKLDGGDKKYSIGLDIGTNSVGWAVITDEYKVPSKKFKVLGNTDRHSIKKNLIGALLFDSGETAEATRLKRTARRRYTRRKNRICYLQEIFSNEMAKVDDSFFHRLEESFLVEEDKKHERHPIFGNIVDEVAYHEKYPTIYHLRKKLVDSTDKADLRLIYLALAHMIKFRGHFLIEGDLNPDNSDVDKLFIQLVQTYNQLFEENPINASGVDAKAILSARLSKSRRLENLIAQLPGEKKNGLFGNLIALSLGLTPNFKSNFDLAEDAKLQLSKDTYDDDLDNLLAQIGDQYADLFLAAKNLSDAILLSDILRVNTEITKAPLSASMIKRYDEHHQDLTLLKALVRQQLPEKYKEIFFDQSKNGYAGYIDGGASQEEFYKFIKPILEKMDGTEELLVKLNREDLLRKQRTFDNGSIPHQIHLGELHAILRRQEDFYPFLKDNREKIEKILTFRIPYYVGPLARGNSRFAWMTRKSEETITPWNFEEVVDKGASAQSFIERMTNFDKNLPNEKVLPKHSLLYEYFTVYNELTKVKYVTEGMRKPAFLSGEQKKAIVDLLFKTNRKVTVKQLKEDYFKKIECFDSVEISGVEDRFNASLGTYHDLLKIIKDKDFLDNEENEDILEDIVLTLTLFEDREMIEERLKTYAHLFDDKVMKQLKRRRYTGWGRLSRKLINGIRDKQSGKTILDFLKSDGFANRNFMQLIHDDSLTFKEDIQKAQVSGQGDSLHEHIANLAGSPAIKKGILQTVKVVDELVKVMGRHKPENIVIEMARENQTTQKGQKNSRERMKRIEEGIKELGSQILKEHPVENTQLQNEKLYLYYLQNGRDMYVDQELDINRLSDYDVDHIVPQSFLKDDSIDNKVLTRSDKARGKSDNVPSEEVVKKMKNYWRQLLNAKLITQRKFDNLTKAERGGLSELDKAGFIKRQLVETRQITKHVAQILDSRMNTKYDENDKLIREVKVITLKSKLVSDFRKDFQFYKVREINNYHHAHDAYLNAVVGTALIKKYPKLESEFVYGDYKVYDVRKMIAKSEQEIGKATAKYFFYSNIMNFFKTEITLANGEIRKRPLIETNGETGEIVWDKGRDFATVRKVLSMPQVNIVKKTEVQTGGFSKESILPKRNSDKLIARKKDWDPKKYGGFDSPTVAYSVLVVAKVEKGKSKKLKSVKELLGITIMERSSFEKNPIDFLEAKGYKEVKKDLIIKLPKYSLFELENGRKRMLASAGELQKGNELALPSKYVNFLYLASHYEKLKGSPEDNEQKQLFVEQHKHYLDEIIEQISEFSKRVILADANLDKVLSAYNKHRDKPIREQAENIIHLFTLTNLGAPAAFKYFDTTIDRKRYTSTKEVLDATLIHQSITGLYETRIDLSQLGGDGGPAPGGTLNIEDEYRLHETSKEPDVSLGSTWLSDFPQAWAETGGMGLAVRQAPLIIPLKATSTPVSIKQYPMSQEARLGIKPHIQRLLDQGILVPCQSPWNTPLLPVKKPGTNDYRPVQDLREVNKRVEDIHPTVPNPYNLLSGLPPSHQWYTVLDLKDAFFCLRLHPTSQPLFAFEWRDPEMGISGQLTWTRLPQGFKNSPTLFNEALHRDLAGFRIQHPDLILLQYVDDLLLAATSELDCQQGTRALLQTLGDLGYRASAKKAQICQKQVKYLGYLLKEGQRWLTEARKETVMGQPIPKTPRQLREFLGTAGFCRLWIPGFAEMAAPLYPLTKPGTLFNWGPDQQKAFQEIKQALLTAPALGLPDLTKPFELFVDEKQGYAKGVLTQKLGPWRRPVAYLSKKLDPVAAGWPPCLRMVAAIAVLTKDAGKLTMGQPLVILAPHAVEALVKQPPDRWLSNARMTHYQALLLDTDRVQFGPVVALNPATLLPLPEEGLQHDCLDILAEAHGTRSDLMDQPLPDADHTWYTDGSSFLQEGQRKAGAAVTTETEVIWARALPAGTSAQRAELIALTQALKMAEGKKLNVYTDSRYAFATAHIHGEIYRRRGWLTSEGKEIKNKDEILALLKALFLPKRLSIIHCPGHQKGNSAEARGNRMADQAAREVATRETPETSTLLAGKRTADGSEFEKRTADGSEFESPKKKAKVE

SEQ ID NO: 2259 - protein, 2094 aa, synthetic construct
  source 1..2094: note = Description of Artificial Sequence: Synthetic polypeptide
MPAAKRVKLDGGDKKYSIGLDIGTNSVGWAVITDEYKVPSKKFKVLGNTDRHSIKKNLIGALLFDSGETAEATRLKRTARRRYTRRKNRICYLQEIFSNEMAKVDDSFFHRLEESFLVEEDKKHERHPIFGNIVDEVAYHEKYPTIYHLRKKLVDSTDKADLRLIYLALAHMIKFRGHFLIEGDLNPDNSDVDKLFIQLVQTYNQLFEENPINASGVDAKAILSARLSKSRRLENLIAQLPGEKKNGLFGNLIALSLGLTPNFKSNFDLAEDAKLQLSKDTYDDDLDNLLAQIGDQYADLFLAAKNLSDAILLSDILRVNTEITKAPLSASMIKRYDEHHQDLTLLKALVRQQLPEKYKEIFFDQSKNGYAGYIDGGASQEEFYKFIKPILEKMDGTEELLVKLNREDLLRKQRTFDNGSIPHQIHLGELHAILRRQEDFYPFLKDNREKIEKILTFRIPYYVGPLARGNSRFAWMTRKSEETITPWNFEEVVDKGASAQSFIERMTNFDKNLPNEKVLPKHSLLYEYFTVYNELTKVKYVTEGMRKPAFLSGEQKKAIVDLLFKTNRKVTVKQLKEDYFKKIECFDSVEISGVEDRFNASLGTYHDLLKIIKDKDFLDNEENEDILEDIVLTLTLFEDREMIEERLKTYAHLFDDKVMKQLKRRRYTGWGRLSRKLINGIRDKQSGKTILDFLKSDGFANRNFMQLIHDDSLTFKEDIQKAQVSGQGDSLHEHIANLAGSPAIKKGILQTVKVVDELVKVMGRHKPENIVIEMARENQTTQKGQKNSRERMKRIEEGIKELGSQILKEHPVENTQLQNEKLYLYYLQNGRDMYVDQELDINRLSDYDVDHIVPQSFLKDDSIDNKVLTRSDKARGKSDNVPSEEVVKKMKNYWRQLLNAKLITQRKFDNLTKAERGGLSELDKAGFIKRQLVETRQITKHVAQILDSRMNTKYDENDKLIREVKVITLKSKLVSDFRKDFQFYKVREINNYHHAHDAYLNAVVGTALIKKYPKLESEFVYGDYKVYDVRKMIAKSEQEIGKATAKYFFYSNIMNFFKTEITLANGEIRKRPLIETNGETGEIVWDKGRDFATVRKVLSMPQVNIVKKTEVQTGGFSKESILPKRNSDKLIARKKDWDPKKYGGFDSPTVAYSVLVVAKVEKGKSKKLKSVKELLGITIMERSSFEKNPIDFLEAKGYKEVKKDLIIKLPKYSLFELENGRKRMLASAGELQKGNELALPSKYVNFLYLASHYEKLKGSPEDNEQKQLFVEQHKHYLDEIIEQISEFSKRVILADANLDKVLSAYNKHRDKPIREQAENIIHLFTLTNLGAPAAFKYFDTTIDRKRYTSTKEVLDATLIHQSITGLYETRIDLSQLGGDGGGGSGGGPAPGGTLNIEDEYRLHETSKEPDVSLGSTWLSDFPQAWAETGGMGLAVRQAPLIIPLKATSTPVSIKQYPMSQEARLGIKPHIQRLLDQGILVPCQSPWNTPLLPVKKPGTNDYRPVQDLREVNKRVEDIHPTVPNPYNLLSGLPPSHQWYTVLDLKDAFFCLRLHPTSQPLFAFEWRDPEMGISGQLTWTRLPQGFKNSPTLFNEALHRDLAGFRIQHPDLILLQYVDDLLLAATSELDCQQGTRALLQTLGDLGYRASAKKAQICQKQVKYLGYLLKEGQRWLTEARKETVMGQPIPKTPRQLREFLGTAGFCRLWIPGFAEMAAPLYPLTKPGTLFNWGPDQQKAFQEIKQALLTAPALGLPDLTKPFELFVDEKQGYAKGVLTQKLGPWRRPVAYLSKKLDPVAAGWPPCLRMVAAIAVLTKDAGKLTMGQPLVILAPHAVEALVKQPPDRWLSNARMTHYQALLLDTDRVQFGPVVALNPATLLPLPEEGLQHDCLDILAEAHGTRSDLMDQPLPDADHTWYTDGSSFLQEGQRKAGAAVTTETEVIWARALPAGTSAQRAELIALTQALKMAEGKKLNVYTDSRYAFATAHIHGEIYRRRGWLTSEGKEIKNKDEILALLKALFLPKRLSIIHCPGHQKGNSAEARGNRMADQAAREVATRETPETSTLLAGKRTADGSEFEKRTADGSEFESPKKKAKVE

SEQ ID NO: 2260 - protein, 2094 aa, synthetic construct
  source 1..2094: note = Description of Artificial Sequence: Synthetic polypeptide
MPAAKRVKLDGGDKKYSIGLDIGTNSVGWAVITDEYKVPSKKFKVLGNTDRHSIKKNLIGALLFDSGETAEATRLKRTARRRYTRRKNRICYLQEIFSNEMAKVDDSFFHRLEESFLVEEDKKHERHPIFGNIVDEVAYHEKYPTIYHLRKKLVDSTDKADLRLIYLALAHMIKFRGHFLIEGDLNPDNSDVDKLFIQLVQTYNQLFEENPINASGVDAKAILSARLSKSRRLENLIAQLPGEKKNGLFGNLIALSLGLTPNFKSNFDLAEDAKLQLSKDTYDDDLDNLLAQIGDQYADLFLAAKNLSDAILLSDILRVNTEITKAPLSASMIKRYDEHHQDLTLLKALVRQQLPEKYKEIFFDQSKNGYAGYIDGGASQEEFYKFIKPILEKMDGTEELLVKLNREDLLRKQRTFDNGSIPHQIHLGELHAILRRQEDFYPFLKDNREKIEKILTFRIPYYVGPLARGNSRFAWMTRKSEETITPWNFEEVVDKGASAQSFIERMTNFDKNLPNEKVLPKHSLLYEYFTVYNELTKVKYVTEGMRKPAFLSGEQKKAIVDLLFKTNRKVTVKQLKEDYFKKIECFDSVEISGVEDRFNASLGTYHDLLKIIKDKDFLDNEENEDILEDIVLTLTLFEDREMIEERLKTYAHLFDDKVMKQLKRRRYTGWGRLSRKLINGIRDKQSGKTILDFLKSDGFANRNFMQLIHDDSLTFKEDIQKAQVSGQGDSLHEHIANLAGSPAIKKGILQTVKVVDELVKVMGRHKPENIVIEMARENQTTQKGQKNSRERMKRIEEGIKELGSQILKEHPVENTQLQNEKLYLYYLQNGRDMYVDQELDINRLSDYDVDHIVPQSFLKDDSIDNKVLTRSDKARGKSDNVPSEEVVKKMKNYWRQLLNAKLITQRKFDNLTKAERGGLSELDKAGFIKRQLVETRQITKHVAQILDSRMNTKYDENDKLIREVKVITLKSKLVSDFRKDFQFYKVREINNYHHAHDAYLNAVVGTALIKKYPKLESEFVYGDYKVYDVRKMIAKSEQEIGKATAKYFFYSNIMNFFKTEITLANGEIRKRPLIETNGETGEIVWDKGRDFATVRKVLSMPQVNIVKKTEVQTGGFSKESILPKRNSDKLIARKKDWDPKKYGGFDSPTVAYSVLVVAKVEKGKSKKLKSVKELLGITIMERSSFEKNPIDFLEAKGYKEVKKDLIIKLPKYSLFELENGRKRMLASAGELQKGNELALPSKYVNFLYLASHYEKLKGSPEDNEQKQLFVEQHKHYLDEIIEQISEFSKRVILADANLDKVLSAYNKHRDKPIREQAENIIHLFTLTNLGAPAAFKYFDTTIDRKRYTSTKEVLDATLIHQSITGLYETRIDLSQLGGDGGGGSPAPGSSGGTLNIEDEYRLHETSKEPDVSLGSTWLSDFPQAWAETGGMGLAVRQAPLIIPLKATSTPVSIKQYPMSQEARLGIKPHIQRLLDQGILVPCQSPWNTPLLPVKKPGTNDYRPVQDLREVNKRVEDIHPTVPNPYNLLSGLPPSHQWYTVLDLKDAFFCLRLHPTSQPLFAFEWRDPEMGISGQLTWTRLPQGFKNSPTLFNEALHRDLAGFRIQHPDLILLQYVDDLLLAATSELDCQQGTRALLQTLGDLGYRASAKKAQICQKQVKYLGYLLKEGQRWLTEARKETVMGQPIPKTPRQLREFLGTAGFCRLWIPGFAEMAAPLYPLTKPGTLFNWGPDQQKAFQEIKQALLTAPALGLPDLTKPFELFVDEKQGYAKGVLTQKLGPWRRPVAYLSKKLDPVAAGWPPCLRMVAAIAVLTKDAGKLTMGQPLVILAPHAVEALVKQPPDRWLSNARMTHYQALLLDTDRVQFGPVVALNPATLLPLPEEGLQHDCLDILAEAHGTRSDLMDQPLPDADHTWYTDGSSFLQEGQRKAGAAVTTETEVIWARALPAGTSAQRAELIALTQALKMAEGKKLNVYTDSRYAFATAHIHGEIYRRRGWLTSEGKEIKNKDEILALLKALFLPKRLSIIHCPGHQKGNSAEARGNRMADQAAREVATRETPETSTLLAGKRTADGSEFEKRTADGSEFESPKKKAKVE

SEQ ID NO: 2261 - protein, 2096 aa, synthetic construct
  source 1..2096: note = Description of Artificial Sequence: Synthetic polypeptide
MPAAKRVKLDGGDKKYSIGLDIGTNSVGWAVITDEYKVPSKKFKVLGNTDRHSIKKNLIGALLFDSGETAEATRLKRTARRRYTRRKNRICYLQEIFSNEMAKVDDSFFHRLEESFLVEEDKKHERHPIFGNIVDEVAYHEKYPTIYHLRKKLVDSTDKADLRLIYLALAHMIKFRGHFLIEGDLNPDNSDVDKLFIQLVQTYNQLFEENPINASGVDAKAILSARLSKSRRLENLIAQLPGEKKNGLFGNLIALSLGLTPNFKSNFDLAEDAKLQLSKDTYDDDLDNLLAQIGDQYADLFLAAKNLSDAILLSDILRVNTEITKAPLSASMIKRYDEHHQDLTLLKALVRQQLPEKYKEIFFDQSKNGYAGYIDGGASQEEFYKFIKPILEKMDGTEELLVKLNREDLLRKQRTFDNGSIPHQIHLGELHAILRRQEDFYPFLKDNREKIEKILTFRIPYYVGPLARGNSRFAWMTRKSEETITPWNFEEVVDKGASAQSFIERMTNFDKNLPNEKVLPKHSLLYEYFTVYNELTKVKYVTEGMRKPAFLSGEQKKAIVDLLFKTNRKVTVKQLKEDYFKKIECFDSVEISGVEDRFNASLGTYHDLLKIIKDKDFLDNEENEDILEDIVLTLTLFEDREMIEERLKTYAHLFDDKVMKQLKRRRYTGWGRLSRKLINGIRDKQSGKTILDFLKSDGFANRNFMQLIHDDSLTFKEDIQKAQVSGQGDSLHEHIANLAGSPAIKKGILQTVKVVDELVKVMGRHKPENIVIEMARENQTTQKGQKNSRERMKRIEEGIKELGSQILKEHPVENTQLQNEKLYLYYLQNGRDMYVDQELDINRLSDYDVDHIVPQSFLKDDSIDNKVLTRSDKARGKSDNVPSEEVVKKMKNYWRQLLNAKLITQRKFDNLTKAERGGLSELDKAGFIKRQLVETRQITKHVAQILDSRMNTKYDENDKLIREVKVITLKSKLVSDFRKDFQFYKVREINNYHHAHDAYLNAVVGTALIKKYPKLESEFVYGDYKVYDVRKMIAKSEQEIGKATAKYFFYSNIMNFFKTEITLANGEIRKRPLIETNGETGEIVWDKGRDFATVRKVLSMPQVNIVKKTEVQTGGFSKESILPKRNSDKLIARKKDWDPKKYGGFDSPTVAYSVLVVAKVEKGKSKKLKSVKELLGITIMERSSFEKNPIDFLEAKGYKEVKKDLIIKLPKYSLFELENGRKRMLASAGELQKGNELALPSKYVNFLYLASHYEKLKGSPEDNEQKQLFVEQHKHYLDEIIEQISEFSKRVILADANLDKVLSAYNKHRDKPIREQAENIIHLFTLTNLGAPAAFKYFDTTIDRKRYTSTKEVLDATLIHQSITGLYETRIDLSQLGGDGGEAAAKGGGGSSGGTLNIEDEYRLHETSKEPDVSLGSTWLSDFPQAWAETGGMGLAVRQAPLIIPLKATSTPVSIKQYPMSQEARLGIKPHIQRLLDQGILVPCQSPWNTPLLPVKKPGTNDYRPVQDLREVNKRVEDIHPTVPNPYNLLSGLPPSHQWYTVLDLKDAFFCLRLHPTSQPLFAFEWRDPEMGISGQLTWTRLPQGFKNSPTLFNEALHRDLAGFRIQHPDLILLQYVDDLLLAATSELDCQQGTRALLQTLGDLGYRASAKKAQICQKQVKYLGYLLKEGQRWLTEARKETVMGQPIPKTPRQLREFLGTAGFCRLWIPGFAEMAAPLYPLTKPGTLFNWGPDQQKAFQEIKQALLTAPALGLPDLTKPFELFVDEKQGYAKGVLTQKLGPWRRPVAYLSKKLDPVAAGWPPCLRMVAAIAVLTKDAGKLTMGQPLVILAPHAVEALVKQPPDRWLSNARMTHYQALLLDTDRVQFGPVVALNPATLLPLPEEGLQHDCLDILAEAHGTRSDLMDQPLPDADHTWYTDGSSFLQEGQRKAGAAVTTETEVIWARALPAGTSAQRAELIALTQALKMAEGKKLNVYTDSRYAFATAHIHGEIYRRRGWLTSEGKEIKNKDEILALLKALFLPKRLSIIHCPGHQKGNSAEARGNRMADQAAREVATRETPETSTLLAGKRTADGSEFEKRTADGSEFESPKKKAKVE

SEQ ID NO: 2262 - protein, 2094 aa, synthetic construct
  source 1..2094: note = Description of Artificial Sequence: Synthetic polypeptide
MPAAKRVKLDGGDKKYSIGLDIGTNSVGWAVITDEYKVPSKKFKVLGNTDRHSIKKNLIGALLFDSGETAEATRLKRTARRRYTRRKNRICYLQEIFSNEMAKVDDSFFHRLEESFLVEEDKKHERHPIFGNIVDEVAYHEKYPTIYHLRKKLVDSTDKADLRLIYLALAHMIKFRGHFLIEGDLNPDNSDVDKLFIQLVQTYNQLFEENPINASGVDAKAILSARLSKSRRLENLIAQLPGEKKNGLFGNLIALSLGLTPNFKSNFDLAEDAKLQLSKDTYDDDLDNLLAQIGDQYADLFLAAKNLSDAILLSDILRVNTEITKAPLSASMIKRYDEHHQDLTLLKALVRQQLPEKYKEIFFDQSKNGYAGYIDGGASQEEFYKFIKPILEKMDGTEELLVKLNREDLLRKQRTFDNGSIPHQIHLGELHAILRRQEDFYPFLKDNREKIEKILTFRIPYYVGPLARGNSRFAWMTRKSEETITPWNFEEVVDKGASAQSFIERMTNFDKNLPNEKVLPKHSLLYEYFTVYNELTKVKYVTEGMRKPAFLSGEQKKAIVDLLFKTNRKVTVKQLKEDYFKKIECFDSVEISGVEDRFNASLGTYHDLLKIIKDKDFLDNEENEDILEDIVLTLTLFEDREMIEERLKTYAHLFDDKVMKQLKRRRYTGWGRLSRKLINGIRDKQSGKTILDFLKSDGFANRNFMQLIHDDSLTFKEDIQKAQVSGQGDSLHEHIANLAGSPAIKKGILQTVKVVDELVKVMGRHKPENIVIEMARENQTTQKGQKNSRERMKRIEEGIKELGSQILKEHPVENTQLQNEKLYLYYLQNGRDMYVDQELDINRLSDYDVDHIVPQSFLKDDSIDNKVLTRSDKARGKSDNVPSEEVVKKMKNYWRQLLNAKLITQRKFDNLTKAERGGLSELDKAGFIKRQLVETRQITKHVAQILDSRMNTKYDENDKLIREVKVITLKSKLVSDFRKDFQFYKVREINNYHHAHDAYLNAVVGTALIKKYPKLESEFVYGDYKVYDVRKMIAKSEQEIGKATAKYFFYSNIMNFFKTEITLANGEIRKRPLIETNGETGEIVWDKGRDFATVRKVLSMPQVNIVKKTEVQTGGFSKESILPKRNSDKLIARKKDWDPKKYGGFDSPTVAYSVLVVAKVEKGKSKKLKSVKELLGITIMERSSFEKNPIDFLEAKGYKEVKKDLIIKLPKYSLFELENGRKRMLASAGELQKGNELALPSKYVNFLYLASHYEKLKGSPEDNEQKQLFVEQHKHYLDEIIEQISEFSKRVILADANLDKVLSAYNKHRDKPIREQAENIIHLFTLTNLGAPAAFKYFDTTIDRKRYTSTKEVLDATLIHQSITGLYETRIDLSQLGGDGGPAPGSSGGGGGTLNIEDEYRLHETSKEPDVSLGSTWLSDFPQAWAETGGMGLAVRQAPLIIPLKATSTPVSIKQYPMSQEARLGIKPHIQRLLDQGILVPCQSPWNTPLLPVKKPGTNDYRPVQDLREVNKRVEDIHPTVPNPYNLLSGLPPSHQWYTVLDLKDAFFCLRLHPTSQPLFAFEWRDPEMGISGQLTWTRLPQGFKNSPTLFNEALHRDLAGFRIQHPDLILLQYVDDLLLAATSELDCQQGTRALLQTLGDLGYRASAKKAQICQKQVKYLGYLLKEGQRWLTEARKETVMGQPIPKTPRQLREFLGTAGFCRLWIPGFAEMAAPLYPLTKPGTLFNWGPDQQKAFQEIKQALLTAPALGLPDLTKPFELFVDEKQGYAKGVLTQKLGPWRRPVAYLSKKLDPVAAGWPPCLRMVAAIAVLTKDAGKLTMGQPLVILAPHAVEALVKQPPDRWLSNARMTHYQALLLDTDRVQFGPVVALNPATLLPLPEEGLQHDCLDILAEAHGTRSDLMDQPLPDADHTWYTDGSSFLQEGQRKAGAAVTTETEVIWARALPAGTSAQRAELIALTQALKMAEGKKLNVYTDSRYAFATAHIHGEIYRRRGWLTSEGKEIKNKDEILALLKALFLPKRLSIIHCPGHQKGNSAEARGNRMADQAAREVATRETPETSTLLAGKRTADGSEFEKRTADGSEFESPKKKAKVE

SEQ ID NO: 2263 - protein, 2096 aa, synthetic construct
  source 1..2096: note = Description of Artificial Sequence: Synthetic polypeptide
MPAAKRVKLDGGDKKYSIGLDIGTNSVGWAVITDEYKVPSKKFKVLGNTDRHSIKKNLIGALLFDSGETAEATRLKRTARRRYTRRKNRICYLQEIFSNEMAKVDDSFFHRLEESFLVEEDKKHERHPIFGNIVDEVAYHEKYPTIYHLRKKLVDSTDKADLRLIYLALAHMIKFRGHFLIEGDLNPDNSDVDKLFIQLVQTYNQLFEENPINASGVDAKAILSARLSKSRRLENLIAQLPGEKKNGLFGNLIALSLGLTPNFKSNFDLAEDAKLQLSKDTYDDDLDNLLAQIGDQYADLFLAAKNLSDAILLSDILRVNTEITKAPLSASMIKRYDEHHQDLTLLKALVRQQLPEKYKEIFFDQSKNGYAGYIDGGASQEEFYKFIKPILEKMDGTEELLVKLNREDLLRKQRTFDNGSIPHQIHLGELHAILRRQEDFYPFLKDNREKIEKILTFRIPYYVGPLARGNSRFAWMTRKSEETITPWNFEEVVDKGASAQSFIERMTNFDKNLPNEKVLPKHSLLYEYFTVYNELTKVKYVTEGMRKPAFLSGEQKKAIVDLLFKTNRKVTVKQLKEDYFKKIECFDSVEISGVEDRFNASLGTYHDLLKIIKDKDFLDNEENEDILEDIVLTLTLFEDREMIEERLKTYAHLFDDKVMKQLKRRRYTGWGRLSRKLINGIRDKQSGKTILDFLKSDGFANRNFMQLIHDDSLTFKEDIQKAQVSGQGDSLHEHIANLAGSPAIKKGILQTVKVVDELVKVMGRHKPENIVIEMARENQTTQKGQKNSRERMKRIEEGIKELGSQILKEHPVENTQLQNEKLYLYYLQNGRDMYVDQELDINRLSDYDVDHIVPQSFLKDDSIDNKVLTRSDKARGKSDNVPSEEVVKKMKNYWRQLLNAKLITQRKFDNLTKAERGGLSELDKAGFIKRQLVETRQITKHVAQILDSRMNTKYDENDKLIREVKVITLKSKLVSDFRKDFQFYKVREINNYHHAHDAYLNAVVGTALIKKYPKLESEFVYGDYKVYDVRKMIAKSEQEIGKATAKYFFYSNIMNFFKTEITLANGEIRKRPLIETNGETGEIVWDKGRDFATVRKVLSMPQVNIVKKTEVQTGGFSKESILPKRNSDKLIARKKDWDPKKYGGFDSPTVAYSVLVVAKVEKGKSKKLKSVKELLGITIMERSSFEKNPIDFLEAKGYKEVKKDLIIKLPKYSLFELENGRKRMLASAGELQKGNELALPSKYVNFLYLASHYEKLKGSPEDNEQKQLFVEQHKHYLDEIIEQISEFSKRVILADANLDKVLSAYNKHRDKPIREQAENIIHLFTLTNLGAPAAFKYFDTTIDRKRYTSTKEVLDATLIHQSITGLYETRIDLSQLGGDGGGGSGSSEAAAKGGTLNIEDEYRLHETSKEPDVSLGSTWLSDFPQAWAETGGMGLAVRQAPLIIPLKATSTPVSIKQYPMSQEARLGIKPHIQRLLDQGILVPCQSPWNTPLLPVKKPGTNDYRPVQDLREVNKRVEDIHPTVPNPYNLLSGLPPSHQWYTVLDLKDAFFCLRLHPTSQPLFAFEWRDPEMGISGQLTWTRLPQGFKNSPTLFNEALHRDLAGFRIQHPDLILLQYVDDLLLAATSELDCQQGTRALLQTLGDLGYRASAKKAQICQKQVKYLGYLLKEGQRWLTEARKETVMGQPIPKTPRQLREFLGTAGFCRLWIPGFAEMAAPLYPLTKPGTLFNWGPDQQKAFQEIKQALLTAPALGLPDLTKPFELFVDEKQGYAKGVLTQKLGPWRRPVAYLSKKLDPVAAGWPPCLRMVAAIAVLTKDAGKLTMGQPLVILAPHAVEALVKQPPDRWLSNARMTHYQALLLDTDRVQFGPVVALNPATLLPLPEEGLQHDCLDILAEAHGTRSDLMDQPLPDADHTWYTDGSSFLQEGQRKAGAAVTTETEVIWARALPAGTSAQRAELIALTQALKMAEGKKLNVYTDSRYAFATAHIHGEIYRRRGWLTSEGKEIKNKDEILALLKALFLPKRLSIIHCPGHQKGNSAEARGNRMADQAAREVATRETPETSTLLAGKRTADGSEFEKRTADGSEFESPKKKAKVE

SEQ ID NO: 2264 - protein, 2091 aa, synthetic construct
  source 1..2091: note = Description of Artificial Sequence: Synthetic polypeptide
MPAAKRVKLDGGDKKYSIGLDIGTNSVGWAVITDEYKVPSKKFKVLGNTDRHSIKKNLIGALLFDSGETAEATRLKRTARRRYTRRKNRICYLQEIFSNEMAKVDDSFFHRLEESFLVEEDKKHERHPIFGNIVDEVAYHEKYPTIYHLRKKLVDSTDKADLRLIYLALAHMIKFRGHFLIEGDLNPDNSDVDKLFIQLVQTYNQLFEENPINASGVDAKAILSARLSKSRRLENLIAQLPGEKKNGLFGNLIALSLGLTPNFKSNFDLAEDAKLQLSKDTYDDDLDNLLAQIGDQYADLFLAAKNLSDAILLSDILRVNTEITKAPLSASMIKRYDEHHQDLTLLKALVRQQLPEKYKEIFFDQSKNGYAGYIDGGASQEEFYKFIKPILEKMDGTEELLVKLNREDLLRKQRTFDNGSIPHQIHLGELHAILRRQEDFYPFLKDNREKIEKILTFRIPYYVGPLARGNSRFAWMTRKSEETITPWNFEEVVDKGASAQSFIERMTNFDKNLPNEKVLPKHSLLYEYFTVYNELTKVKYVTEGMRKPAFLSGEQKKAIVDLLFKTNRKVTVKQLKEDYFKKIECFDSVEISGVEDRFNASLGTYHDLLKIIKDKDFLDNEENEDILEDIVLTLTLFEDREMIEERLKTYAHLFDDKVMKQLKRRRYTGWGRLSRKLINGIRDKQSGKTILDFLKSDGFANRNFMQLIHDDSLTFKEDIQKAQVSGQGDSLHEHIANLAGSPAIKKGILQTVKVVDELVKVMGRHKPENIVIEMARENQTTQKGQKNSRERMKRIEEGIKELGSQILKEHPVENTQLQNEKLYLYYLQNGRDMYVDQELDINRLSDYDVDHIVPQSFLKDDSIDNKVLTRSDKARGKSDNVPSEEVVKKMKNYWRQLLNAKLITQRKFDNLTKAERGGLSELDKAGFIKRQLVETRQITKHVAQILDSRMNTKYDENDKLIREVKVITLKSKLVSDFRKDFQFYKVREINNYHHAHDAYLNAVVGTALIKKYPKLESEFVYGDYKVYDVRKMIAKSEQEIGKATAKYFFYSNIMNFFKTEITLANGEIRKRPLIETNGETGEIVWDKGRDFATVRKVLSMPQVNIVKKTEVQTGGFSKESILPKRNSDKLIARKKDWDPKKYGGFDSPTVAYSVLVVAKVEKGKSKKLKSVKELLGITIMERSSFEKNPIDFLEAKGYKEVKKDLIIKLPKYSLFELENGRKRMLASAGELQKGNELALPSKYVNFLYLASHYEKLKGSPEDNEQKQLFVEQHKHYLDEIIEQISEFSKRVILADANLDKVLSAYNKHRDKPIREQAENIIHLFTLTNLGAPAAFKYFDTTIDRKRYTSTKEVLDATLIHQSITGLYETRIDLSQLGGDGGGSSGGGGGTLNIEDEYRLHETSKEPDVSLGSTWLSDFPQAWAETGGMGLAVRQAPLIIPLKATSTPVSIKQYPMSQEARLGIKPHIQRLLDQGILVPCQSPWNTPLLPVKKPGTNDYRPVQDLREVNKRVEDIHPTVPNPYNLLSGLPPSHQWYTVLDLKDAFFCLRLHPTSQPLFAFEWRDPEMGISGQLTWTRLPQGFKNSPTLFNEALHRDLAGFRIQHPDLILLQYVDDLLLAATSELDCQQGTRALLQTLGDLGYRASAKKAQICQKQVKYLGYLLKEGQRWLTEARKETVMGQPIPKTPRQLREFLGTAGFCRLWIPGFAEMAAPLYPLTKPGTLFNWGPDQQKAFQEIKQALLTAPALGLPDLTKPFELFVDEKQGYAKGVLTQKLGPWRRPVAYLSKKLDPVAAGWPPCLRMVAAIAVLTKDAGKLTMGQPLVILAPHAVEALVKQPPDRWLSNARMTHYQALLLDTDRVQFGPVVALNPATLLPLPEEGLQHDCLDILAEAHGTRSDLMDQPLPDADHTWYTDGSSFLQEGQRKAGAAVTTETEVIWARALPAGTSAQRAELIALTQALKMAEGKKLNVYTDSRYAFATAHIHGEIYRRRGWLTSEGKEIKNKDEILALLKALFLPKRLSIIHCPGHQKGNSAEARGNRMADQAAREVATRETPETSTLLAGKRTADGSEFEKRTADGSEFESPKKKAKVE

SEQ ID NO: 2265 - protein, 2094 aa, synthetic construct
  source 1..2094: note = Description of Artificial Sequence: Synthetic polypeptide
MPAAKRVKLDGGDKKYSIGLDIGTNSVGWAVITDEYKVPSKKFKVLGNTDRHSIKKNLIGALLFDSGETAEATRLKRTARRRYTRRKNRICYLQEIFSNEMAKVDDSFFHRLEESFLVEEDKKHERHPIFGNIVDEVAYHEKYPTIYHLRKKLVDSTDKADLRLIYLALAHMIKFRGHFLIEGDLNPDNSDVDKLFIQLVQTYNQLFEENPINASGVDAKAILSARLSKSRRLENLIAQLPGEKKNGLFGNLIALSLGLTPNFKSNFDLAEDAKLQLSKDTYDDDLDNLLAQIGDQYADLFLAAKNLSDAILLSDILRVNTEITKAPLSASMIKRYDEHHQDLTLLKALVRQQLPEKYKEIFFDQSKNGYAGYIDGGASQEEFYKFIKPILEKMDGTEELLVKLNREDLLRKQRTFDNGSIPHQIHLGELHAILRRQEDFYPFLKDNREKIEKILTFRIPYYVGPLARGNSRFAWMTRKSEETITPWNFEEVVDKGASAQSFIERMTNFDKNLPNEKVLPKHSLLYEYFTVYNELTKVKYVTEGMRKPAFLSGEQKKAIVDLLFKTNRKVTVKQLKEDYFKKIECFDSVEISGVEDRFNASLGTYHDLLKIIKDKDFLDNEENEDILEDIVLTLTLFEDREMIEERLKTYAHLFDDKVMKQLKRRRYTGWGRLSRKLINGIRDKQSGKTILDFLKSDGFANRNFMQLIHDDSLTFKEDIQKAQVSGQGDSLHEHIANLAGSPAIKKGILQTVKVVDELVKVMGRHKPENIVIEMARENQTTQKGQKNSRERMKRIEEGIKELGSQILKEHPVENTQLQNEKLYLYYLQNGRDMYVDQELDINRLSDYDVDHIVPQSFLKDDSIDNKVLTRSDKARGKSDNVPSEEVVKKMKNYWRQLLNAKLITQRKFDNLTKAERGGLSELDKAGFIKRQLVETRQITKHVAQILDSRMNTKYDENDKLIREVKVITLKSKLVSDFRKDFQFYKVREINNYHHAHDAYLNAVVGTALIKKYPKLESEFVYGDYKVYDVRKMIAKSEQEIGKATAKYFFYSNIMNFFKTEITLANGEIRKRPLIETNGETGEIVWDKGRDFATVRKVLSMPQVNIVKKTEVQTGGFSKESILPKRNSDKLIARKKDWDPKKYGGFDSPTVAYSVLVVAKVEKGKSKKLKSVKELLGITIMERSSFEKNPIDFLEAKGYKEVKKDLIIKLPKYSLFELENGRKRMLASAGELQKGNELALPSKYVNFLYLASHYEKLKGSPEDNEQKQLFVEQHKHYLDEIIEQISEFSKRVILADANLDKVLSAYNKHRDKPIREQAENIIHLFTLTNLGAPAAFKYFDTTIDRKRYTSTKEVLDATLIHQSITGLYETRIDLSQLGGDGGGGSGSSPAPGGTLNIEDEYRLHETSKEPDVSLGSTWLSDFPQAWAETGGMGLAVRQAPLIIPLKATSTPVSIKQYPMSQEARLGIKPHIQRLLDQGILVPCQSPWNTPLLPVKKPGTNDYRPVQDLREVNKRVEDIHPTVPNPYNLLSGLPPSHQWYTVLDLKDAFFCLRLHPTSQPLFAFEWRDPEMGISGQLTWTRLPQGFKNSPTLFNEALHRDLAGFRIQHPDLILLQYVDDLLLAATSELDCQQGTRALLQTLGDLGYRASAKKAQICQKQVKYLGYLLKEGQRWLTEARKETVMGQPIPKTPRQLREFLGTAGFCRLWIPGFAEMAAPLYPLTKPGTLFNWGPDQQKAFQEIKQALLTAPALGLPDLTKPFELFVDEKQGYAKGVLTQKLGPWRRPVAYLSKKLDPVAAGWPPCLRMVAAIAVLTKDAGKLTMGQPLVILAPHAVEALVKQPPDRWLSNARMTHYQALLLDTDRVQFGPVVALNPATLLPLPEEGLQHDCLDILAEAHGTRSDLMDQPLPDADHTWYTDGSSFLQEGQRKAGAAVTTETEVIWARALPAGTSAQRAELIALTQALKMAEGKKLNVYTDSRYAFATAHIHGEIYRRRGWLTSEGKEIKNKDEILALLKALFLPKRLSIIHCPGHQKGNSAEARGNRMADQAAREVATRETPETSTLLAGKRTADGSEFEKRTADGSEFESPKKKAKVE

SEQ ID NO: 2266 - protein, 2096 aa, synthetic construct
  source 1..2096: note = Description of Artificial Sequence: Synthetic polypeptide
MPAAKRVKLDGGDKKYSIGLDIGTNSVGWAVITDEYKVPSKKFKVLGNTDRHSIKKNLIGALLFDSGETAEATRLKRTARRRYTRRKNRICYLQEIFSNEMAKVDDSFFHRLEESFLVEEDKKHERHPIFGNIVDEVAYHEKYPTIYHLRKKLVDSTDKADLRLIYLALAHMIKFRGHFLIEGDLNPDNSDVDKLFIQLVQTYNQLFEENPINASGVDAKAILSARLSKSRRLENLIAQLPGEKKNGLFGNLIALSLGLTPNFKSNFDLAEDAKLQLSKDTYDDDLDNLLAQIGDQYADLFLAAKNLSDAILLSDILRVNTEITKAPLSASMIKRYDEHHQDLTLLKALVRQQLPEKYKEIFFDQSKNGYAGYIDGGASQEEFYKFIKPILEKMDGTEELLVKLNREDLLRKQRTFDNGSIPHQIHLGELHAILRRQEDFYPFLKDNREKIEKILTFRIPYYVGPLARGNSRFAWMTRKSEETITPWNFEEVVDKGASAQSFIERMTNFDKNLPNEKVLPKHSLLYEYFTVYNELTKVKYVTEGMRKPAFLSGEQKKAIVDLLFKTNRKVTVKQLKEDYFKKIECFDSVEISGVEDRFNASLGTYHDLLKIIKDKDFLDNEENEDILEDIVLTLTLFEDREMIEERLKTYAHLFDDKVMKQLKRRRYTGWGRLSRKLINGIRDKQSGKTILDFLKSDGFANRNFMQLIHDDSLTFKEDIQKAQVSGQGDSLHEHIANLAGSPAIKKGILQTVKVVDELVKVMGRHKPENIVIEMARENQTTQKGQKNSRERMKRIEEGIKELGSQILKEHPVENTQLQNEKLYLYYLQNGRDMYVDQELDINRLSDYDVDHIVPQSFLKDDSIDNKVLTRSDKARGKSDNVPSEEVVKKMKNYWRQLLNAKLITQRKFDNLTKAERGGLSELDKAGFIKRQLVETRQITKHVAQILDSRMNTKYDENDKLIREVKVITLKSKLVSDFRKDFQFYKVREINNYHHAHDAYLNAVVGTALIKKYPKLESEFVYGDYKVYDVRKMIAKSEQEIGKATAKYFFYSNIMNFFKTEITLANGEIRKRPLIETNGETGEIVWDKGRDFATVRKVLSMPQVNIVKKTEVQTGGFSKESILPKRNSDKLIARKKDWDPKKYGGFDSPTVAYSVLVVAKVEKGKSKKLKSVKELLGITIMERSSFEKNPIDFLEAKGYKEVKKDLIIKLPKYSLFELENGRKRMLASAGELQKGNELALPSKYVNFLYLASHYEKLKGSPEDNEQKQLFVEQHKHYLDEIIEQISEFSKRVILADANLDKVLSAYNKHRDKPIREQAENIIHLFTLTNLGAPAAFKYFDTTIDRKRYTSTKEVLDATLIHQSITGLYETRIDLSQLGGDGGGGSGGGEAAAKGGTLNIEDEYRLHETSKEPDVSLGSTWLSDFPQAWAETGGMGLAVRQAPLIIPLKATSTPVSIKQYPMSQEARLGIKPHIQRLLDQGILVPCQSPWNTPLLPVKKPGTNDYRPVQDLREVNKRVEDIHPTVPNPYNLLSGLPPSHQWYTVLDLKDAFFCLRLHPTSQPLFAFEWRDPEMGISGQLTWTRLPQGFKNSPTLFNEALHRDLAGFRIQHPDLILLQYVDDLLLAATSELDCQQGTRALLQTLGDLGYRASAKKAQICQKQVKYLGYLLKEGQRWLTEARKETVMGQPIPKTPRQLREFLGTAGFCRLWIPGFAEMAAPLYPLTKPGTLFNWGPDQQKAFQEIKQALLTAPALGLPDLTKPFELFVDEKQGYAKGVLTQKLGPWRRPVAYLSKKLDPVAAGWPPCLRMVAAIAVLTKDAGKLTMGQPLVILAPHAVEALVKQPPDRWLSNARMTHYQALLLDTDRVQFGPVVALNPATLLPLPEEGLQHDCLDILAEAHGTRSDLMDQPLPDADHTWYTDGSSFLQEGQRKAGAAVTTETEVIWARALPAGTSAQRAELIALTQALKMAEGKKLNVYTDSRYAFATAHIHGEIYRRRGWLTSEGKEIKNKDEILALLKALFLPKRLSIIHCPGHQKGNSAEARGNRMADQAAREVATRETPETSTLLAGKRTADGSEFEKRTADGSEFESPKKKAKVE

SEQ ID NO: 2267 - protein, 2092 aa, synthetic construct
  source 1..2092: note = Description of Artificial Sequence: Synthetic polypeptide
MPAAKRVKLDGGDKKYSIGLDIGTNSVGWAVITDEYKVPSKKFKVLGNTDRHSIKKNLIGALLFDSGETAEATRLKRTARRRYTRRKNRICYLQEIFSNEMAKVDDSFFHRLEESFLVEEDKKHERHPIFGNIVDEVAYHEKYPTIYHLRKKLVDSTDKADLRLIYLALAHMIKFRGHFLIEGDLNPDNSDVDKLFIQLVQTYNQLFEENPINASGVDAKAILSARLSKSRRLENLIAQLPGEKKNGLFGNLIALSLGLTPNFKSNFDLAEDAKLQLSKDTYDDDLDNLLAQIGDQYADLFLAAKNLSDAILLSDILRVNTEITKAPLSASMIKRYDEHHQDLTLLKALVRQQLPEKYKEIFFDQSKNGYAGYIDGGASQEEFYKFIKPILEKMDGTEELLVKLNREDLLRKQRTFDNGSIPHQIHLGELHAILRRQEDFYPFLKDNREKIEKILTFRIPYYVGPLARGNSRFAWMTRKSEETITPWNFEEVVDKGASAQSFIERMTNFDKNLPNEKVLPKHSLLYEYFTVYNELTKVKYVTEGMRKPAFLSGEQKKAIVDLLFKTNRKVTVKQLKEDYFKKIECFDSVEISGVEDRFNASLGTYHDLLKIIKDKDFLDNEENEDILEDIVLTLTLFEDREMIEERLKTYAHLFDDKVMKQLKRRRYTGWGRLSRKLINGIRDKQSGKTILDFLKSDGFANRNFMQLIHDDSLTFKEDIQKAQVSGQGDSLHEHIANLAGSPAIKKGILQTVKVVDELVKVMGRHKPENIVIEMARENQTTQKGQKNSRERMKRIEEGIKELGSQILKEHPVENTQLQNEKLYLYYLQNGRDMYVDQELDINRLSDYDVDHIVPQSFLKDDSIDNKVLTRSDKARGKSDNVPSEEVVKKMKNYWRQLLNAKLITQRKFDNLTKAERGGLSELDKAGFIKRQLVETRQITKHVAQILDSRMNTKYDENDKLIREVKVITLKSKLVSDFRKDFQFYKVREINNYHHAHDAYLNAVVGTALIKKYPKLESEFVYGDYKVYDVRKMIAKSEQEIGKATAKYFFYSNIMNFFKTEITLANGEIRKRPLIETNGETGEIVWDKGRDFATVRKVLSMPQVNIVKKTEVQTGGFSKESILPKRNSDKLIARKKDWDPKKYGGFDSPTVAYSVLVVAKVEKGKSKKLKSVKELLGITIMERSSFEKNPIDFLEAKGYKEVKKDLIIKLPKYSLFELENGRKRMLASAGELQKGNELALPSKYVNFLYLASHYEKLKGSPEDNEQKQLFVEQHKHYLDEIIEQISEFSKRVILADANLDKVLSAYNKHRDKPIREQAENIIHLFTLTNLGAPAAFKYFDTTIDRKRYTSTKEVLDATLIHQSITGLYETRIDLSQLGGDGGGGGGGGGGGTLNIEDEYRLHETSKEPDVSLGSTWLSDFPQAWAETGGMGLAVRQAPLIIPLKATSTPVSIKQYPMSQEARLGIKPHIQRLLDQGILVPCQSPWNTPLLPVKKPGTNDYRPVQDLREVNKRVEDIHPTVPNPYNLLSGLPPSHQWYTVLDLKDAFFCLRLHPTSQPLFAFEWRDPEMGISGQLTWTRLPQGFKNSPTLFNEALHRDLAGFRIQHPDLILLQYVDDLLLAATSELDCQQGTRALLQTLGDLGYRASAKKAQICQKQVKYLGYLLKEGQRWLTEARKETVMGQPIPKTPRQLREFLGTAGFCRLWIPGFAEMAAPLYPLTKPGTLFNWGPDQQKAFQEIKQALLTAPALGLPDLTKPFELFVDEKQGYAKGVLTQKLGPWRRPVAYLSKKLDPVAAGWPPCLRMVAAIAVLTKDAGKLTMGQPLVILAPHAVEALVKQPPDRWLSNARMTHYQALLLDTDRVQFGPVVALNPATLLPLPEEGLQHDCLDILAEAHGTRSDLMDQPLPDADHTWYTDGSSFLQEGQRKAGAAVTTETEVIWARALPAGTSAQRAELIALTQALKMAEGKKLNVYTDSRYAFATAHIHGEIYRRRGWLTSEGKEIKNKDEILALLKALFLPKRLSIIHCPGHQKGNSAEARGNRMADQAAREVATRETPETSTLLAGKRTADGSEFEKRTADGSEFESPKKKAKVE

SEQ ID NO: 2268 - protein, 2089 aa, synthetic construct
  source 1..2089: note = Description of Artificial Sequence: Synthetic polypeptide
MPAAKRVKLDGGDKKYSIGLDIGTNSVGWAVITDEYKVPSKKFKVLGNTDRHSIKKNLIGALLFDSGETAEATRLKRTARRRYTRRKNRICYLQEIFSNEMAKVDDSFFHRLEESFLVEEDKKHERHPIFGNIVDEVAYHEKYPTIYHLRKKLVDSTDKADLRLIYLALAHMIKFRGHFLIEGDLNPDNSDVDKLFIQLVQTYNQLFEENPINASGVDAKAILSARLSKSRRLENLIAQLPGEKKNGLFGNLIALSLGLTPNFKSNFDLAEDAKLQLSKDTYDDDLDNLLAQIGDQYADLFLAAKNLSDAILLSDILRVNTEITKAPLSASMIKRYDEHHQDLTLLKALVRQQLPEKYKEIFFDQSKNGYAGYIDGGASQEEFYKFIKPILEKMDGTEELLVKLNREDLLRKQRTFDNGSIPHQIHLGELHAILRRQEDFYPFLKDNREKIEKILTFRIPYYVGPLARGNSRFAWMTRKSEETITPWNFEEVVDKGASAQSFIERMTNFDKNLPNEKVLPKHSLLYEYFTVYNELTKVKYVTEGMRKPAFLSGEQKKAIVDLLFKTNRKVTVKQLKEDYFKKIECFDSVEISGVEDRFNASLGTYHDLLKIIKDKDFLDNEENEDILEDIVLTLTLFEDREMIEERLKTYAHLFDDKVMKQLKRRRYTGWGRLSRKLINGIRDKQSGKTILDFLKSDGFANRNFMQLIHDDSLTFKEDIQKAQVSGQGDSLHEHIANLAGSPAIKKGILQTVKVVDELVKVMGRHKPENIVIEMARENQTTQKGQKNSRERMKRIEEGIKELGSQILKEHPVENTQLQNEKLYLYYLQNGRDMYVDQELDINRLSDYDVDHIVPQSFLKDDSIDNKVLTRSDKARGKSDNVPSEEVVKKMKNYWRQLLNAKLITQRKFDNLTKAERGGLSELDKAGFIKRQLVETRQITKHVAQILDSRMNTKYDENDKLIREVKVITLKSKLVSDFRKDFQFYKVREINNYHHAHDAYLNAVVGTALIKKYPKLESEFVYGDYKVYDVRKMIAKSEQEIGKATAKYFFYSNIMNFFKTEITLANGEIRKRPLIETNGETGEIVWDKGRDFATVRKVLSMPQVNIVKKTEVQTGGFSKESILPKRNSDKLIARKKDWDPKKYGGFDSPTVAYSVLVVAKVEKGKSKKLKSVKELLGITIMERSSFEKNPIDFLEAKGYKEVKKDLIIKLPKYSLFELENGRKRMLASAGELQKGNELALPSKYVNFLYLASHYEKLKGSPEDNEQKQLFVEQHKHYLDEIIEQISEFSKRVILADANLDKVLSAYNKHRDKPIREQAENIIHLFTLTNLGAPAAFKYFDTTIDRKRYTSTKEVLDATLIHQSITGLYETRIDLSQLGGDGGGGGGGGTLNIEDEYRLHETSKEPDVSLGSTWLSDFPQAWAETGGMGLAVRQAPLIIPLKATSTPVSIKQYPMSQEARLGIKPHIQRLLDQGILVPCQSPWNTPLLPVKKPGTNDYRPVQDLREVNKRVEDIHPTVPNPYNLLSGLPPSHQWYTVLDLKDAFFCLRLHPTSQPLFAFEWRDPEMGISGQLTWTRLPQGFKNSPTLFNEALHRDLAGFRIQHPDLILLQYVDDLLLAATSELDCQQGTRALLQTLGDLGYRASAKKAQICQKQVKYLGYLLKEGQRWLTEARKETVMGQPIPKTPRQLREFLGTAGFCRLWIPGFAEMAAPLYPLTKPGTLFNWGPDQQKAFQEIKQALLTAPALGLPDLTKPFELFVDEKQGYAKGVLTQKLGPWRRPVAYLSKKLDPVAAGWPPCLRMVAAIAVLTKDAGKLTMGQPLVILAPHAVEALVKQPPDRWLSNARMTHYQALLLDTDRVQFGPVVALNPATLLPLPEEGLQHDCLDILAEAHGTRSDLMDQPLPDADHTWYTDGSSFLQEGQRKAGAAVTTETEVIWARALPAGTSAQRAELIALTQALKMAEGKKLNVYTDSRYAFATAHIHGEIYRRRGWLTSEGKEIKNKDEILALLKALFLPKRLSIIHCPGHQKGNSAEARGNRMADQAAREVATRETPETSTLLAGKRTADGSEFEKRTADGSEFESPKKKAKVE

SEQ ID NO: 2269 - protein, 2096 aa, synthetic construct
  source 1..2096: note = Description of Artificial Sequence: Synthetic polypeptide
MPAAKRVKLDGGDKKYSIGLDIGTNSVGWAVITDEYKVPSKKFKVLGNTDRHSIKKNLIGALLFDSGETAEATRLKRTARRRYTRRKNRICYLQEIFSNEMAKVDDSFFHRLEESFLVEEDKKHERHPIFGNIVDEVAYHEKYPTIYHLRKKLVDSTDKADLRLIYLALAHMIKFRGHFLIEGDLNPDNSDVDKLFIQLVQTYNQLFEENPINASGVDAKAILSARLSKSRRLENLIAQLPGEKKNGLFGNLIALSLGLTPNFKSNFDLAEDAKLQLSKDTYDDDLDNLLAQIGDQYADLFLAAKNLSDAILLSDILRVNTEITKAPLSASMIKRYDEHHQDLTLLKALVRQQLPEKYKEIFFDQSKNGYAGYIDGGASQEEFYKFIKPILEKMDGTEELLVKLNREDLLRKQRTFDNGSIPHQIHLGELHAILRRQEDFYPFLKDNREKIEKILTFRIPYYVGPLARGNSRFAWMTRKSEETITPWNFEEVVDKGASAQSFIERMTNFDKNLPNEKVLPKHSLLYEYFTVYNELTKVKYVTEGMRKPAFLSGEQKKAIVDLLFKTNRKVTVKQLKEDYFKKIECFDSVEISGVEDRFNASLGTYHDLLKIIKDKDFLDNEENEDILEDIVLTLTLFEDREMIEERLKTYAHLFDDKVMKQLKRRRYTGWGRLSRKLINGIRDKQSGKTILDFLKSDGFANRNFMQLIHDDSLTFKEDIQKAQVSGQGDSLHEHIANLAGSPAIKKGILQTVKVVDELVKVMGRHKPENIVIEMARENQTTQKGQKNSRERMKRIEEGIKELGSQILKEHPVENTQLQNEKLYLYYLQNGRDMYVDQELDINRLSDYDVDHIVPQSFLKDDSIDNKVLTRSDKARGKSDNVPSEEVVKKMKNYWRQLLNAKLITQRKFDNLTKAERGGLSELDKAGFIKRQLVETRQITKHVAQILDSRMNTKYDENDKLIREVKVITLKSKLVSDFRKDFQFYKVREINNYHHAHDAYLNAVVGTALIKKYPKLESEFVYGDYKVYDVRKMIAKSEQEIGKATAKYFFYSNIMNFFKTEITLANGEIRKRPLIETNGETGEIVWDKGRDFATVRKVLSMPQVNIVKKTEVQTGGFSKESILPKRNSDKLIARKKDWDPKKYGGFDSPTVAYSVLVVAKVEKGKSKKLKSVKELLGITIMERSSFEKNPIDFLEAKGYKEVKKDLIIKLPKYSLFELENGRKRMLASAGELQKGNELALPSKYVNFLYLASHYEKLKGSPEDNEQKQLFVEQHKHYLDEIIEQISEFSKRVILADANLDKVLSAYNKHRDKPIREQAENIIHLFTLTNLGAPAAFKYFDTTIDRKRYTSTKEVLDATLIHQSITGLYETRIDLSQLGGDGGPAPEAAAKGGGGGTLNIEDEYRLHETSKEPDVSLGSTWLSDFPQAWAETGGMGLAVRQAPLIIPLKATSTPVSIKQYPMSQEARLGIKPHIQRLLDQGILVPCQSPWNTPLLPVKKPGTNDYRPVQDLREVNKRVEDIHPTVPNPYNLLSGLPPSHQWYTVLDLKDAFFCLRLHPTSQPLFAFEWRDPEMGISGQLTWTRLPQGFKNSPTLFNEALHRDLAGFRIQHPDLILLQYVDDLLLAATSELDCQQGTRALLQTLGDLGYRASAKKAQICQKQVKYLGYLLKEGQRWLTEARKETVMGQPIPKTPRQLREFLGTAGFCRLWIPGFAEMAAPLYPLTKPGTLFNWGPDQQKAFQEIKQALLTAPALGLPDLTKPFELFVDEKQGYAKGVLTQKLGPWRRPVAYLSKKLDPVAAGWPPCLRMVAAIAVLTKDAGKLTMGQPLVILAPHAVEALVKQPPDRWLSNARMTHYQALLLDTDRVQFGPVVALNPATLLPLPEEGLQHDCLDILAEAHGTRSDLMDQPLPDADHTWYTDGSSFLQEGQRKAGAAVTTETEVIWARALPAGTSAQRAELIALTQALKMAEGKKLNVYTDSRYAFATAHIHGEIYRRRGWLTSEGKEIKNKDEILALLKALFLPKRLSIIHCPGHQKGNSAEARGNRMADQAAREVATRETPETSTLLAGKRTADGSEFEKRTADGSEFESPKKKAKVE

SEQ ID NO: 2270 - protein, 2091 aa, synthetic construct
  source 1..2091: note = Description of Artificial Sequence: Synthetic polypeptide
MPAAKRVKLDGGDKKYSIGLDIGTNSVGWAVITDEYKVPSKKFKVLGNTDRHSIKKNLIGALLFDSGETAEATRLKRTARRRYTRRKNRICYLQEIFSNEMAKVDDSFFHRLEESFLVEEDKKHERHPIFGNIVDEVAYHEKYPTIYHLRKKLVDSTDKADLRLIYLALAHMIKFRGHFLIEGDLNPDNSDVDKLFIQLVQTYNQLFEENPINASGVDAKAILSARLSKSRRLENLIAQLPGEKKNGLFGNLIALSLGLTPNFKSNFDLAEDAKLQLSKDTYDDDLDNLLAQIGDQYADLFLAAKNLSDAILLSDILRVNTEITKAPLSASMIKRYDEHHQDLTLLKALVRQQLPEKYKEIFFDQSKNGYAGYIDGGASQEEFYKFIKPILEKMDGTEELLVKLNREDLLRKQRTFDNGSIPHQIHLGELHAILRRQEDFYPFLKDNREKIEKILTFRIPYYVGPLARGNSRFAWMTRKSEETITPWNFEEVVDKGASAQSFIERMTNFDKNLPNEKVLPKHSLLYEYFTVYNELTKVKYVTEGMRKPAFLSGEQKKAIVDLLFKTNRKVTVKQLKEDYFKKIECFDSVEISGVEDRFNASLGTYHDLLKIIKDKDFLDNEENEDILEDIVLTLTLFEDREMIEERLKTYAHLFDDKVMKQLKRRRYTGWGRLSRKLINGIRDKQSGKTILDFLKSDGFANRNFMQLIHDDSLTFKEDIQKAQVSGQGDSLHEHIANLAGSPAIKKGILQTVKVVDELVKVMGRHKPENIVIEMARENQTTQKGQKNSRERMKRIEEGIKELGSQILKEHPVENTQLQNEKLYLYYLQNGRDMYVDQELDINRLSDYDVDHIVPQSFLKDDSIDNKVLTRSDKARGKSDNVPSEEVVKKMKNYWRQLLNAKLITQRKFDNLTKAERGGLSELDKAGFIKRQLVETRQITKHVAQILDSRMNTKYDENDKLIREVKVITLKSKLVSDFRKDFQFYKVREINNYHHAHDAYLNAVVGTALIKKYPKLESEFVYGDYKVYDVRKMIAKSEQEIGKATAKYFFYSNIMNFFKTEITLANGEIRKRPLIETNGETGEIVWDKGRDFATVRKVLSMPQVNIVKKTEVQTGGFSKESILPKRNSDKLIARKKDWDPKKYGGFDSPTVAYSVLVVAKVEKGKSKKLKSVKELLGITIMERSSFEKNPIDFLEAKGYKEVKKDLIIKLPKYSLFELENGRKRMLASAGELQKGNELALPSKYVNFLYLASHYEKLKGSPEDNEQKQLFVEQHKHYLDEIIEQISEFSKRVILADANLDKVLSAYNKHRDKPIREQAENIIHLFTLTNLGAPAAFKYFDTTIDRKRYTSTKEVLDATLIHQSITGLYETRIDLSQLGGDGGGGSGSSGGTLNIEDEYRLHETSKEPDVSLGSTWLSDFPQAWAETGGMGLAVRQAPLIIPLKATSTPVSIKQYPMSQEARLGIKPHIQRLLDQGILVPCQSPWNTPLLPVKKPGTNDYRPVQDLREVNKRVEDIHPTVPNPYNLLSGLPPSHQWYTVLDLKDAFFCLRLHPTSQPLFAFEWRDPEMGISGQLTWTRLPQGFKNSPTLFNEALHRDLAGFRIQHPDLILLQYVDDLLLAATSELDCQQGTRALLQTLGDLGYRASAKKAQICQKQVKYLGYLLKEGQRWLTEARKETVMGQPIPKTPRQLREFLGTAGFCRLWIPGFAEMAAPLYPLTKPGTLFNWGPDQQKAFQEIKQALLTAPALGLPDLTKPFELFVDEKQGYAKGVLTQKLGPWRRPVAYLSKKLDPVAAGWPPCLRMVAAIAVLTKDAGKLTMGQPLVILAPHAVEALVKQPPDRWLSNARMTHYQALLLDTDRVQFGPVVALNPATLLPLPEEGLQHDCLDILAEAHGTRSDLMDQPLPDADHTWYTDGSSFLQEGQRKAGAAVTTETEVIWARALPAGTSAQRAELIALTQALKMAEGKKLNVYTDSRYAFATAHIHGEIYRRRGWLTSEGKEIKNKDEILALLKALFLPKRLSIIHCPGHQKGNSAEARGNRMADQAAREVATRETPETSTLLAGKRTADGSEFEKRTADGSEFESPKKKAKVE

SEQ ID NO: 2271 - protein, 2091 aa, synthetic construct
  source 1..2091: note = Description of Artificial Sequence: Synthetic polypeptide
MPAAKRVKLDGGDKKYSIGLDIGTNSVGWAVITDEYKVPSKKFKVLGNTDRHSIKKNLIGALLFDSGETAEATRLKRTARRRYTRRKNRICYLQEIFSNEMAKVDDSFFHRLEESFLVEEDKKHERHPIFGNIVDEVAYHEKYPTIYHLRKKLVDSTDKADLRLIYLALAHMIKFRGHFLIEGDLNPDNSDVDKLFIQLVQTYNQLFEENPINASGVDAKAILSARLSKSRRLENLIAQLPGEKKNGLFGNLIALSLGLTPNFKSNFDLAEDAKLQLSKDTYDDDLDNLLAQIGDQYADLFLAAKNLSDAILLSDILRVNTEITKAPLSASMIKRYDEHHQDLTLLKALVRQQLPEKYKEIFFDQSKNGYAGYIDGGASQEEFYKFIKPILEKMDGTEELLVKLNREDLLRKQRTFDNGSIPHQIHLGELHAILRRQEDFYPFLKDNREKIEKILTFRIPYYVGPLARGNSRFAWMTRKSEETITPWNFEEVVDKGASAQSFIERMTNFDKNLPNEKVLPKHSLLYEYFTVYNELTKVKYVTEGMRKPAFLSGEQKKAIVDLLFKTNRKVTVKQLKEDYFKKIECFDSVEISGVEDRFNASLGTYHDLLKIIKDKDFLDNEENEDILEDIVLTLTLFEDREMIEERLKTYAHLFDDKVMKQLKRRRYTGWGRLSRKLINGIRDKQSGKTILDFLKSDGFANRNFMQLIHDDSLTFKEDIQKAQVSGQGDSLHEHIANLAGSPAIKKGILQTVKVVDELVKVMGRHKPENIVIEMARENQTTQKGQKNSRERMKRIEEGIKELGSQILKEHPVENTQLQNEKLYLYYLQNGRDMYVDQELDINRLSDYDVDHIVPQSFLKDDSIDNKVLTRSDKARGKSDNVPSEEVVKKMKNYWRQLLNAKLITQRKFDNLTKAERGGLSELDKAGFIKRQLVETRQITKHVAQILDSRMNTKYDENDKLIREVKVITLKSKLVSDFRKDFQFYKVREINNYHHAHDAYLNAVVGTALIKKYPKLESEFVYGDYKVYDVRKMIAKSEQEIGKATAKYFFYSNIMNFFKTEITLANGEIRKRPLIETNGETGEIVWDKGRDFATVRKVLSMPQVNIVKKTEVQTGGFSKESILPKRNSDKLIARKKDWDPKKYGGFDSPTVAYSVLVVAKVEKGKSKKLKSVKELLGITIMERSSFEKNPIDFLEAKGYKEVKKDLIIKLPKYSLFELENGRKRMLASAGELQKGNELALPSKYVNFLYLASHYEKLKGSPEDNEQKQLFVEQHKHYLDEIIEQISEFSKRVILADANLDKVLSAYNKHRDKPIREQAENIIHLFTLTNLGAPAAFKYFDTTIDRKRYTSTKEVLDATLIHQSITGLYETRIDLSQLGGDGGPAPGSSGGTLNIEDEYRLHETSKEPDVSLGSTWLSDFPQAWAETGGMGLAVRQAPLIIPLKATSTPVSIKQYPMSQEARLGIKPHIQRLLDQGILVPCQSPWNTPLLPVKKPGTNDYRPVQDLREVNKRVEDIHPTVPNPYNLLSGLPPSHQWYTVLDLKDAFFCLRLHPTSQPLFAFEWRDPEMGISGQLTWTRLPQGFKNSPTLFNEALHRDLAGFRIQHPDLILLQYVDDLLLAATSELDCQQGTRALLQTLGDLGYRASAKKAQICQKQVKYLGYLLKEGQRWLTEARKETVMGQPIPKTPRQLREFLGTAGFCRLWIPGFAEMAAPLYPLTKPGTLFNWGPDQQKAFQEIKQALLTAPALGLPDLTKPFELFVDEKQGYAKGVLTQKLGPWRRPVAYLSKKLDPVAAGWPPCLRMVAAIAVLTKDAGKLTMGQPLVILAPHAVEALVKQPPDRWLSNARMTHYQALLLDTDRVQFGPVVALNPATLLPLPEEGLQHDCLDILAEAHGTRSDLMDQPLPDADHTWYTDGSSFLQEGQRKAGAAVTTETEVIWARALPAGTSAQRAELIALTQALKMAEGKKLNVYTDSRYAFATAHIHGEIYRRRGWLTSEGKEIKNKDEILALLKALFLPKRLSIIHCPGHQKGNSAEARGNRMADQAAREVATRETPETSTLLAGKRTADGSEFEKRTADGSEFESPKKKAKVE

SEQ ID NO: 2272 - protein, 2094 aa, synthetic construct
  source 1..2094: note = Description of Artificial Sequence: Synthetic polypeptide
MPAAKRVKLDGGDKKYSIGLDIGTNSVGWAVITDEYKVPSKKFKVLGNTDRHSIKKNLIGALLFDSGETAEATRLKRTARRRYTRRKNRICYLQEIFSNEMAKVDDSFFHRLEESFLVEEDKKHERHPIFGNIVDEVAYHEKYPTIYHLRKKLVDSTDKADLRLIYLALAHMIKFRGHFLIEGDLNPDNSDVDKLFIQLVQTYNQLFEENPINASGVDAKAILSARLSKSRRLENLIAQLPGEKKNGLFGNLIALSLGLTPNFKSNFDLAEDAKLQLSKDTYDDDLDNLLAQIGDQYADLFLAAKNLSDAILLSDILRVNTEITKAPLSASMIKRYDEHHQDLTLLKALVRQQLPEKYKEIFFDQSKNGYAGYIDGGASQEEFYKFIKPILEKMDGTEELLVKLNREDLLRKQRTFDNGSIPHQIHLGELHAILRRQEDFYPFLKDNREKIEKILTFRIPYYVGPLARGNSRFAWMTRKSEETITPWNFEEVVDKGASAQSFIERMTNFDKNLPNEKVLPKHSLLYEYFTVYNELTKVKYVTEGMRKPAFLSGEQKKAIVDLLFKTNRKVTVKQLKEDYFKKIECFDSVEISGVEDRFNASLGTYHDLLKIIKDKDFLDNEENEDILEDIVLTLTLFEDREMIEERLKTYAHLFDDKVMKQLKRRRYTGWGRLSRKLINGIRDKQSGKTILDFLKSDGFANRNFMQLIHDDSLTFKEDIQKAQVSGQGDSLHEHIANLAGSPAIKKGILQTVKVVDELVKVMGRHKPENIVIEMARENQTTQKGQKNSRERMKRIEEGIKELGSQILKEHPVENTQLQNEKLYLYYLQNGRDMYVDQELDINRLSDYDVDHIVPQSFLKDDSIDNKVLTRSDKARGKSDNVPSEEVVKKMKNYWRQLLNAKLITQRKFDNLTKAERGGLSELDKAGFIKRQLVETRQITKHVAQILDSRMNTKYDENDKLIREVKVITLKSKLVSDFRKDFQFYKVREINNYHHAHDAYLNAVVGTALIKKYPKLESEFVYGDYKVYDVRKMIAKSEQEIGKATAKYFFYSNIMNFFKTEITLANGEIRKRPLIETNGETGEIVWDKGRDFATVRKVLSMPQVNIVKKTEVQTGGFSKESILPKRNSDKLIARKKDWDPKKYGGFDSPTVAYSVLVVAKVEKGKSKKLKSVKELLGITIMERSSFEKNPIDFLEAKGYKEVKKDLIIKLPKYSLFELENGRKRMLASAGELQKGNELALPSKYVNFLYLASHYEKLKGSPEDNEQKQLFVEQHKHYLDEIIEQISEFSKRVILADANLDKVLSAYNKHRDKPIREQAENIIHLFTLTNLGAPAAFKYFDTTIDRKRYTSTKEVLDATLIHQSITGLYETRIDLSQLGGDGGGGSPAPGGGGGTLNIEDEYRLHETSKEPDVSLGSTWLSDFPQAWAETGGMGLAVRQAPLIIPLKATSTPVSIKQYPMSQEARLGIKPHIQRLLDQGILVPCQSPWNTPLLPVKKPGTNDYRPVQDLREVNKRVEDIHPTVPNPYNLLSGLPPSHQWYTVLDLKDAFFCLRLHPTSQPLFAFEWRDPEMGISGQLTWTRLPQGFKNSPTLFNEALHRDLAGFRIQHPDLILLQYVDDLLLAATSELDCQQGTRALLQTLGDLGYRASAKKAQICQKQVKYLGYLLKEGQRWLTEARKETVMGQPIPKTPRQLREFLGTAGFCRLWIPGFAEMAAPLYPLTKPGTLFNWGPDQQKAFQEIKQALLTAPALGLPDLTKPFELFVDEKQGYAKGVLTQKLGPWRRPVAYLSKKLDPVAAGWPPCLRMVAAIAVLTKDAGKLTMGQPLVILAPHAVEALVKQPPDRWLSNARMTHYQALLLDTDRVQFGPVVALNPATLLPLPEEGLQHDCLDILAEAHGTRSDLMDQPLPDADHTWYTDGSSFLQEGQRKAGAAVTTETEVIWARALPAGTSAQRAELIALTQALKMAEGKKLNVYTDSRYAFATAHIHGEIYRRRGWLTSEGKEIKNKDEILALLKALFLPKRLSIIHCPGHQKGNSAEARGNRMADQAAREVATRETPETSTLLAGKRTADGSEFEKRTADGSEFESPKKKAKVE

SEQ ID NO: 2273 - protein, 2096 aa, synthetic construct
  source 1..2096: note = Description of Artificial Sequence: Synthetic polypeptide
MPAAKRVKLDGGDKKYSIGLDIGTNSVGWAVITDEYKVPSKKFKVLGNTDRHSIKKNLIGALLFDSGETAEATRLKRTARRRYTRRKNRICYLQEIFSNEMAKVDDSFFHRLEESFLVEEDKKHERHPIFGNIVDEVAYHEKYPTIYHLRKKLVDSTDKADLRLIYLALAHMIKFRGHFLIEGDLNPDNSDVDKLFIQLVQTYNQLFEENPINASGVDAKAILSARLSKSRRLENLIAQLPGEKKNGLFGNLIALSLGLTPNFKSNFDLAEDAKLQLSKDTYDDDLDNLLAQIGDQYADLFLAAKNLSDAILLSDILRVNTEITKAPLSASMIKRYDEHHQDLTLLKALVRQQLPEKYKEIFFDQSKNGYAGYIDGGASQEEFYKFIKPILEKMDGTEELLVKLNREDLLRKQRTFDNGSIPHQIHLGELHAILRRQEDFYPFLKDNREKIEKILTFRIPYYVGPLARGNSRFAWMTRKSEETITPWNFEEVVDKGASAQSFIERMTNFDKNLPNEKVLPKHSLLYEYFTVYNELTKVKYVTEGMRKPAFLSGEQKKAIVDLLFKTNRKVTVKQLKEDYFKKIECFDSVEISGVEDRFNASLGTYHDLLKIIKDKDFLDNEENEDILEDIVLTLTLFEDREMIEERLKTYAHLFDDKVMKQLKRRRYTGWGRLSRKLINGIRDKQSGKTILDFLKSDGFANRNFMQLIHDDSLTFKEDIQKAQVSGQGDSLHEHIANLAGSPAIKKGILQTVKVVDELVKVMGRHKPENIVIEMARENQTTQKGQKNSRERMKRIEEGIKELGSQILKEHPVENTQLQNEKLYLYYLQNGRDMYVDQELDINRLSDYDVDHIVPQSFLKDDSIDNKVLTRSDKARGKSDNVPSEEVVKKMKNYWRQLLNAKLITQRKFDNLTKAERGGLSELDKAGFIKRQLVETRQITKHVAQILDSRMNTKYDENDKLIREVKVITLKSKLVSDFRKDFQFYKVREINNYHHAHDAYLNAVVGTALIKKYPKLESEFVYGDYKVYDVRKMIAKSEQEIGKATAKYFFYSNIMNFFKTEITLANGEIRKRPLIETNGETGEIVWDKGRDFATVRKVLSMPQVNIVKKTEVQTGGFSKESILPKRNSDKLIARKKDWDPKKYGGFDSPTVAYSVLVVAKVEKGKSKKLKSVKELLGITIMERSSFEKNPIDFLEAKGYKEVKKDLIIKLPKYSLFELENGRKRMLASAGELQKGNELALPSKYVNFLYLASHYEKLKGSPEDNEQKQLFVEQHKHYLDEIIEQISEFSKRVILADANLDKVLSAYNKHRDKPIREQAENIIHLFTLTNLGAPAAFKYFDTTIDRKRYTSTKEVLDATLIHQSITGLYETRIDLSQLGGDGGGSSGGSEAAAKGGTLNIEDEYRLHETSKEPDVSLGSTWLSDFPQAWAETGGMGLAVRQAPLIIPLKATSTPVSIKQYPMSQEARLGIKPHIQRLLDQGILVPCQSPWNTPLLPVKKPGTNDYRPVQDLREVNKRVEDIHPTVPNPYNLLSGLPPSHQWYTVLDLKDAFFCLRLHPTSQPLFAFEWRDPEMGISGQLTWTRLPQGFKNSPTLFNEALHRDLAGFRIQHPDLILLQYVDDLLLAATSELDCQQGTRALLQTLGDLGYRASAKKAQICQKQVKYLGYLLKEGQRWLTEARKETVMGQPIPKTPRQLREFLGTAGFCRLWIPGFAEMAAPLYPLTKPGTLFNWGPDQQKAFQEIKQALLTAPALGLPDLTKPFELFVDEKQGYAKGVLTQKLGPWRRPVAYLSKKLDPVAAGWPPCLRMVAAIAVLTKDAGKLTMGQPLVILAPHAVEALVKQPPDRWLSNARMTHYQALLLDTDRVQFGPVVALNPATLLPLPEEGLQHDCLDILAEAHGTRSDLMDQPLPDADHTWYTDGSSFLQEGQRKAGAAVTTETEVIWARALPAGTSAQRAELIALTQALKMAEGKKLNVYTDSRYAFATAHIHGEIYRRRGWLTSEGKEIKNKDEILALLKALFLPKRLSIIHCPGHQKGNSAEARGNRMADQAAREVATRETPETSTLLAGKRTADGSEFEKRTADGSEFESPKKKAKVE

SEQ ID NO: 2274 - protein, 2094 aa, synthetic construct
  source 1..2094: note = Description of Artificial Sequence: Synthetic polypeptide
MPAAKRVKLDGGDKKYSIGLDIGTNSVGWAVITDEYKVPSKKFKVLGNTDRHSIKKNLIGALLFDSGETAEATRLKRTARRRYTRRKNRICYLQEIFSNEMAKVDDSFFHRLEESFLVEEDKKHERHPIFGNIVDEVAYHEKYPTIYHLRKKLVDSTDKADLRLIYLALAHMIKFRGHFLIEGDLNPDNSDVDKLFIQLVQTYNQLFEENPINASGVDAKAILSARLSKSRRLENLIAQLPGEKKNGLFGNLIALSLGLTPNFKSNFDLAEDAKLQLSKDTYDDDLDNLLAQIGDQYADLFLAAKNLSDAILLSDILRVNTEITKAPLSASMIKRYDEHHQDLTLLKALVRQQLPEKYKEIFFDQSKNGYAGYIDGGASQEEFYKFIKPILEKMDGTEELLVKLNREDLLRKQRTFDNGSIPHQIHLGELHAILRRQEDFYPFLKDNREKIEKILTFRIPYYVGPLARGNSRFAWMTRKSEETITPWNFEEVVDKGASAQSFIERMTNFDKNLPNEKVLPKHSLLYEYFTVYNELTKVKYVTEGMRKPAFLSGEQKKAIVDLLFKTNRKVTVKQLKEDYFKKIECFDSVEISGVEDRFNASLGTYHDLLKIIKDKDFLDNEENEDILEDIVLTLTLFEDREMIEERLKTYAHLFDDKVMKQLKRRRYTGWGRLSRKLINGIRDKQSGKTILDFLKSDGFANRNFMQLIHDDSLTFKEDIQKAQVSGQGDSLHEHIANLAGSPAIKKGILQTVKVVDELVKVMGRHKPENIVIEMARENQTTQKGQKNSRERMKRIEEGIKELGSQILKEHPVENTQLQNEKLYLYYLQNGRDMYVDQELDINRLSDYDVDHIVPQSFLKDDSIDNKVLTRSDKARGKSDNVPSEEVVKKMKNYWRQLLNAKLITQRKFDNLTKAERGGLSELDKAGFIKRQLVETRQITKHVAQILDSRMNTKYDENDKLIREVKVITLKSKLVSDFRKDFQFYKVREINNYHHAHDAYLNAVVGTALIKKYPKLESEFVYGDYKVYDVRKMIAKSEQEIGKATAKYFFYSNIMNFFKTEITLANGEIRKRPLIETNGETGEIVWDKGRDFATVRKVLSMPQVNIVKKTEVQTGGFSKESILPKRNSDKLIARKKDWDPKKYGGFDSPTVAYSVLVVAKVEKGKSKKLKSVKELLGITIMERSSFEKNPIDFLEAKGYKEVKKDLIIKLPKYSLFELENGRKRMLASAGELQKGNELALPSKYVNFLYLASHYEKLKGSPEDNEQKQLFVEQHKHYLDEIIEQISEFSKRVILADANLDKVLSAYNKHRDKPIREQAENIIHLFTLTNLGAPAAFKYFDTTIDRKRYTSTKEVLDATLIHQSITGLYETRIDLSQLGGDGGGGSGGSGGSGGTLNIEDEYRLHETSKEPDVSLGSTWLSDFPQAWAETGGMGLAVRQAPLIIPLKATSTPVSIKQYPMSQEARLGIKPHIQRLLDQGILVPCQSPWNTPLLPVKKPGTNDYRPVQDLREVNKRVEDIHPTVPNPYNLLSGLPPSHQWYTVLDLKDAFFCLRLHPTSQPLFAFEWRDPEMGISGQLTWTRLPQGFKNSPTLFNEALHRDLAGFRIQHPDLILLQYVDDLLLAATSELDCQQGTRALLQTLGDLGYRASAKKAQICQKQVKYLGYLLKEGQRWLTEARKETVMGQPIPKTPRQLREFLGTAGFCRLWIPGFAEMAAPLYPLTKPGTLFNWGPDQQKAFQEIKQALLTAPALGLPDLTKPFELFVDEKQGYAKGVLTQKLGPWRRPVAYLSKKLDPVAAGWPPCLRMVAAIAVLTKDAGKLTMGQPLVILAPHAVEALVKQPPDRWLSNARMTHYQALLLDTDRVQFGPVVALNPATLLPLPEEGLQHDCLDILAEAHGTRSDLMDQPLPDADHTWYTDGSSFLQEGQRKAGAAVTTETEVIWARALPAGTSAQRAELIALTQALKMAEGKKLNVYTDSRYAFATAHIHGEIYRRRGWLTSEGKEIKNKDEILALLKALFLPKRLSIIHCPGHQKGNSAEARGNRMADQAAREVATRETPETSTLLAGKRTADGSEFEKRTADGSEFESPKKKAKVE

SEQ ID NO: 2275 - protein, 2096 aa, synthetic construct
  source 1..2096: note = Description of Artificial Sequence: Synthetic polypeptide
MPAAKRVKLDGGDKKYSIGLDIGTNSVGWAVITDEYKVPSKKFKVLGNTDRHSIKKNLIGALLFDSGETAEATRLKRTARRRYTRRKNRICYLQEIFSNEMAKVDDSFFHRLEESFLVEEDKKHERHPIFGNIVDEVAYHEKYPTIYHLRKKLVDSTDKADLRLIYLALAHMIKFRGHFLIEGDLNPDNSDVDKLFIQLVQTYNQLFEENPINASGVDAKAILSARLSKSRRLENLIAQLPGEKKNGLFGNLIALSLGLTPNFKSNFDLAEDAKLQLSKDTYDDDLDNLLAQIGDQYADLFLAAKNLSDAILLSDILRVNTEITKAPLSASMIKRYDEHHQDLTLLKALVRQQLPEKYKEIFFDQSKNGYAGYIDGGASQEEFYKFIKPILEKMDGTEELLVKLNREDLLRKQRTFDNGSIPHQIHLGELHAILRRQEDFYPFLKDNREKIEKILTFRIPYYVGPLARGNSRFAWMTRKSEETITPWNFEEVVDKGASAQSFIERMTNFDKNLPNEKVLPKHSLLYEYFTVYNELTKVKYVTEGMRKPAFLSGEQKKAIVDLLFKTNRKVTVKQLKEDYFKKIECFDSVEISGVEDRFNASLGTYHDLLKIIKDKDFLDNEENEDILEDIVLTLTLFEDREMIEERLKTYAHLFDDKVMKQLKRRRYTGWGRLSRKLINGIRDKQSGKTILDFLKSDGFANRNFMQLIHDDSLTFKEDIQKAQVSGQGDSLHEHIANLAGSPAIKKGILQTVKVVDELVKVMGRHKPENIVIEMARENQTTQKGQKNSRERMKRIEEGIKELGSQILKEHPVENTQLQNEKLYLYYLQNGRDMYVDQELDINRLSDYDVDHIVPQSFLKDDSIDNKVLTRSDKARGKSDNVPSEEVVKKMKNYWRQLLNAKLITQRKFDNLTKAERGGLSELDKAGFIKRQLVETRQITKHVAQILDSRMNTKYDENDKLIREVKVITLKSKLVSDFRKDFQFYKVREINNYHHAHDAYLNAVVGTALIKKYPKLESEFVYGDYKVYDVRKMIAKSEQEIGKATAKYFFYSNIMNFFKTEITLANGEIRKRPLIETNGETGEIVWDKGRDFATVRKVLSMPQVNIVKKTEVQTGGFSKESILPKRNSDKLIARKKDWDPKKYGGFDSPTVAYSVLVVAKVEKGKSKKLKSVKELLGITIMERSSFEKNPIDFLEAKGYKEVKKDLIIKLPKYSLFELENGRKRMLASAGELQKGNELALPSKYVNFLYLASHYEKLKGSPEDNEQKQLFVEQHKHYLDEIIEQISEFSKRVILADANLDKVLSAYNKHRDKPIREQAENIIHLFTLTNLGAPAAFKYFDTTIDRKRYTSTKEVLDATLIHQSITGLYETRIDLSQLGGDGGGGGEAAAKGGSGGTLNIEDEYRLHETSKEPDVSLGSTWLSDFPQAWAETGGMGLAVRQAPLIIPLKATSTPVSIKQYPMSQEARLGIKPHIQRLLDQGILVPCQSPWNTPLLPVKKPGTNDYRPVQDLREVNKRVEDIHPTVPNPYNLLSGLPPSHQWYTVLDLKDAFFCLRLHPTSQPLFAFEWRDPEMGISGQLTWTRLPQGFKNSPTLFNEALHRDLAGFRIQHPDLILLQYVDDLLLAATSELDCQQGTRALLQTLGDLGYRASAKKAQICQKQVKYLGYLLKEGQRWLTEARKETVMGQPIPKTPRQLREFLGTAGFCRLWIPGFAEMAAPLYPLTKPGTLFNWGPDQQKAFQEIKQALLTAPALGLPDLTKPFELFVDEKQGYAKGVLTQKLGPWRRPVAYLSKKLDPVAAGWPPCLRMVAAIAVLTKDAGKLTMGQPLVILAPHAVEALVKQPPDRWLSNARMTHYQALLLDTDRVQFGPVVALNPATLLPLPEEGLQHDCLDILAEAHGTRSDLMDQPLPDADHTWYTDGSSFLQEGQRKAGAAVTTETEVIWARALPAGTSAQRAELIALTQALKMAEGKKLNVYTDSRYAFATAHIHGEIYRRRGWLTSEGKEIKNKDEILALLKALFLPKRLSIIHCPGHQKGNSAEARGNRMADQAAREVATRETPETSTLLAGKRTADGSEFEKRTADGSEFESPKKKAKVE

SEQ ID NO: 2276 - protein, 2095 aa, synthetic construct
  source 1..2095: note = Description of Artificial Sequence: Synthetic polypeptide
MPAAKRVKLDGGDKKYSIGLDIGTNSVGWAVITDEYKVPSKKFKVLGNTDRHSIKKNLIGALLFDSGETAEATRLKRTARRRYTRRKNRICYLQEIFSNEMAKVDDSFFHRLEESFLVEEDKKHERHPIFGNIVDEVAYHEKYPTIYHLRKKLVDSTDKADLRLIYLALAHMIKFRGHFLIEGDLNPDNSDVDKLFIQLVQTYNQLFEENPINASGVDAKAILSARLSKSRRLENLIAQLPGEKKNGLFGNLIALSLGLTPNFKSNFDLAEDAKLQLSKDTYDDDLDNLLAQIGDQYADLFLAAKNLSDAILLSDILRVNTEITKAPLSASMIKRYDEHHQDLTLLKALVRQQLPEKYKEIFFDQSKNGYAGYIDGGASQEEFYKFIKPILEKMDGTEELLVKLNREDLLRKQRTFDNGSIPHQIHLGELHAILRRQEDFYPFLKDNREKIEKILTFRIPYYVGPLARGNSRFAWMTRKSEETITPWNFEEVVDKGASAQSFIERMTNFDKNLPNEKVLPKHSLLYEYFTVYNELTKVKYVTEGMRKPAFLSGEQKKAIVDLLFKTNRKVTVKQLKEDYFKKIECFDSVEISGVEDRFNASLGTYHDLLKIIKDKDFLDNEENEDILEDIVLTLTLFEDREMIEERLKTYAHLFDDKVMKQLKRRRYTGWGRLSRKLINGIRDKQSGKTILDFLKSDGFANRNFMQLIHDDSLTFKEDIQKAQVSGQGDSLHEHIANLAGSPAIKKGILQTVKVVDELVKVMGRHKPENIVIEMARENQTTQKGQKNSRERMKRIEEGIKELGSQILKEHPVENTQLQNEKLYLYYLQNGRDMYVDQELDINRLSDYDVDHIVPQSFLKDDSIDNKVLTRSDKARGKSDNVPSEEVVKKMKNYWRQLLNAKLITQRKFDNLTKAERGGLSELDKAGFIKRQLVETRQITKHVAQILDSRMNTKYDENDKLIREVKVITLKSKLVSDFRKDFQFYKVREINNYHHAHDAYLNAVVGTALIKKYPKLESEFVYGDYKVYDVRKMIAKSEQEIGKATAKYFFYSNIMNFFKTEITLANGEIRKRPLIETNGETGEIVWDKGRDFATVRKVLSMPQVNIVKKTEVQTGGFSKESILPKRNSDKLIARKKDWDPKKYGGFDSPTVAYSVLVVAKVEKGKSKKLKSVKELLGITIMERSSFEKNPIDFLEAKGYKEVKKDLIIKLPKYSLFELENGRKRMLASAGELQKGNELALPSKYVNFLYLASHYEKLKGSPEDNEQKQLFVEQHKHYLDEIIEQISEFSKRVILADANLDKVLSAYNKHRDKPIREQAENIIHLFTLTNLGAPAAFKYFDTTIDRKRYTSTKEVLDATLIHQSITGLYETRIDLSQLGGDGGGGGGSGGGGSGGTLNIEDEYRLHETSKEPDVSLGSTWLSDFPQAWAETGGMGLAVRQAPLIIPLKATSTPVSIKQYPMSQEARLGIKPHIQRLLDQGILVPCQSPWNTPLLPVKKPGTNDYRPVQDLREVNKRVEDIHPTVPNPYNLLSGLPPSHQWYTVLDLKDAFFCLRLHPTSQPLFAFEWRDPEMGISGQLTWTRLPQGFKNSPTLFNEALHRDLAGFRIQHPDLILLQYVDDLLLAATSELDCQQGTRALLQTLGDLGYRASAKKAQICQKQVKYLGYLLKEGQRWLTEARKETVMGQPIPKTPRQLREFLGTAGFCRLWIPGFAEMAAPLYPLTKPGTLFNWGPDQQKAFQEIKQALLTAPALGLPDLTKPFELFVDEKQGYAKGVLTQKLGPWRRPVAYLSKKLDPVAAGWPPCLRMVAAIAVLTKDAGKLTMGQPLVILAPHAVEALVKQPPDRWLSNARMTHYQALLLDTDRVQFGPVVALNPATLLPLPEEGLQHDCLDILAEAHGTRSDLMDQPLPDADHTWYTDGSSFLQEGQRKAGAAVTTETEVIWARALPAGTSAQRAELIALTQALKMAEGKKLNVYTDSRYAFATAHIHGEIYRRRGWLTSEGKEIKNKDEILALLKALFLPKRLSIIHCPGHQKGNSAEARGNRMADQAAREVATRETPETSTLLAGKRTADGSEFEKRTADGSEFESPKKKAKVE

SEQ ID NO: 2277 - protein, 2096 aa, synthetic construct
  source 1..2096: note = Description of Artificial Sequence: Synthetic polypeptide
MPAAKRVKLDGGDKKYSIGLDIGTNSVGWAVITDEYKVPSKKFKVLGNTDRHSIKKNLIGALLFDSGETAEATRLKRTARRRYTRRKNRICYLQEIFSNEMAKVDDSFFHRLEESFLVEEDKKHERHPIFGNIVDEVAYHEKYPTIYHLRKKLVDSTDKADLRLIYLALAHMIKFRGHFLIEGDLNPDNSDVDKLFIQLVQTYNQLFEENPINASGVDAKAILSARLSKSRRLENLIAQLPGEKKNGLFGNLIALSLGLTPNFKSNFDLAEDAKLQLSKDTYDDDLDNLLAQIGDQYADLFLAAKNLSDAILLSDILRVNTEITKAPLSASMIKRYDEHHQDLTLLKALVRQQLPEKYKEIFFDQSKNGYAGYIDGGASQEEFYKFIKPILEKMDGTEELLVKLNREDLLRKQRTFDNGSIPHQIHLGELHAILRRQEDFYPFLKDNREKIEKILTFRIPYYVGPLARGNSRFAWMTRKSEETITPWNFEEVVDKGASAQSFIERMTNFDKNLPNEKVLPKHSLLYEYFTVYNELTKVKYVTEGMRKPAFLSGEQKKAIVDLLFKTNRKVTVKQLKEDYFKKIECFDSVEISGVEDRFNASLGTYHDLLKIIKDKDFLDNEENEDILEDIVLTLTLFEDREMIEERLKTYAHLFDDKVMKQLKRRRYTGWGRLSRKLINGIRDKQSGKTILDFLKSDGFANRNFMQLIHDDSLTFKEDIQKAQVSGQGDSLHEHIANLAGSPAIKKGILQTVKVVDELVKVMGRHKPENIVIEMARENQTTQKGQKNSRERMKRIEEGIKELGSQILKEHPVENTQLQNEKLYLYYLQNGRDMYVDQELDINRLSDYDVDHIVPQSFLKDDSIDNKVLTRSDKARGKSDNVPSEEVVKKMKNYWRQLLNAKLITQRKFDNLTKAERGGLSELDKAGFIKRQLVETRQITKHVAQILDSRMNTKYDENDKLIREVKVITLKSKLVSDFRKDFQFYKVREINNYHHAHDAYLNAVVGTALIKKYPKLESEFVYGDYKVYDVRKMIAKSEQEIGKATAKYFFYSNIMNFFKTEITLANGEIRKRPLIETNGETGEIVWDKGRDFATVRKVLSMPQVNIVKKTEVQTGGFSKESILPKRNSDKLIARKKDWDPKKYGGFDSPTVAYSVLVVAKVEKGKSKKLKSVKELLGITIMERSSFEKNPIDFLEAKGYKEVKKDLIIKLPKYSLFELENGRKRMLASAGELQKGNELALPSKYVNFLYLASHYEKLKGSPEDNEQKQLFVEQHKHYLDEIIEQISEFSKRVILADANLDKVLSAYNKHRDKPIREQAENIIHLFTLTNLGAPAAFKYFDTTIDRKRYTSTKEVLDATLIHQSITGLYETRIDLSQLGGDGGEAAAKPAPGGSGGTLNIEDEYRLHETSKEPDVSLGSTWLSDFPQAWAETGGMGLAVRQAPLIIPLKATSTPVSIKQYPMSQEARLGIKPHIQRLLDQGILVPCQSPWNTPLLPVKKPGTNDYRPVQDLREVNKRVEDIHPTVPNPYNLLSGLPPSHQWYTVLDLKDAFFCLRLHPTSQPLFAFEWRDPEMGISGQLTWTRLPQGFKNSPTLFNEALHRDLAGFRIQHPDLILLQYVDDLLLAATSELDCQQGTRALLQTLGDLGYRASAKKAQICQKQVKYLGYLLKEGQRWLTEARKETVMGQPIPKTPRQLREFLGTAGFCRLWIPGFAEMAAPLYPLTKPGTLFNWGPDQQKAFQEIKQALLTAPALGLPDLTKPFELFVDEKQGYAKGVLTQKLGPWRRPVAYLSKKLDPVAAGWPPCLRMVAAIAVLTKDAGKLTMGQPLVILAPHAVEALVKQPPDRWLSNARMTHYQALLLDTDRVQFGPVVALNPATLLPLPEEGLQHDCLDILAEAHGTRSDLMDQPLPDADHTWYTDGSSFLQEGQRKAGAAVTTETEVIWARALPAGTSAQRAELIALTQALKMAEGKKLNVYTDSRYAFATAHIHGEIYRRRGWLTSEGKEIKNKDEILALLKALFLPKRLSIIHCPGHQKGNSAEARGNRMADQAAREVATRETPETSTLLAGKRTADGSEFEKRTADGSEFESPKKKAKVE

SEQ ID NO: 2278 - protein, 2096 aa, synthetic construct
  source 1..2096: note = Description of Artificial Sequence: Synthetic polypeptide
MPAAKRVKLDGGDKKYSIGLDIGTNSVGWAVITDEYKVPSKKFKVLGNTDRHSIKKNLIGALLFDSGETAEATRLKRTARRRYTRRKNRICYLQEIFSNEMAKVDDSFFHRLEESFLVEEDKKHERHPIFGNIVDEVAYHEKYPTIYHLRKKLVDSTDKADLRLIYLALAHMIKFRGHFLIEGDLNPDNSDVDKLFIQLVQTYNQLFEENPINASGVDAKAILSARLSKSRRLENLIAQLPGEKKNGLFGNLIALSLGLTPNFKSNFDLAEDAKLQLSKDTYDDDLDNLLAQIGDQYADLFLAAKNLSDAILLSDILRVNTEITKAPLSASMIKRYDEHHQDLTLLKALVRQQLPEKYKEIFFDQSKNGYAGYIDGGASQEEFYKFIKPILEKMDGTEELLVKLNREDLLRKQRTFDNGSIPHQIHLGELHAILRRQEDFYPFLKDNREKIEKILTFRIPYYVGPLARGNSRFAWMTRKSEETITPWNFEEVVDKGASAQSFIERMTNFDKNLPNEKVLPKHSLLYEYFTVYNELTKVKYVTEGMRKPAFLSGEQKKAIVDLLFKTNRKVTVKQLKEDYFKKIECFDSVEISGVEDRFNASLGTYHDLLKIIKDKDFLDNEENEDILEDIVLTLTLFEDREMIEERLKTYAHLFDDKVMKQLKRRRYTGWGRLSRKLINGIRDKQSGKTILDFLKSDGFANRNFMQLIHDDSLTFKEDIQKAQVSGQGDSLHEHIANLAGSPAIKKGILQTVKVVDELVKVMGRHKPENIVIEMARENQTTQKGQKNSRERMKRIEEGIKELGSQILKEHPVENTQLQNEKLYLYYLQNGRDMYVDQELDINRLSDYDVDHIVPQSFLKDDSIDNKVLTRSDKARGKSDNVPSEEVVKKMKNYWRQLLNAKLITQRKFDNLTKAERGGLSELDKAGFIKRQLVETRQITKHVAQILDSRMNTKYDENDKLIREVKVITLKSKLVSDFRKDFQFYKVREINNYHHAHDAYLNAVVGTALIKKYPKLESEFVYGDYKVYDVRKMIAKSEQEIGKATAKYFFYSNIMNFFKTEITLANGEIRKRPLIETNGETGEIVWDKGRDFATVRKVLSMPQVNIVKKTEVQTGGFSKESILPKRNSDKLIARKKDWDPKKYGGFDSPTVAYSVLVVAKVEKGKSKKLKSVKELLGITIMERSSFEKNPIDFLEAKGYKEVKKDLIIKLPKYSLFELENGRKRMLASAGELQKGNELALPSKYVNFLYLASHYEKLKGSPEDNEQKQLFVEQHKHYLDEIIEQISEFSKRVILADANLDKVLSAYNKHRDKPIREQAENIIHLFTLTNLGAPAAFKYFDTTIDRKRYTSTKEVLDATLIHQSITGLYETRIDLSQLGGDGGEAAAKGGGPAPGGTLNIEDEYRLHETSKEPDVSLGSTWLSDFPQAWAETGGMGLAVRQAPLIIPLKATSTPVSIKQYPMSQEARLGIKPHIQRLLDQGILVPCQSPWNTPLLPVKKPGTNDYRPVQDLREVNKRVEDIHPTVPNPYNLLSGLPPSHQWYTVLDLKDAFFCLRLHPTSQPLFAFEWRDPEMGISGQLTWTRLPQGFKNSPTLFNEALHRDLAGFRIQHPDLILLQYVDDLLLAATSELDCQQGTRALLQTLGDLGYRASAKKAQICQKQVKYLGYLLKEGQRWLTEARKETVMGQPIPKTPRQLREFLGTAGFCRLWIPGFAEMAAPLYPLTKPGTLFNWGPDQQKAFQEIKQALLTAPALGLPDLTKPFELFVDEKQGYAKGVLTQKLGPWRRPVAYLSKKLDPVAAGWPPCLRMVAAIAVLTKDAGKLTMGQPLVILAPHAVEALVKQPPDRWLSNARMTHYQALLLDTDRVQFGPVVALNPATLLPLPEEGLQHDCLDILAEAHGTRSDLMDQPLPDADHTWYTDGSSFLQEGQRKAGAAVTTETEVIWARALPAGTSAQRAELIALTQALKMAEGKKLNVYTDSRYAFATAHIHGEIYRRRGWLTSEGKEIKNKDEILALLKALFLPKRLSIIHCPGHQKGNSAEARGNRMADQAAREVATRETPETSTLLAGKRTADGSEFEKRTADGSEFESPKKKAKVE

SEQ ID NO: 2279 - protein, 2096 aa, synthetic construct
  source 1..2096: note = Description of Artificial Sequence: Synthetic polypeptide
MPAAKRVKLDGGDKKYSIGLDIGTNSVGWAVITDEYKVPSKKFKVLGNTDRHSIKKNLIGALLFDSGETAEATRLKRTARRRYTRRKNRICYLQEIFSNEMAKVDDSFFHRLEESFLVEEDKKHERHPIFGNIVDEVAYHEKYPTIYHLRKKLVDSTDKADLRLIYLALAHMIKFRGHFLIEGDLNPDNSDVDKLFIQLVQTYNQLFEENPINASGVDAKAILSARLSKSRRLENLIAQLPGEKKNGLFGNLIALSLGLTPNFKSNFDLAEDAKLQLSKDTYDDDLDNLLAQIGDQYADLFLAAKNLSDAILLSDILRVNTEITKAPLSASMIKRYDEHHQDLTLLKALVRQQLPEKYKEIFFDQSKNGYAGYIDGGASQEEFYKFIKPILEKMDGTEELLVKLNREDLLRKQRTFDNGSIPHQIHLGELHAILRRQEDFYPFLKDNREKIEKILTFRIPYYVGPLARGNSRFAWMTRKSEETITPWNFEEVVDKGASAQSFIERMTNFDKNLPNEKVLPKHSLLYEYFTVYNELTKVKYVTEGMRKPAFLSGEQKKAIVDLLFKTNRKVTVKQLKEDYFKKIECFDSVEISGVEDRFNASLGTYHDLLKIIKDKDFLDNEENEDILEDIVLTLTLFEDREMIEERLKTYAHLFDDKVMKQLKRRRYTGWGRLSRKLINGIRDKQSGKTILDFLKSDGFANRNFMQLIHDDSLTFKEDIQKAQVSGQGDSLHEHIANLAGSPAIKKGILQTVKVVDELVKVMGRHKPENIVIEMARENQTTQKGQKNSRERMKRIEEGIKELGSQILKEHPVENTQLQNEKLYLYYLQNGRDMYVDQELDINRLSDYDVDHIVPQSFLKDDSIDNKVLTRSDKARGKSDNVPSEEVVKKMKNYWRQLLNAKLITQRKFDNLTKAERGGLSELDKAGFIKRQLVETRQITKHVAQILDSRMNTKYDENDKLIREVKVITLKSKLVSDFRKDFQFYKVREINNYHHAHDAYLNAVVGTALIKKYPKLESEFVYGDYKVYDVRKMIAKSEQEIGKATAKYFFYSNIMNFFKTEITLANGEIRKRPLIETNGETGEIVWDKGRDFATVRKVLSMPQVNIVKKTEVQTGGFSKESILPKRNSDKLIARKKDWDPKKYGGFDSPTVAYSVLVVAKVEKGKSKKLKSVKELLGITIMERSSFEKNPIDFLEAKGYKEVKKDLIIKLPKYSLFELENGRKRMLASAGELQKGNELALPSKYVNFLYLASHYEKLKGSPEDNEQKQLFVEQHKHYLDEIIEQISEFSKRVILADANLDKVLSAYNKHRDKPIREQAENIIHLFTLTNLGAPAAFKYFDTTIDRKRYTSTKEVLDATLIHQSITGLYETRIDLSQLGGDGGGGGEAAAKPAPGGTLNIEDEYRLHETSKEPDVSLGSTWLSDFPQAWAETGGMGLAVRQAPLIIPLKATSTPVSIKQYPMSQEARLGIKPHIQRLLDQGILVPCQSPWNTPLLPVKKPGTNDYRPVQDLREVNKRVEDIHPTVPNPYNLLSGLPPSHQWYTVLDLKDAFFCLRLHPTSQPLFAFEWRDPEMGISGQLTWTRLPQGFKNSPTLFNEALHRDLAGFRIQHPDLILLQYVDDLLLAATSELDCQQGTRALLQTLGDLGYRASAKKAQICQKQVKYLGYLLKEGQRWLTEARKETVMGQPIPKTPRQLREFLGTAGFCRLWIPGFAEMAAPLYPLTKPGTLFNWGPDQQKAFQEIKQALLTAPALGLPDLTKPFELFVDEKQGYAKGVLTQKLGPWRRPVAYLSKKLDPVAAGWPPCLRMVAAIAVLTKDAGKLTMGQPLVILAPHAVEALVKQPPDRWLSNARMTHYQALLLDTDRVQFGPVVALNPATLLPLPEEGLQHDCLDILAEAHGTRSDLMDQPLPDADHTWYTDGSSFLQEGQRKAGAAVTTETEVIWARALPAGTSAQRAELIALTQALKMAEGKKLNVYTDSRYAFATAHIHGEIYRRRGWLTSEGKEIKNKDEILALLKALFLPKRLSIIHCPGHQKGNSAEARGNRMADQAAREVATRETPETSTLLAGKRTADGSEFEKRTADGSEFESPKKKAKVE

SEQ ID NO: 2280 - protein, 2100 aa, synthetic construct
  source 1..2100: note = Description of Artificial Sequence: Synthetic polypeptide
MPAAKRVKLDGGDKKYSIGLDIGTNSVGWAVITDEYKVPSKKFKVLGNTDRHSIKKNLIGALLFDSGETAEATRLKRTARRRYTRRKNRICYLQEIFSNEMAKVDDSFFHRLEESFLVEEDKKHERHPIFGNIVDEVAYHEKYPTIYHLRKKLVDSTDKADLRLIYLALAHMIKFRGHFLIEGDLNPDNSDVDKLFIQLVQTYNQLFEENPINASGVDAKAILSARLSKSRRLENLIAQLPGEKKNGLFGNLIALSLGLTPNFKSNFDLAEDAKLQLSKDTYDDDLDNLLAQIGDQYADLFLAAKNLSDAILLSDILRVNTEITKAPLSASMIKRYDEHHQDLTLLKALVRQQLPEKYKEIFFDQSKNGYAGYIDGGASQEEFYKFIKPILEKMDGTEELLVKLNREDLLRKQRTFDNGSIPHQIHLGELHAILRRQEDFYPFLKDNREKIEKILTFRIPYYVGPLARGNSRFAWMTRKSEETITPWNFEEVVDKGASAQSFIERMTNFDKNLPNEKVLPKHSLLYEYFTVYNELTKVKYVTEGMRKPAFLSGEQKKAIVDLLFKTNRKVTVKQLKEDYFKKIECFDSVEISGVEDRFNASLGTYHDLLKIIKDKDFLDNEENEDILEDIVLTLTLFEDREMIEERLKTYAHLFDDKVMKQLKRRRYTGWGRLSRKLINGIRDKQSGKTILDFLKSDGFANRNFMQLIHDDSLTFKEDIQKAQVSGQGDSLHEHIANLAGSPAIKKGILQTVKVVDELVKVMGRHKPENIVIEMARENQTTQKGQKNSRERMKRIEEGIKELGSQILKEHPVENTQLQNEKLYLYYLQNGRDMYVDQELDINRLSDYDVDHIVPQSFLKDDSIDNKVLTRSDKARGKSDNVPSEEVVKKMKNYWRQLLNAKLITQRKFDNLTKAERGGLSELDKAGFIKRQLVETRQITKHVAQILDSRMNTKYDENDKLIREVKVITLKSKLVSDFRKDFQFYKVREINNYHHAHDAYLNAVVGTALIKKYPKLESEFVYGDYKVYDVRKMIAKSEQEIGKATAKYFFYSNIMNFFKTEITLANGEIRKRPLIETNGETGEIVWDKGRDFATVRKVLSMPQVNIVKKTEVQTGGFSKESILPKRNSDKLIARKKDWDPKKYGGFDSPTVAYSVLVVAKVEKGKSKKLKSVKELLGITIMERSSFEKNPIDFLEAKGYKEVKKDLIIKLPKYSLFELENGRKRMLASAGELQKGNELALPSKYVNFLYLASHYEKLKGSPEDNEQKQLFVEQHKHYLDEIIEQISEFSKRVILADANLDKVLSAYNKHRDKPIREQAENIIHLFTLTNLGAPAAFKYFDTTIDRKRYTSTKEVLDATLIHQSITGLYETRIDLSQLGGDGGGSSGSSGSSGSSGSSGGTLNIEDEYRLHETSKEPDVSLGSTWLSDFPQAWAETGGMGLAVRQAPLIIPLKATSTPVSIKQYPMSQEARLGIKPHIQRLLDQGILVPCQSPWNTPLLPVKKPGTNDYRPVQDLREVNKRVEDIHPTVPNPYNLLSGLPPSHQWYTVLDLKDAFFCLRLHPTSQPLFAFEWRDPEMGISGQLTWTRLPQGFKNSPTLFNEALHRDLAGFRIQHPDLILLQYVDDLLLAATSELDCQQGTRALLQTLGDLGYRASAKKAQICQKQVKYLGYLLKEGQRWLTEARKETVMGQPIPKTPRQLREFLGTAGFCRLWIPGFAEMAAPLYPLTKPGTLFNWGPDQQKAFQEIKQALLTAPALGLPDLTKPFELFVDEKQGYAKGVLTQKLGPWRRPVAYLSKKLDPVAAGWPPCLRMVAAIAVLTKDAGKLTMGQPLVILAPHAVEALVKQPPDRWLSNARMTHYQALLLDTDRVQFGPVVALNPATLLPLPEEGLQHDCLDILAEAHGTRSDLMDQPLPDADHTWYTDGSSFLQEGQRKAGAAVTTETEVIWARALPAGTSAQRAELIALTQALKMAEGKKLNVYTDSRYAFATAHIHGEIYRRRGWLTSEGKEIKNKDEILALLKALFLPKRLSIIHCPGHQKGNSAEARGNRMADQAAREVATRETPETSTLLAGKRTADGSEFEKRTADGSEFESPKKKAKVE

SEQ ID NO: 2281 - protein, 2093 aa, synthetic construct
  source 1..2093: note = Description of Artificial Sequence: Synthetic polypeptide
MPAAKRVKLDGGDKKYSIGLDIGTNSVGWAVITDEYKVPSKKFKVLGNTDRHSIKKNLIGALLFDSGETAEATRLKRTARRRYTRRKNRICYLQEIFSNEMAKVDDSFFHRLEESFLVEEDKKHERHPIFGNIVDEVAYHEKYPTIYHLRKKLVDSTDKADLRLIYLALAHMIKFRGHFLIEGDLNPDNSDVDKLFIQLVQTYNQLFEENPINASGVDAKAILSARLSKSRRLENLIAQLPGEKKNGLFGNLIALSLGLTPNFKSNFDLAEDAKLQLSKDTYDDDLDNLLAQIGDQYADLFLAAKNLSDAILLSDILRVNTEITKAPLSASMIKRYDEHHQDLTLLKALVRQQLPEKYKEIFFDQSKNGYAGYIDGGASQEEFYKFIKPILEKMDGTEELLVKLNREDLLRKQRTFDNGSIPHQIHLGELHAILRRQEDFYPFLKDNREKIEKILTFRIPYYVGPLARGNSRFAWMTRKSEETITPWNFEEVVDKGASAQSFIERMTNFDKNLPNEKVLPKHSLLYEYFTVYNELTKVKYVTEGMRKPAFLSGEQKKAIVDLLFKTNRKVTVKQLKEDYFKKIECFDSVEISGVEDRFNASLGTYHDLLKIIKDKDFLDNEENEDILEDIVLTLTLFEDREMIEERLKTYAHLFDDKVMKQLKRRRYTGWGRLSRKLINGIRDKQSGKTILDFLKSDGFANRNFMQLIHDDSLTFKEDIQKAQVSGQGDSLHEHIANLAGSPAIKKGILQTVKVVDELVKVMGRHKPENIVIEMARENQTTQKGQKNSRERMKRIEEGIKELGSQILKEHPVENTQLQNEKLYLYYLQNGRDMYVDQELDINRLSDYDVDHIVPQSFLKDDSIDNKVLTRSDKARGKSDNVPSEEVVKKMKNYWRQLLNAKLITQRKFDNLTKAERGGLSELDKAGFIKRQLVETRQITKHVAQILDSRMNTKYDENDKLIREVKVITLKSKLVSDFRKDFQFYKVREINNYHHAHDAYLNAVVGTALIKKYPKLESEFVYGDYKVYDVRKMIAKSEQEIGKATAKYFFYSNIMNFFKTEITLANGEIRKRPLIETNGETGEIVWDKGRDFATVRKVLSMPQVNIVKKTEVQTGGFSKESILPKRNSDKLIARKKDWDPKKYGGFDSPTVAYSVLVVAKVEKGKSKKLKSVKELLGITIMERSSFEKNPIDFLEAKGYKEVKKDLIIKLPKYSLFELENGRKRMLASAGELQKGNELALPSKYVNFLYLASHYEKLKGSPEDNEQKQLFVEQHKHYLDEIIEQISEFSKRVILADANLDKVLSAYNKHRDKPIREQAENIIHLFTLTNLGAPAAFKYFDTTIDRKRYTSTKEVLDATLIHQSITGLYETRIDLSQLGGDGGEAAAKGGGGGTLNIEDEYRLHETSKEPDVSLGSTWLSDFPQAWAETGGMGLAVRQAPLIIPLKATSTPVSIKQYPMSQEARLGIKPHIQRLLDQGILVPCQSPWNTPLLPVKKPGTNDYRPVQDLREVNKRVEDIHPTVPNPYNLLSGLPPSHQWYTVLDLKDAFFCLRLHPTSQPLFAFEWRDPEMGISGQLTWTRLPQGFKNSPTLFNEALHRDLAGFRIQHPDLILLQYVDDLLLAATSELDCQQGTRALLQTLGDLGYRASAKKAQICQKQVKYLGYLLKEGQRWLTEARKETVMGQPIPKTPRQLREFLGTAGFCRLWIPGFAEMAAPLYPLTKPGTLFNWGPDQQKAFQEIKQALLTAPALGLPDLTKPFELFVDEKQGYAKGVLTQKLGPWRRPVAYLSKKLDPVAAGWPPCLRMVAAIAVLTKDAGKLTMGQPLVILAPHAVEALVKQPPDRWLSNARMTHYQALLLDTDRVQFGPVVALNPATLLPLPEEGLQHDCLDILAEAHGTRSDLMDQPLPDADHTWYTDGSSFLQEGQRKAGAAVTTETEVIWARALPAGTSAQRAELIALTQALKMAEGKKLNVYTDSRYAFATAHIHGEIYRRRGWLTSEGKEIKNKDEILALLKALFLPKRLSIIHCPGHQKGNSAEARGNRMADQAAREVATRETPETSTLLAGKRTADGSEFEKRTADGSEFESPKKKAKVE

SEQ ID NO: 2282 - protein, 2096 aa, synthetic construct
  source 1..2096: note = Description of Artificial Sequence: Synthetic polypeptide
MPAAKRVKLDGGDKKYSIGLDIGTNSVGWAVITDEYKVPSKKFKVLGNTDRHSIKKNLIGALLFDSGETAEATRLKRTARRRYTRRKNRICYLQEIFSNEMAKVDDSFFHRLEESFLVEEDKKHERHPIFGNIVDEVAYHEKYPTIYHLRKKLVDSTDKADLRLIYLALAHMIKFRGHFLIEGDLNPDNSDVDKLFIQLVQTYNQLFEENPINASGVDAKAILSARLSKSRRLENLIAQLPGEKKNGLFGNLIALSLGLTPNFKSNFDLAEDAKLQLSKDTYDDDLDNLLAQIGDQYADLFLAAKNLSDAILLSDILRVNTEITKAPLSASMIKRYDEHHQDLTLLKALVRQQLPEKYKEIFFDQSKNGYAGYIDGGASQEEFYKFIKPILEKMDGTEELLVKLNREDLLRKQRTFDNGSIPHQIHLGELHAILRRQEDFYPFLKDNREKIEKILTFRIPYYVGPLARGNSRFAWMTRKSEETITPWNFEEVVDKGASAQSFIERMTNFDKNLPNEKVLPKHSLLYEYFTVYNELTKVKYVTEGMRKPAFLSGEQKKAIVDLLFKTNRKVTVKQLKEDYFKKIECFDSVEISGVEDRFNASLGTYHDLLKIIKDKDFLDNEENEDILEDIVLTLTLFEDREMIEERLKTYAHLFDDKVMKQLKRRRYTGWGRLSRKLINGIRDKQSGKTILDFLKSDGFANRNFMQLIHDDSLTFKEDIQKAQVSGQGDSLHEHIANLAGSPAIKKGILQTVKVVDELVKVMGRHKPENIVIEMARENQTTQKGQKNSRERMKRIEEGIKELGSQILKEHPVENTQLQNEKLYLYYLQNGRDMYVDQELDINRLSDYDVDHIVPQSFLKDDSIDNKVLTRSDKARGKSDNVPSEEVVKKMKNYWRQLLNAKLITQRKFDNLTKAERGGLSELDKAGFIKRQLVETRQITKHVAQILDSRMNTKYDENDKLIREVKVITLKSKLVSDFRKDFQFYKVREINNYHHAHDAYLNAVVGTALIKKYPKLESEFVYGDYKVYDVRKMIAKSEQEIGKATAKYFFYSNIMNFFKTEITLANGEIRKRPLIETNGETGEIVWDKGRDFATVRKVLSMPQVNIVKKTEVQTGGFSKESILPKRNSDKLIARKKDWDPKKYGGFDSPTVAYSVLVVAKVEKGKSKKLKSVKELLGITIMERSSFEKNPIDFLEAKGYKEVKKDLIIKLPKYSLFELENGRKRMLASAGELQKGNELALPSKYVNFLYLASHYEKLKGSPEDNEQKQLFVEQHKHYLDEIIEQISEFSKRVILADANLDKVLSAYNKHRDKPIREQAENIIHLFTLTNLGAPAAFKYFDTTIDRKRYTSTKEVLDATLIHQSITGLYETRIDLSQLGGDGGGSSPAPEAAAKGGTLNIEDEYRLHETSKEPDVSLGSTWLSDFPQAWAETGGMGLAVRQAPLIIPLKATSTPVSIKQYPMSQEARLGIKPHIQRLLDQGILVPCQSPWNTPLLPVKKPGTNDYRPVQDLREVNKRVEDIHPTVPNPYNLLSGLPPSHQWYTVLDLKDAFFCLRLHPTSQPLFAFEWRDPEMGISGQLTWTRLPQGFKNSPTLFNEALHRDLAGFRIQHPDLILLQYVDDLLLAATSELDCQQGTRALLQTLGDLGYRASAKKAQICQKQVKYLGYLLKEGQRWLTEARKETVMGQPIPKTPRQLREFLGTAGFCRLWIPGFAEMAAPLYPLTKPGTLFNWGPDQQKAFQEIKQALLTAPALGLPDLTKPFELFVDEKQGYAKGVLTQKLGPWRRPVAYLSKKLDPVAAGWPPCLRMVAAIAVLTKDAGKLTMGQPLVILAPHAVEALVKQPPDRWLSNARMTHYQALLLDTDRVQFGPVVALNPATLLPLPEEGLQHDCLDILAEAHGTRSDLMDQPLPDADHTWYTDGSSFLQEGQRKAGAAVTTETEVIWARALPAGTSAQRAELIALTQALKMAEGKKLNVYTDSRYAFATAHIHGEIYRRRGWLTSEGKEIKNKDEILALLKALFLPKRLSIIHCPGHQKGNSAEARGNRMADQAAREVATRETPETSTLLAGKRTADGSEFEKRTADGSEFESPKKKAKVE

SEQ ID NO: 2283 - protein, 2094 aa, synthetic construct
  source 1..2094: note = Description of Artificial Sequence: Synthetic polypeptide
MPAAKRVKLDGGDKKYSIGLDIGTNSVGWAVITDEYKVPSKKFKVLGNTDRHSIKKNLIGALLFDSGETAEATRLKRTARRRYTRRKNRICYLQEIFSNEMAKVDDSFFHRLEESFLVEEDKKHERHPIFGNIVDEVAYHEKYPTIYHLRKKLVDSTDKADLRLIYLALAHMIKFRGHFLIEGDLNPDNSDVDKLFIQLVQTYNQLFEENPINASGVDAKAILSARLSKSRRLENLIAQLPGEKKNGLFGNLIALSLGLTPNFKSNFDLAEDAKLQLSKDTYDDDLDNLLAQIGDQYADLFLAAKNLSDAILLSDILRVNTEITKAPLSASMIKRYDEHHQDLTLLKALVRQQLPEKYKEIFFDQSKNGYAGYIDGGASQEEFYKFIKPILEKMDGTEELLVKLNREDLLRKQRTFDNGSIPHQIHLGELHAILRRQEDFYPFLKDNREKIEKILTFRIPYYVGPLARGNSRFAWMTRKSEETITPWNFEEVVDKGASAQSFIERMTNFDKNLPNEKVLPKHSLLYEYFTVYNELTKVKYVTEGMRKPAFLSGEQKKAIVDLLFKTNRKVTVKQLKEDYFKKIECFDSVEISGVEDRFNASLGTYHDLLKIIKDKDFLDNEENEDILEDIVLTLTLFEDREMIEERLKTYAHLFDDKVMKQLKRRRYTGWGRLSRKLINGIRDKQSGKTILDFLKSDGFANRNFMQLIHDDSLTFKEDIQKAQVSGQGDSLHEHIANLAGSPAIKKGILQTVKVVDELVKVMGRHKPENIVIEMARENQTTQKGQKNSRERMKRIEEGIKELGSQILKEHPVENTQLQNEKLYLYYLQNGRDMYVDQELDINRLSDYDVDHIVPQSFLKDDSIDNKVLTRSDKARGKSDNVPSEEVVKKMKNYWRQLLNAKLITQRKFDNLTKAERGGLSELDKAGFIKRQLVETRQITKHVAQILDSRMNTKYDENDKLIREVKVITLKSKLVSDFRKDFQFYKVREINNYHHAHDAYLNAVVGTALIKKYPKLESEFVYGDYKVYDVRKMIAKSEQEIGKATAKYFFYSNIMNFFKTEITLANGEIRKRPLIETNGETGEIVWDKGRDFATVRKVLSMPQVNIVKKTEVQTGGFSKESILPKRNSDKLIARKKDWDPKKYGGFDSPTVAYSVLVVAKVEKGKSKKLKSVKELLGITIMERSSFEKNPIDFLEAKGYKEVKKDLIIKLPKYSLFELENGRKRMLASAGELQKGNELALPSKYVNFLYLASHYEKLKGSPEDNEQKQLFVEQHKHYLDEIIEQISEFSKRVILADANLDKVLSAYNKHRDKPIREQAENIIHLFTLTNLGAPAAFKYFDTTIDRKRYTSTKEVLDATLIHQSITGLYETRIDLSQLGGDGGGSSPAPGGGGGTLNIEDEYRLHETSKEPDVSLGSTWLSDFPQAWAETGGMGLAVRQAPLIIPLKATSTPVSIKQYPMSQEARLGIKPHIQRLLDQGILVPCQSPWNTPLLPVKKPGTNDYRPVQDLREVNKRVEDIHPTVPNPYNLLSGLPPSHQWYTVLDLKDAFFCLRLHPTSQPLFAFEWRDPEMGISGQLTWTRLPQGFKNSPTLFNEALHRDLAGFRIQHPDLILLQYVDDLLLAATSELDCQQGTRALLQTLGDLGYRASAKKAQICQKQVKYLGYLLKEGQRWLTEARKETVMGQPIPKTPRQLREFLGTAGFCRLWIPGFAEMAAPLYPLTKPGTLFNWGPDQQKAFQEIKQALLTAPALGLPDLTKPFELFVDEKQGYAKGVLTQKLGPWRRPVAYLSKKLDPVAAGWPPCLRMVAAIAVLTKDAGKLTMGQPLVILAPHAVEALVKQPPDRWLSNARMTHYQALLLDTDRVQFGPVVALNPATLLPLPEEGLQHDCLDILAEAHGTRSDLMDQPLPDADHTWYTDGSSFLQEGQRKAGAAVTTETEVIWARALPAGTSAQRAELIALTQALKMAEGKKLNVYTDSRYAFATAHIHGEIYRRRGWLTSEGKEIKNKDEILALLKALFLPKRLSIIHCPGHQKGNSAEARGNRMADQAAREVATRETPETSTLLAGKRTADGSEFEKRTADGSEFESPKKKAKVE

SEQ ID NO: 2284 - protein, 2090 aa, synthetic construct
  source 1..2090: note = Description of Artificial Sequence: Synthetic polypeptide
MPAAKRVKLDGGDKKYSIGLDIGTNSVGWAVITDEYKVPSKKFKVLGNTDRHSIKKNLIGALLFDSGETAEATRLKRTARRRYTRRKNRICYLQEIFSNEMAKVDDSFFHRLEESFLVEEDKKHERHPIFGNIVDEVAYHEKYPTIYHLRKKLVDSTDKADLRLIYLALAHMIKFRGHFLIEGDLNPDNSDVDKLFIQLVQTYNQLFEENPINASGVDAKAILSARLSKSRRLENLIAQLPGEKKNGLFGNLIALSLGLTPNFKSNFDLAEDAKLQLSKDTYDDDLDNLLAQIGDQYADLFLAAKNLSDAILLSDILRVNTEITKAPLSASMIKRYDEHHQDLTLLKALVRQQLPEKYKEIFFDQSKNGYAGYIDGGASQEEFYKFIKPILEKMDGTEELLVKLNREDLLRKQRTFDNGSIPHQIHLGELHAILRRQEDFYPFLKDNREKIEKILTFRIPYYVGPLARGNSRFAWMTRKSEETITPWNFEEVVDKGASAQSFIERMTNFDKNLPNEKVLPKHSLLYEYFTVYNELTKVKYVTEGMRKPAFLSGEQKKAIVDLLFKTNRKVTVKQLKEDYFKKIECFDSVEISGVEDRFNASLGTYHDLLKIIKDKDFLDNEENEDILEDIVLTLTLFEDREMIEERLKTYAHLFDDKVMKQLKRRRYTGWGRLSRKLINGIRDKQSGKTILDFLKSDGFANRNFMQLIHDDSLTFKEDIQKAQVSGQGDSLHEHIANLAGSPAIKKGILQTVKVVDELVKVMGRHKPENIVIEMARENQTTQKGQKNSRERMKRIEEGIKELGSQILKEHPVENTQLQNEKLYLYYLQNGRDMYVDQELDINRLSDYDVDHIVPQSFLKDDSIDNKVLTRSDKARGKSDNVPSEEVVKKMKNYWRQLLNAKLITQRKFDNLTKAERGGLSELDKAGFIKRQLVETRQITKHVAQILDSRMNTKYDENDKLIREVKVITLKSKLVSDFRKDFQFYKVREINNYHHAHDAYLNAVVGTALIKKYPKLESEFVYGDYKVYDVRKMIAKSEQEIGKATAKYFFYSNIMNFFKTEITLANGEIRKRPLIETNGETGEIVWDKGRDFATVRKVLSMPQVNIVKKTEVQTGGFSKESILPKRNSDKLIARKKDWDPKKYGGFDSPTVAYSVLVVAKVEKGKSKKLKSVKELLGITIMERSSFEKNPIDFLEAKGYKEVKKDLIIKLPKYSLFELENGRKRMLASAGELQKGNELALPSKYVNFLYLASHYEKLKGSPEDNEQKQLFVEQHKHYLDEIIEQISEFSKRVILADANLDKVLSAYNKHRDKPIREQAENIIHLFTLTNLGAPAAFKYFDTTIDRKRYTSTKEVLDATLIHQSITGLYETRIDLSQLGGDGGEAAAKGGTLNIEDEYRLHETSKEPDVSLGSTWLSDFPQAWAETGGMGLAVRQAPLIIPLKATSTPVSIKQYPMSQEARLGIKPHIQRLLDQGILVPCQSPWNTPLLPVKKPGTNDYRPVQDLREVNKRVEDIHPTVPNPYNLLSGLPPSHQWYTVLDLKDAFFCLRLHPTSQPLFAFEWRDPEMGISGQLTWTRLPQGFKNSPTLFNEALHRDLAGFRIQHPDLILLQYVDDLLLAATSELDCQQGTRALLQTLGDLGYRASAKKAQICQKQVKYLGYLLKEGQRWLTEARKETVMGQPIPKTPRQLREFLGTAGFCRLWIPGFAEMAAPLYPLTKPGTLFNWGPDQQKAFQEIKQALLTAPALGLPDLTKPFELFVDEKQGYAKGVLTQKLGPWRRPVAYLSKKLDPVAAGWPPCLRMVAAIAVLTKDAGKLTMGQPLVILAPHAVEALVKQPPDRWLSNARMTHYQALLLDTDRVQFGPVVALNPATLLPLPEEGLQHDCLDILAEAHGTRSDLMDQPLPDADHTWYTDGSSFLQEGQRKAGAAVTTETEVIWARALPAGTSAQRAELIALTQALKMAEGKKLNVYTDSRYAFATAHIHGEIYRRRGWLTSEGKEIKNKDEILALLKALFLPKRLSIIHCPGHQKGNSAEARGNRMADQAAREVATRETPETSTLLAGKRTADGSEFEKRTADGSEFESPKKKAKVE

SEQ ID NO: 2285 - protein, 2091 aa, synthetic construct
  source 1..2091: note = Description of Artificial Sequence: Synthetic polypeptide
MPAAKRVKLDGGDKKYSIGLDIGTNSVGWAVITDEYKVPSKKFKVLGNTDRHSIKKNLIGALLFDSGETAEATRLKRTARRRYTRRKNRICYLQEIFSNEMAKVDDSFFHRLEESFLVEEDKKHERHPIFGNIVDEVAYHEKYPTIYHLRKKLVDSTDKADLRLIYLALAHMIKFRGHFLIEGDLNPDNSDVDKLFIQLVQTYNQLFEENPINASGVDAKAILSARLSKSRRLENLIAQLPGEKKNGLFGNLIALSLGLTPNFKSNFDLAEDAKLQLSKDTYDDDLDNLLAQIGDQYADLFLAAKNLSDAILLSDILRVNTEITKAPLSASMIKRYDEHHQDLTLLKALVRQQLPEKYKEIFFDQSKNGYAGYIDGGASQEEFYKFIKPILEKMDGTEELLVKLNREDLLRKQRTFDNGSIPHQIHLGELHAILRRQEDFYPFLKDNREKIEKILTFRIPYYVGPLARGNSRFAWMTRKSEETITPWNFEEVVDKGASAQSFIERMTNFDKNLPNEKVLPKHSLLYEYFTVYNELTKVKYVTEGMRKPAFLSGEQKKAIVDLLFKTNRKVTVKQLKEDYFKKIECFDSVEISGVEDRFNASLGTYHDLLKIIKDKDFLDNEENEDILEDIVLTLTLFEDREMIEERLKTYAHLFDDKVMKQLKRRRYTGWGRLSRKLINGIRDKQSGKTILDFLKSDGFANRNFMQLIHDDSLTFKEDIQKAQVSGQGDSLHEHIANLAGSPAIKKGILQTVKVVDELVKVMGRHKPENIVIEMARENQTTQKGQKNSRERMKRIEEGIKELGSQILKEHPVENTQLQNEKLYLYYLQNGRDMYVDQELDINRLSDYDVDHIVPQSFLKDDSIDNKVLTRSDKARGKSDNVPSEEVVKKMKNYWRQLLNAKLITQRKFDNLTKAERGGLSELDKAGFIKRQLVETRQITKHVAQILDSRMNTKYDENDKLIREVKVITLKSKLVSDFRKDFQFYKVREINNYHHAHDAYLNAVVGTALIKKYPKLESEFVYGDYKVYDVRKMIAKSEQEIGKATAKYFFYSNIMNFFKTEITLANGEIRKRPLIETNGETGEIVWDKGRDFATVRKVLSMPQVNIVKKTEVQTGGFSKESILPKRNSDKLIARKKDWDPKKYGGFDSPTVAYSVLVVAKVEKGKSKKLKSVKELLGITIMERSSFEKNPIDFLEAKGYKEVKKDLIIKLPKYSLFELENGRKRMLASAGELQKGNELALPSKYVNFLYLASHYEKLKGSPEDNEQKQLFVEQHKHYLDEIIEQISEFSKRVILADANLDKVLSAYNKHRDKPIREQAENIIHLFTLTNLGAPAAFKYFDTTIDRKRYTSTKEVLDATLIHQSITGLYETRIDLSQLGGDGGGSSPAPGGTLNIEDEYRLHETSKEPDVSLGSTWLSDFPQAWAETGGMGLAVRQAPLIIPLKATSTPVSIKQYPMSQEARLGIKPHIQRLLDQGILVPCQSPWNTPLLPVKKPGTNDYRPVQDLREVNKRVEDIHPTVPNPYNLLSGLPPSHQWYTVLDLKDAFFCLRLHPTSQPLFAFEWRDPEMGISGQLTWTRLPQGFKNSPTLFNEALHRDLAGFRIQHPDLILLQYVDDLLLAATSELDCQQGTRALLQTLGDLGYRASAKKAQICQKQVKYLGYLLKEGQRWLTEARKETVMGQPIPKTPRQLREFLGTAGFCRLWIPGFAEMAAPLYPLTKPGTLFNWGPDQQKAFQEIKQALLTAPALGLPDLTKPFELFVDEKQGYAKGVLTQKLGPWRRPVAYLSKKLDPVAAGWPPCLRMVAAIAVLTKDAGKLTMGQPLVILAPHAVEALVKQPPDRWLSNARMTHYQALLLDTDRVQFGPVVALNPATLLPLPEEGLQHDCLDILAEAHGTRSDLMDQPLPDADHTWYTDGSSFLQEGQRKAGAAVTTETEVIWARALPAGTSAQRAELIALTQALKMAEGKKLNVYTDSRYAFATAHIHGEIYRRRGWLTSEGKEIKNKDEILALLKALFLPKRLSIIHCPGHQKGNSAEARGNRMADQAAREVATRETPETSTLLAGKRTADGSEFEKRTADGSEFESPKKKAKVE

SEQ ID NO: 2286 - protein, 2096 aa, synthetic construct
  source 1..2096: note = Description of Artificial Sequence: Synthetic polypeptide
MPAAKRVKLDGGDKKYSIGLDIGTNSVGWAVITDEYKVPSKKFKVLGNTDRHSIKKNLIGALLFDSGETAEATRLKRTARRRYTRRKNRICYLQEIFSNEMAKVDDSFFHRLEESFLVEEDKKHERHPIFGNIVDEVAYHEKYPTIYHLRKKLVDSTDKADLRLIYLALAHMIKFRGHFLIEGDLNPDNSDVDKLFIQLVQTYNQLFEENPINASGVDAKAILSARLSKSRRLENLIAQLPGEKKNGLFGNLIALSLGLTPNFKSNFDLAEDAKLQLSKDTYDDDLDNLLAQIGDQYADLFLAAKNLSDAILLSDILRVNTEITKAPLSASMIKRYDEHHQDLTLLKALVRQQLPEKYKEIFFDQSKNGYAGYIDGGASQEEFYKFIKPILEKMDGTEELLVKLNREDLLRKQRTFDNGSIPHQIHLGELHAILRRQEDFYPFLKDNREKIEKILTFRIPYYVGPLARGNSRFAWMTRKSEETITPWNFEEVVDKGASAQSFIERMTNFDKNLPNEKVLPKHSLLYEYFTVYNELTKVKYVTEGMRKPAFLSGEQKKAIVDLLFKTNRKVTVKQLKEDYFKKIECFDSVEISGVEDRFNASLGTYHDLLKIIKDKDFLDNEENEDILEDIVLTLTLFEDREMIEERLKTYAHLFDDKVMKQLKRRRYTGWGRLSRKLINGIRDKQSGKTILDFLKSDGFANRNFMQLIHDDSLTFKEDIQKAQVSGQGDSLHEHIANLAGSPAIKKGILQTVKVVDELVKVMGRHKPENIVIEMARENQTTQKGQKNSRERMKRIEEGIKELGSQILKEHPVENTQLQNEKLYLYYLQNGRDMYVDQELDINRLSDYDVDHIVPQSFLKDDSIDNKVLTRSDKARGKSDNVPSEEVVKKMKNYWRQLLNAKLITQRKFDNLTKAERGGLSELDKAGFIKRQLVETRQITKHVAQILDSRMNTKYDENDKLIREVKVITLKSKLVSDFRKDFQFYKVREINNYHHAHDAYLNAVVGTALIKKYPKLESEFVYGDYKVYDVRKMIAKSEQEIGKATAKYFFYSNIMNFFKTEITLANGEIRKRPLIETNGETGEIVWDKGRDFATVRKVLSMPQVNIVKKTEVQTGGFSKESILPKRNSDKLIARKKDWDPKKYGGFDSPTVAYSVLVVAKVEKGKSKKLKSVKELLGITIMERSSFEKNPIDFLEAKGYKEVKKDLIIKLPKYSLFELENGRKRMLASAGELQKGNELALPSKYVNFLYLASHYEKLKGSPEDNEQKQLFVEQHKHYLDEIIEQISEFSKRVILADANLDKVLSAYNKHRDKPIREQAENIIHLFTLTNLGAPAAFKYFDTTIDRKRYTSTKEVLDATLIHQSITGLYETRIDLSQLGGDGGGGSPAPEAAAKGGTLNIEDEYRLHETSKEPDVSLGSTWLSDFPQAWAETGGMGLAVRQAPLIIPLKATSTPVSIKQYPMSQEARLGIKPHIQRLLDQGILVPCQSPWNTPLLPVKKPGTNDYRPVQDLREVNKRVEDIHPTVPNPYNLLSGLPPSHQWYTVLDLKDAFFCLRLHPTSQPLFAFEWRDPEMGISGQLTWTRLPQGFKNSPTLFNEALHRDLAGFRIQHPDLILLQYVDDLLLAATSELDCQQGTRALLQTLGDLGYRASAKKAQICQKQVKYLGYLLKEGQRWLTEARKETVMGQPIPKTPRQLREFLGTAGFCRLWIPGFAEMAAPLYPLTKPGTLFNWGPDQQKAFQEIKQALLTAPALGLPDLTKPFELFVDEKQGYAKGVLTQKLGPWRRPVAYLSKKLDPVAAGWPPCLRMVAAIAVLTKDAGKLTMGQPLVILAPHAVEALVKQPPDRWLSNARMTHYQALLLDTDRVQFGPVVALNPATLLPLPEEGLQHDCLDILAEAHGTRSDLMDQPLPDADHTWYTDGSSFLQEGQRKAGAAVTTETEVIWARALPAGTSAQRAELIALTQALKMAEGKKLNVYTDSRYAFATAHIHGEIYRRRGWLTSEGKEIKNKDEILALLKALFLPKRLSIIHCPGHQKGNSAEARGNRMADQAAREVATRETPETSTLLAGKRTADGSEFEKRTADGSEFESPKKKAKVE

SEQ ID NO: 2287 - protein, 2096 aa, synthetic construct
  source 1..2096: note = Description of Artificial Sequence: Synthetic polypeptide
MPAAKRVKLDGGDKKYSIGLDIGTNSVGWAVITDEYKVPSKKFKVLGNTDRHSIKKNLIGALLFDSGETAEATRLKRTARRRYTRRKNRICYLQEIFSNEMAKVDDSFFHRLEESFLVEEDKKHERHPIFGNIVDEVAYHEKYPTIYHLRKKLVDSTDKADLRLIYLALAHMIKFRGHFLIEGDLNPDNSDVDKLFIQLVQTYNQLFEENPINASGVDAKAILSARLSKSRRLENLIAQLPGEKKNGLFGNLIALSLGLTPNFKSNFDLAEDAKLQLSKDTYDDDLDNLLAQIGDQYADLFLAAKNLSDAILLSDILRVNTEITKAPLSASMIKRYDEHHQDLTLLKALVRQQLPEKYKEIFFDQSKNGYAGYIDGGASQEEFYKFIKPILEKMDGTEELLVKLNREDLLRKQRTFDNGSIPHQIHLGELHAILRRQEDFYPFLKDNREKIEKILTFRIPYYVGPLARGNSRFAWMTRKSEETITPWNFEEVVDKGASAQSFIERMTNFDKNLPNEKVLPKHSLLYEYFTVYNELTKVKYVTEGMRKPAFLSGEQKKAIVDLLFKTNRKVTVKQLKEDYFKKIECFDSVEISGVEDRFNASLGTYHDLLKIIKDKDFLDNEENEDILEDIVLTLTLFEDREMIEERLKTYAHLFDDKVMKQLKRRRYTGWGRLSRKLINGIRDKQSGKTILDFLKSDGFANRNFMQLIHDDSLTFKEDIQKAQVSGQGDSLHEHIANLAGSPAIKKGILQTVKVVDELVKVMGRHKPENIVIEMARENQTTQKGQKNSRERMKRIEEGIKELGSQILKEHPVENTQLQNEKLYLYYLQNGRDMYVDQELDINRLSDYDVDHIVPQSFLKDDSIDNKVLTRSDKARGKSDNVPSEEVVKKMKNYWRQLLNAKLITQRKFDNLTKAERGGLSELDKAGFIKRQLVETRQITKHVAQILDSRMNTKYDENDKLIREVKVITLKSKLVSDFRKDFQFYKVREINNYHHAHDAYLNAVVGTALIKKYPKLESEFVYGDYKVYDVRKMIAKSEQEIGKATAKYFFYSNIMNFFKTEITLANGEIRKRPLIETNGETGEIVWDKGRDFATVRKVLSMPQVNIVKKTEVQTGGFSKESILPKRNSDKLIARKKDWDPKKYGGFDSPTVAYSVLVVAKVEKGKSKKLKSVKELLGITIMERSSFEKNPIDFLEAKGYKEVKKDLIIKLPKYSLFELENGRKRMLASAGELQKGNELALPSKYVNFLYLASHYEKLKGSPEDNEQKQLFVEQHKHYLDEIIEQISEFSKRVILADANLDKVLSAYNKHRDKPIREQAENIIHLFTLTNLGAPAAFKYFDTTIDRKRYTSTKEVLDATLIHQSITGLYETRIDLSQLGGDGGGGSEAAAKGGGGGTLNIEDEYRLHETSKEPDVSLGSTWLSDFPQAWAETGGMGLAVRQAPLIIPLKATSTPVSIKQYPMSQEARLGIKPHIQRLLDQGILVPCQSPWNTPLLPVKKPGTNDYRPVQDLREVNKRVEDIHPTVPNPYNLLSGLPPSHQWYTVLDLKDAFFCLRLHPTSQPLFAFEWRDPEMGISGQLTWTRLPQGFKNSPTLFNEALHRDLAGFRIQHPDLILLQYVDDLLLAATSELDCQQGTRALLQTLGDLGYRASAKKAQICQKQVKYLGYLLKEGQRWLTEARKETVMGQPIPKTPRQLREFLGTAGFCRLWIPGFAEMAAPLYPLTKPGTLFNWGPDQQKAFQEIKQALLTAPALGLPDLTKPFELFVDEKQGYAKGVLTQKLGPWRRPVAYLSKKLDPVAAGWPPCLRMVAAIAVLTKDAGKLTMGQPLVILAPHAVEALVKQPPDRWLSNARMTHYQALLLDTDRVQFGPVVALNPATLLPLPEEGLQHDCLDILAEAHGTRSDLMDQPLPDADHTWYTDGSSFLQEGQRKAGAAVTTETEVIWARALPAGTSAQRAELIALTQALKMAEGKKLNVYTDSRYAFATAHIHGEIYRRRGWLTSEGKEIKNKDEILALLKALFLPKRLSIIHCPGHQKGNSAEARGNRMADQAAREVATRETPETSTLLAGKRTADGSEFEKRTADGSEFESPKKKAKVE

SEQ ID NO: 2288 - protein, 2094 aa, synthetic construct
  source 1..2094: note = Description of Artificial Sequence: Synthetic polypeptide
MPAAKRVKLDGGDKKYSIGLDIGTNSVGWAVITDEYKVPSKKFKVLGNTDRHSIKKNLIGALLFDSGETAEATRLKRTARRRYTRRKNRICYLQEIFSNEMAKVDDSFFHRLEESFLVEEDKKHERHPIFGNIVDEVAYHEKYPTIYHLRKKLVDSTDKADLRLIYLALAHMIKFRGHFLIEGDLNPDNSDVDKLFIQLVQTYNQLFEENPINASGVDAKAILSARLSKSRRLENLIAQLPGEKKNGLFGNLIALSLGLTPNFKSNFDLAEDAKLQLSKDTYDDDLDNLLAQIGDQYADLFLAAKNLSDAILLSDILRVNTEITKAPLSASMIKRYDEHHQDLTLLKALVRQQLPEKYKEIFFDQSKNGYAGYIDGGASQEEFYKFIKPILEKMDGTEELLVKLNREDLLRKQRTFDNGSIPHQIHLGELHAILRRQEDFYPFLKDNREKIEKILTFRIPYYVGPLARGNSRFAWMTRKSEETITPWNFEEVVDKGASAQSFIERMTNFDKNLPNEKVLPKHSLLYEYFTVYNELTKVKYVTEGMRKPAFLSGEQKKAIVDLLFKTNRKVTVKQLKEDYFKKIECFDSVEISGVEDRFNASLGTYHDLLKIIKDKDFLDNEENEDILEDIVLTLTLFEDREMIEERLKTYAHLFDDKVMKQLKRRRYTGWGRLSRKLINGIRDKQSGKTILDFLKSDGFANRNFMQLIHDDSLTFKEDIQKAQVSGQGDSLHEHIANLAGSPAIKKGILQTVKVVDELVKVMGRHKPENIVIEMARENQTTQKGQKNSRERMKRIEEGIKELGSQILKEHPVENTQLQNEKLYLYYLQNGRDMYVDQELDINRLSDYDVDHIVPQSFLKDDSIDNKVLTRSDKARGKSDNVPSEEVVKKMKNYWRQLLNAKLITQRKFDNLTKAERGGLSELDKAGFIKRQLVETRQITKHVAQILDSRMNTKYDENDKLIREVKVITLKSKLVSDFRKDFQFYKVREINNYHHAHDAYLNAVVGTALIKKYPKLESEFVYGDYKVYDVRKMIAKSEQEIGKATAKYFFYSNIMNFFKTEITLANGEIRKRPLIETNGETGEIVWDKGRDFATVRKVLSMPQVNIVKKTEVQTGGFSKESILPKRNSDKLIARKKDWDPKKYGGFDSPTVAYSVLVVAKVEKGKSKKLKSVKELLGITIMERSSFEKNPIDFLEAKGYKEVKKDLIIKLPKYSLFELENGRKRMLASAGELQKGNELALPSKYVNFLYLASHYEKLKGSPEDNEQKQLFVEQHKHYLDEIIEQISEFSKRVILADANLDKVLSAYNKHRDKPIREQAENIIHLFTLTNLGAPAAFKYFDTTIDRKRYTSTKEVLDATLIHQSITGLYETRIDLSQLGGDGGGSSPAPGGSGGTLNIEDEYRLHETSKEPDVSLGSTWLSDFPQAWAETGGMGLAVRQAPLIIPLKATSTPVSIKQYPMSQEARLGIKPHIQRLLDQGILVPCQSPWNTPLLPVKKPGTNDYRPVQDLREVNKRVEDIHPTVPNPYNLLSGLPPSHQWYTVLDLKDAFFCLRLHPTSQPLFAFEWRDPEMGISGQLTWTRLPQGFKNSPTLFNEALHRDLAGFRIQHPDLILLQYVDDLLLAATSELDCQQGTRALLQTLGDLGYRASAKKAQICQKQVKYLGYLLKEGQRWLTEARKETVMGQPIPKTPRQLREFLGTAGFCRLWIPGFAEMAAPLYPLTKPGTLFNWGPDQQKAFQEIKQALLTAPALGLPDLTKPFELFVDEKQGYAKGVLTQKLGPWRRPVAYLSKKLDPVAAGWPPCLRMVAAIAVLTKDAGKLTMGQPLVILAPHAVEALVKQPPDRWLSNARMTHYQALLLDTDRVQFGPVVALNPATLLPLPEEGLQHDCLDILAEAHGTRSDLMDQPLPDADHTWYTDGSSFLQEGQRKAGAAVTTETEVIWARALPAGTSAQRAELIALTQALKMAEGKKLNVYTDSRYAFATAHIHGEIYRRRGWLTSEGKEIKNKDEILALLKALFLPKRLSIIHCPGHQKGNSAEARGNRMADQAAREVATRETPETSTLLAGKRTADGSEFEKRTADGSEFESPKKKAKVE

SEQ ID NO: 2289 - protein, 2096 aa, synthetic construct
  source 1..2096: note = Description of Artificial Sequence: Synthetic polypeptide
MPAAKRVKLDGGDKKYSIGLDIGTNSVGWAVITDEYKVPSKKFKVLGNTDRHSIKKNLIGALLFDSGETAEATRLKRTARRRYTRRKNRICYLQEIFSNEMAKVDDSFFHRLEESFLVEEDKKHERHPIFGNIVDEVAYHEKYPTIYHLRKKLVDSTDKADLRLIYLALAHMIKFRGHFLIEGDLNPDNSDVDKLFIQLVQTYNQLFEENPINASGVDAKAILSARLSKSRRLENLIAQLPGEKKNGLFGNLIALSLGLTPNFKSNFDLAEDAKLQLSKDTYDDDLDNLLAQIGDQYADLFLAAKNLSDAILLSDILRVNTEITKAPLSASMIKRYDEHHQDLTLLKALVRQQLPEKYKEIFFDQSKNGYAGYIDGGASQEEFYKFIKPILEKMDGTEELLVKLNREDLLRKQRTFDNGSIPHQIHLGELHAILRRQEDFYPFLKDNREKIEKILTFRIPYYVGPLARGNSRFAWMTRKSEETITPWNFEEVVDKGASAQSFIERMTNFDKNLPNEKVLPKHSLLYEYFTVYNELTKVKYVTEGMRKPAFLSGEQKKAIVDLLFKTNRKVTVKQLKEDYFKKIECFDSVEISGVEDRFNASLGTYHDLLKIIKDKDFLDNEENEDILEDIVLTLTLFEDREMIEERLKTYAHLFDDKVMKQLKRRRYTGWGRLSRKLINGIRDKQSGKTILDFLKSDGFANRNFMQLIHDDSLTFKEDIQKAQVSGQGDSLHEHIANLAGSPAIKKGILQTVKVVDELVKVMGRHKPENIVIEMARENQTTQKGQKNSRERMKRIEEGIKELGSQILKEHPVENTQLQNEKLYLYYLQNGRDMYVDQELDINRLSDYDVDHIVPQSFLKDDSIDNKVLTRSDKARGKSDNVPSEEVVKKMKNYWRQLLNAKLITQRKFDNLTKAERGGLSELDKAGFIKRQLVETRQITKHVAQILDSRMNTKYDENDKLIREVKVITLKSKLVSDFRKDFQFYKVREINNYHHAHDAYLNAVVGTALIKKYPKLESEFVYGDYKVYDVRKMIAKSEQEIGKATAKYFFYSNIMNFFKTEITLANGEIRKRPLIETNGETGEIVWDKGRDFATVRKVLSMPQVNIVKKTEVQTGGFSKESILPKRNSDKLIARKKDWDPKKYGGFDSPTVAYSVLVVAKVEKGKSKKLKSVKELLGITIMERSSFEKNPIDFLEAKGYKEVKKDLIIKLPKYSLFELENGRKRMLASAGELQKGNELALPSKYVNFLYLASHYEKLKGSPEDNEQKQLFVEQHKHYLDEIIEQISEFSKRVILADANLDKVLSAYNKHRDKPIREQAENIIHLFTLTNLGAPAAFKYFDTTIDRKRYTSTKEVLDATLIHQSITGLYETRIDLSQLGGDGGGSSEAAAKGGGGGTLNIEDEYRLHETSKEPDVSLGSTWLSDFPQAWAETGGMGLAVRQAPLIIPLKATSTPVSIKQYPMSQEARLGIKPHIQRLLDQGILVPCQSPWNTPLLPVKKPGTNDYRPVQDLREVNKRVEDIHPTVPNPYNLLSGLPPSHQWYTVLDLKDAFFCLRLHPTSQPLFAFEWRDPEMGISGQLTWTRLPQGFKNSPTLFNEALHRDLAGFRIQHPDLILLQYVDDLLLAATSELDCQQGTRALLQTLGDLGYRASAKKAQICQKQVKYLGYLLKEGQRWLTEARKETVMGQPIPKTPRQLREFLGTAGFCRLWIPGFAEMAAPLYPLTKPGTLFNWGPDQQKAFQEIKQALLTAPALGLPDLTKPFELFVDEKQGYAKGVLTQKLGPWRRPVAYLSKKLDPVAAGWPPCLRMVAAIAVLTKDAGKLTMGQPLVILAPHAVEALVKQPPDRWLSNARMTHYQALLLDTDRVQFGPVVALNPATLLPLPEEGLQHDCLDILAEAHGTRSDLMDQPLPDADHTWYTDGSSFLQEGQRKAGAAVTTETEVIWARALPAGTSAQRAELIALTQALKMAEGKKLNVYTDSRYAFATAHIHGEIYRRRGWLTSEGKEIKNKDEILALLKALFLPKRLSIIHCPGHQKGNSAEARGNRMADQAAREVATRETPETSTLLAGKRTADGSEFEKRTADGSEFESPKKKAKVE

SEQ ID NO: 2290 - protein, 2094 aa, synthetic construct
  source 1..2094: note = Description of Artificial Sequence: Synthetic polypeptide
MPAAKRVKLDGGDKKYSIGLDIGTNSVGWAVITDEYKVPSKKFKVLGNTDRHSIKKNLIGALLFDSGETAEATRLKRTARRRYTRRKNRICYLQEIFSNEMAKVDDSFFHRLEESFLVEEDKKHERHPIFGNIVDEVAYHEKYPTIYHLRKKLVDSTDKADLRLIYLALAHMIKFRGHFLIEGDLNPDNSDVDKLFIQLVQTYNQLFEENPINASGVDAKAILSARLSKSRRLENLIAQLPGEKKNGLFGNLIALSLGLTPNFKSNFDLAEDAKLQLSKDTYDDDLDNLLAQIGDQYADLFLAAKNLSDAILLSDILRVNTEITKAPLSASMIKRYDEHHQDLTLLKALVRQQLPEKYKEIFFDQSKNGYAGYIDGGASQEEFYKFIKPILEKMDGTEELLVKLNREDLLRKQRTFDNGSIPHQIHLGELHAILRRQEDFYPFLKDNREKIEKILTFRIPYYVGPLARGNSRFAWMTRKSEETITPWNFEEVVDKGASAQSFIERMTNFDKNLPNEKVLPKHSLLYEYFTVYNELTKVKYVTEGMRKPAFLSGEQKKAIVDLLFKTNRKVTVKQLKEDYFKKIECFDSVEISGVEDRFNASLGTYHDLLKIIKDKDFLDNEENEDILEDIVLTLTLFEDREMIEERLKTYAHLFDDKVMKQLKRRRYTGWGRLSRKLINGIRDKQSGKTILDFLKSDGFANRNFMQLIHDDSLTFKEDIQKAQVSGQGDSLHEHIANLAGSPAIKKGILQTVKVVDELVKVMGRHKPENIVIEMARENQTTQKGQKNSRERMKRIEEGIKELGSQILKEHPVENTQLQNEKLYLYYLQNGRDMYVDQELDINRLSDYDVDHIVPQSFLKDDSIDNKVLTRSDKARGKSDNVPSEEVVKKMKNYWRQLLNAKLITQRKFDNLTKAERGGLSELDKAGFIKRQLVETRQITKHVAQILDSRMNTKYDENDKLIREVKVITLKSKLVSDFRKDFQFYKVREINNYHHAHDAYLNAVVGTALIKKYPKLESEFVYGDYKVYDVRKMIAKSEQEIGKATAKYFFYSNIMNFFKTEITLANGEIRKRPLIETNGETGEIVWDKGRDFATVRKVLSMPQVNIVKKTEVQTGGFSKESILPKRNSDKLIARKKDWDPKKYGGFDSPTVAYSVLVVAKVEKGKSKKLKSVKELLGITIMERSSFEKNPIDFLEAKGYKEVKKDLIIKLPKYSLFELENGRKRMLASAGELQKGNELALPSKYVNFLYLASHYEKLKGSPEDNEQKQLFVEQHKHYLDEIIEQISEFSKRVILADANLDKVLSAYNKHRDKPIREQAENIIHLFTLTNLGAPAAFKYFDTTIDRKRYTSTKEVLDATLIHQSITGLYETRIDLSQLGGDGGGGGPAPGGSGGTLNIEDEYRLHETSKEPDVSLGSTWLSDFPQAWAETGGMGLAVRQAPLIIPLKATSTPVSIKQYPMSQEARLGIKPHIQRLLDQGILVPCQSPWNTPLLPVKKPGTNDYRPVQDLREVNKRVEDIHPTVPNPYNLLSGLPPSHQWYTVLDLKDAFFCLRLHPTSQPLFAFEWRDPEMGISGQLTWTRLPQGFKNSPTLFNEALHRDLAGFRIQHPDLILLQYVDDLLLAATSELDCQQGTRALLQTLGDLGYRASAKKAQICQKQVKYLGYLLKEGQRWLTEARKETVMGQPIPKTPRQLREFLGTAGFCRLWIPGFAEMAAPLYPLTKPGTLFNWGPDQQKAFQEIKQALLTAPALGLPDLTKPFELFVDEKQGYAKGVLTQKLGPWRRPVAYLSKKLDPVAAGWPPCLRMVAAIAVLTKDAGKLTMGQPLVILAPHAVEALVKQPPDRWLSNARMTHYQALLLDTDRVQFGPVVALNPATLLPLPEEGLQHDCLDILAEAHGTRSDLMDQPLPDADHTWYTDGSSFLQEGQRKAGAAVTTETEVIWARALPAGTSAQRAELIALTQALKMAEGKKLNVYTDSRYAFATAHIHGEIYRRRGWLTSEGKEIKNKDEILALLKALFLPKRLSIIHCPGHQKGNSAEARGNRMADQAAREVATRETPETSTLLAGKRTADGSEFEKRTADGSEFESPKKKAKVE

SEQ ID NO: 2291 - protein, 2097 aa, synthetic construct
  source 1..2097: note = Description of Artificial Sequence: Synthetic polypeptide
MPAAKRVKLDGGDKKYSIGLDIGTNSVGWAVITDEYKVPSKKFKVLGNTDRHSIKKNLIGALLFDSGETAEATRLKRTARRRYTRRKNRICYLQEIFSNEMAKVDDSFFHRLEESFLVEEDKKHERHPIFGNIVDEVAYHEKYPTIYHLRKKLVDSTDKADLRLIYLALAHMIKFRGHFLIEGDLNPDNSDVDKLFIQLVQTYNQLFEENPINASGVDAKAILSARLSKSRRLENLIAQLPGEKKNGLFGNLIALSLGLTPNFKSNFDLAEDAKLQLSKDTYDDDLDNLLAQIGDQYADLFLAAKNLSDAILLSDILRVNTEITKAPLSASMIKRYDEHHQDLTLLKALVRQQLPEKYKEIFFDQSKNGYAGYIDGGASQEEFYKFIKPILEKMDGTEELLVKLNREDLLRKQRTFDNGSIPHQIHLGELHAILRRQEDFYPFLKDNREKIEKILTFRIPYYVGPLARGNSRFAWMTRKSEETITPWNFEEVVDKGASAQSFIERMTNFDKNLPNEKVLPKHSLLYEYFTVYNELTKVKYVTEGMRKPAFLSGEQKKAIVDLLFKTNRKVTVKQLKEDYFKKIECFDSVEISGVEDRFNASLGTYHDLLKIIKDKDFLDNEENEDILEDIVLTLTLFEDREMIEERLKTYAHLFDDKVMKQLKRRRYTGWGRLSRKLINGIRDKQSGKTILDFLKSDGFANRNFMQLIHDDSLTFKEDIQKAQVSGQGDSLHEHIANLAGSPAIKKGILQTVKVVDELVKVMGRHKPENIVIEMARENQTTQKGQKNSRERMKRIEEGIKELGSQILKEHPVENTQLQNEKLYLYYLQNGRDMYVDQELDINRLSDYDVDHIVPQSFLKDDSIDNKVLTRSDKARGKSDNVPSEEVVKKMKNYWRQLLNAKLITQRKFDNLTKAERGGLSELDKAGFIKRQLVETRQITKHVAQILDSRMNTKYDENDKLIREVKVITLKSKLVSDFRKDFQFYKVREINNYHHAHDAYLNAVVGTALIKKYPKLESEFVYGDYKVYDVRKMIAKSEQEIGKATAKYFFYSNIMNFFKTEITLANGEIRKRPLIETNGETGEIVWDKGRDFATVRKVLSMPQVNIVKKTEVQTGGFSKESILPKRNSDKLIARKKDWDPKKYGGFDSPTVAYSVLVVAKVEKGKSKKLKSVKELLGITIMERSSFEKNPIDFLEAKGYKEVKKDLIIKLPKYSLFELENGRKRMLASAGELQKGNELALPSKYVNFLYLASHYEKLKGSPEDNEQKQLFVEQHKHYLDEIIEQISEFSKRVILADANLDKVLSAYNKHRDKPIREQAENIIHLFTLTNLGAPAAFKYFDTTIDRKRYTSTKEVLDATLIHQSITGLYETRIDLSQLGGDGGGSSGSSGSSGSSGGTLNIEDEYRLHETSKEPDVSLGSTWLSDFPQAWAETGGMGLAVRQAPLIIPLKATSTPVSIKQYPMSQEARLGIKPHIQRLLDQGILVPCQSPWNTPLLPVKKPGTNDYRPVQDLREVNKRVEDIHPTVPNPYNLLSGLPPSHQWYTVLDLKDAFFCLRLHPTSQPLFAFEWRDPEMGISGQLTWTRLPQGFKNSPTLFNEALHRDLAGFRIQHPDLILLQYVDDLLLAATSELDCQQGTRALLQTLGDLGYRASAKKAQICQKQVKYLGYLLKEGQRWLTEARKETVMGQPIPKTPRQLREFLGTAGFCRLWIPGFAEMAAPLYPLTKPGTLFNWGPDQQKAFQEIKQALLTAPALGLPDLTKPFELFVDEKQGYAKGVLTQKLGPWRRPVAYLSKKLDPVAAGWPPCLRMVAAIAVLTKDAGKLTMGQPLVILAPHAVEALVKQPPDRWLSNARMTHYQALLLDTDRVQFGPVVALNPATLLPLPEEGLQHDCLDILAEAHGTRSDLMDQPLPDADHTWYTDGSSFLQEGQRKAGAAVTTETEVIWARALPAGTSAQRAELIALTQALKMAEGKKLNVYTDSRYAFATAHIHGEIYRRRGWLTSEGKEIKNKDEILALLKALFLPKRLSIIHCPGHQKGNSAEARGNRMADQAAREVATRETPETSTLLAGKRTADGSEFEKRTADGSEFESPKKKAKVE

SEQ ID NO: 2292 - protein, 2096 aa, synthetic construct
  source 1..2096: note = Description of Artificial Sequence: Synthetic polypeptide
MPAAKRVKLDGGDKKYSIGLDIGTNSVGWAVITDEYKVPSKKFKVLGNTDRHSIKKNLIGALLFDSGETAEATRLKRTARRRYTRRKNRICYLQEIFSNEMAKVDDSFFHRLEESFLVEEDKKHERHPIFGNIVDEVAYHEKYPTIYHLRKKLVDSTDKADLRLIYLALAHMIKFRGHFLIEGDLNPDNSDVDKLFIQLVQTYNQLFEENPINASGVDAKAILSARLSKSRRLENLIAQLPGEKKNGLFGNLIALSLGLTPNFKSNFDLAEDAKLQLSKDTYDDDLDNLLAQIGDQYADLFLAAKNLSDAILLSDILRVNTEITKAPLSASMIKRYDEHHQDLTLLKALVRQQLPEKYKEIFFDQSKNGYAGYIDGGASQEEFYKFIKPILEKMDGTEELLVKLNREDLLRKQRTFDNGSIPHQIHLGELHAILRRQEDFYPFLKDNREKIEKILTFRIPYYVGPLARGNSRFAWMTRKSEETITPWNFEEVVDKGASAQSFIERMTNFDKNLPNEKVLPKHSLLYEYFTVYNELTKVKYVTEGMRKPAFLSGEQKKAIVDLLFKTNRKVTVKQLKEDYFKKIECFDSVEISGVEDRFNASLGTYHDLLKIIKDKDFLDNEENEDILEDIVLTLTLFEDREMIEERLKTYAHLFDDKVMKQLKRRRYTGWGRLSRKLINGIRDKQSGKTILDFLKSDGFANRNFMQLIHDDSLTFKEDIQKAQVSGQGDSLHEHIANLAGSPAIKKGILQTVKVVDELVKVMGRHKPENIVIEMARENQTTQKGQKNSRERMKRIEEGIKELGSQILKEHPVENTQLQNEKLYLYYLQNGRDMYVDQELDINRLSDYDVDHIVPQSFLKDDSIDNKVLTRSDKARGKSDNVPSEEVVKKMKNYWRQLLNAKLITQRKFDNLTKAERGGLSELDKAGFIKRQLVETRQITKHVAQILDSRMNTKYDENDKLIREVKVITLKSKLVSDFRKDFQFYKVREINNYHHAHDAYLNAVVGTALIKKYPKLESEFVYGDYKVYDVRKMIAKSEQEIGKATAKYFFYSNIMNFFKTEITLANGEIRKRPLIETNGETGEIVWDKGRDFATVRKVLSMPQVNIVKKTEVQTGGFSKESILPKRNSDKLIARKKDWDPKKYGGFDSPTVAYSVLVVAKVEKGKSKKLKSVKELLGITIMERSSFEKNPIDFLEAKGYKEVKKDLIIKLPKYSLFELENGRKRMLASAGELQKGNELALPSKYVNFLYLASHYEKLKGSPEDNEQKQLFVEQHKHYLDEIIEQISEFSKRVILADANLDKVLSAYNKHRDKPIREQAENIIHLFTLTNLGAPAAFKYFDTTIDRKRYTSTKEVLDATLIHQSITGLYETRIDLSQLGGDGGGSSGGGEAAAKGGTLNIEDEYRLHETSKEPDVSLGSTWLSDFPQAWAETGGMGLAVRQAPLIIPLKATSTPVSIKQYPMSQEARLGIKPHIQRLLDQGILVPCQSPWNTPLLPVKKPGTNDYRPVQDLREVNKRVEDIHPTVPNPYNLLSGLPPSHQWYTVLDLKDAFFCLRLHPTSQPLFAFEWRDPEMGISGQLTWTRLPQGFKNSPTLFNEALHRDLAGFRIQHPDLILLQYVDDLLLAATSELDCQQGTRALLQTLGDLGYRASAKKAQICQKQVKYLGYLLKEGQRWLTEARKETVMGQPIPKTPRQLREFLGTAGFCRLWIPGFAEMAAPLYPLTKPGTLFNWGPDQQKAFQEIKQALLTAPALGLPDLTKPFELFVDEKQGYAKGVLTQKLGPWRRPVAYLSKKLDPVAAGWPPCLRMVAAIAVLTKDAGKLTMGQPLVILAPHAVEALVKQPPDRWLSNARMTHYQALLLDTDRVQFGPVVALNPATLLPLPEEGLQHDCLDILAEAHGTRSDLMDQPLPDADHTWYTDGSSFLQEGQRKAGAAVTTETEVIWARALPAGTSAQRAELIALTQALKMAEGKKLNVYTDSRYAFATAHIHGEIYRRRGWLTSEGKEIKNKDEILALLKALFLPKRLSIIHCPGHQKGNSAEARGNRMADQAAREVATRETPETSTLLAGKRTADGSEFEKRTADGSEFESPKKKAKVE

SEQ ID NO: 2293 - protein, 2094 aa, synthetic construct
  source 1..2094: note = Description of Artificial Sequence: Synthetic polypeptide
MPAAKRVKLDGGDKKYSIGLDIGTNSVGWAVITDEYKVPSKKFKVLGNTDRHSIKKNLIGALLFDSGETAEATRLKRTARRRYTRRKNRICYLQEIFSNEMAKVDDSFFHRLEESFLVEEDKKHERHPIFGNIVDEVAYHEKYPTIYHLRKKLVDSTDKADLRLIYLALAHMIKFRGHFLIEGDLNPDNSDVDKLFIQLVQTYNQLFEENPINASGVDAKAILSARLSKSRRLENLIAQLPGEKKNGLFGNLIALSLGLTPNFKSNFDLAEDAKLQLSKDTYDDDLDNLLAQIGDQYADLFLAAKNLSDAILLSDILRVNTEITKAPLSASMIKRYDEHHQDLTLLKALVRQQLPEKYKEIFFDQSKNGYAGYIDGGASQEEFYKFIKPILEKMDGTEELLVKLNREDLLRKQRTFDNGSIPHQIHLGELHAILRRQEDFYPFLKDNREKIEKILTFRIPYYVGPLARGNSRFAWMTRKSEETITPWNFEEVVDKGASAQSFIERMTNFDKNLPNEKVLPKHSLLYEYFTVYNELTKVKYVTEGMRKPAFLSGEQKKAIVDLLFKTNRKVTVKQLKEDYFKKIECFDSVEISGVEDRFNASLGTYHDLLKIIKDKDFLDNEENEDILEDIVLTLTLFEDREMIEERLKTYAHLFDDKVMKQLKRRRYTGWGRLSRKLINGIRDKQSGKTILDFLKSDGFANRNFMQLIHDDSLTFKEDIQKAQVSGQGDSLHEHIANLAGSPAIKKGILQTVKVVDELVKVMGRHKPENIVIEMARENQTTQKGQKNSRERMKRIEEGIKELGSQILKEHPVENTQLQNEKLYLYYLQNGRDMYVDQELDINRLSDYDVDHIVPQSFLKDDSIDNKVLTRSDKARGKSDNVPSEEVVKKMKNYWRQLLNAKLITQRKFDNLTKAERGGLSELDKAGFIKRQLVETRQITKHVAQILDSRMNTKYDENDKLIREVKVITLKSKLVSDFRKDFQFYKVREINNYHHAHDAYLNAVVGTALIKKYPKLESEFVYGDYKVYDVRKMIAKSEQEIGKATAKYFFYSNIMNFFKTEITLANGEIRKRPLIETNGETGEIVWDKGRDFATVRKVLSMPQVNIVKKTEVQTGGFSKESILPKRNSDKLIARKKDWDPKKYGGFDSPTVAYSVLVVAKVEKGKSKKLKSVKELLGITIMERSSFEKNPIDFLEAKGYKEVKKDLIIKLPKYSLFELENGRKRMLASAGELQKGNELALPSKYVNFLYLASHYEKLKGSPEDNEQKQLFVEQHKHYLDEIIEQISEFSKRVILADANLDKVLSAYNKHRDKPIREQAENIIHLFTLTNLGAPAAFKYFDTTIDRKRYTSTKEVLDATLIHQSITGLYETRIDLSQLGGDGGGGSGSSGGGGGTLNIEDEYRLHETSKEPDVSLGSTWLSDFPQAWAETGGMGLAVRQAPLIIPLKATSTPVSIKQYPMSQEARLGIKPHIQRLLDQGILVPCQSPWNTPLLPVKKPGTNDYRPVQDLREVNKRVEDIHPTVPNPYNLLSGLPPSHQWYTVLDLKDAFFCLRLHPTSQPLFAFEWRDPEMGISGQLTWTRLPQGFKNSPTLFNEALHRDLAGFRIQHPDLILLQYVDDLLLAATSELDCQQGTRALLQTLGDLGYRASAKKAQICQKQVKYLGYLLKEGQRWLTEARKETVMGQPIPKTPRQLREFLGTAGFCRLWIPGFAEMAAPLYPLTKPGTLFNWGPDQQKAFQEIKQALLTAPALGLPDLTKPFELFVDEKQGYAKGVLTQKLGPWRRPVAYLSKKLDPVAAGWPPCLRMVAAIAVLTKDAGKLTMGQPLVILAPHAVEALVKQPPDRWLSNARMTHYQALLLDTDRVQFGPVVALNPATLLPLPEEGLQHDCLDILAEAHGTRSDLMDQPLPDADHTWYTDGSSFLQEGQRKAGAAVTTETEVIWARALPAGTSAQRAELIALTQALKMAEGKKLNVYTDSRYAFATAHIHGEIYRRRGWLTSEGKEIKNKDEILALLKALFLPKRLSIIHCPGHQKGNSAEARGNRMADQAAREVATRETPETSTLLAGKRTADGSEFEKRTADGSEFESPKKKAKVE

SEQ ID NO: 2294 - protein, 2092 aa, synthetic construct
  source 1..2092: note = Description of Artificial Sequence: Synthetic polypeptide
MPAAKRVKLDGGDKKYSIGLDIGTNSVGWAVITDEYKVPSKKFKVLGNTDRHSIKKNLIGALLFDSGETAEATRLKRTARRRYTRRKNRICYLQEIFSNEMAKVDDSFFHRLEESFLVEEDKKHERHPIFGNIVDEVAYHEKYPTIYHLRKKLVDSTDKADLRLIYLALAHMIKFRGHFLIEGDLNPDNSDVDKLFIQLVQTYNQLFEENPINASGVDAKAILSARLSKSRRLENLIAQLPGEKKNGLFGNLIALSLGLTPNFKSNFDLAEDAKLQLSKDTYDDDLDNLLAQIGDQYADLFLAAKNLSDAILLSDILRVNTEITKAPLSASMIKRYDEHHQDLTLLKALVRQQLPEKYKEIFFDQSKNGYAGYIDGGASQEEFYKFIKPILEKMDGTEELLVKLNREDLLRKQRTFDNGSIPHQIHLGELHAILRRQEDFYPFLKDNREKIEKILTFRIPYYVGPLARGNSRFAWMTRKSEETITPWNFEEVVDKGASAQSFIERMTNFDKNLPNEKVLPKHSLLYEYFTVYNELTKVKYVTEGMRKPAFLSGEQKKAIVDLLFKTNRKVTVKQLKEDYFKKIECFDSVEISGVEDRFNASLGTYHDLLKIIKDKDFLDNEENEDILEDIVLTLTLFEDREMIEERLKTYAHLFDDKVMKQLKRRRYTGWGRLSRKLINGIRDKQSGKTILDFLKSDGFANRNFMQLIHDDSLTFKEDIQKAQVSGQGDSLHEHIANLAGSPAIKKGILQTVKVVDELVKVMGRHKPENIVIEMARENQTTQKGQKNSRERMKRIEEGIKELGSQILKEHPVENTQLQNEKLYLYYLQNGRDMYVDQELDINRLSDYDVDHIVPQSFLKDDSIDNKVLTRSDKARGKSDNVPSEEVVKKMKNYWRQLLNAKLITQRKFDNLTKAERGGLSELDKAGFIKRQLVETRQITKHVAQILDSRMNTKYDENDKLIREVKVITLKSKLVSDFRKDFQFYKVREINNYHHAHDAYLNAVVGTALIKKYPKLESEFVYGDYKVYDVRKMIAKSEQEIGKATAKYFFYSNIMNFFKTEITLANGEIRKRPLIETNGETGEIVWDKGRDFATVRKVLSMPQVNIVKKTEVQTGGFSKESILPKRNSDKLIARKKDWDPKKYGGFDSPTVAYSVLVVAKVEKGKSKKLKSVKELLGITIMERSSFEKNPIDFLEAKGYKEVKKDLIIKLPKYSLFELENGRKRMLASAGELQKGNELALPSKYVNFLYLASHYEKLKGSPEDNEQKQLFVEQHKHYLDEIIEQISEFSKRVILADANLDKVLSAYNKHRDKPIREQAENIIHLFTLTNLGAPAAFKYFDTTIDRKRYTSTKEVLDATLIHQSITGLYETRIDLSQLGGDGGPAPAPAPGGTLNIEDEYRLHETSKEPDVSLGSTWLSDFPQAWAETGGMGLAVRQAPLIIPLKATSTPVSIKQYPMSQEARLGIKPHIQRLLDQGILVPCQSPWNTPLLPVKKPGTNDYRPVQDLREVNKRVEDIHPTVPNPYNLLSGLPPSHQWYTVLDLKDAFFCLRLHPTSQPLFAFEWRDPEMGISGQLTWTRLPQGFKNSPTLFNEALHRDLAGFRIQHPDLILLQYVDDLLLAATSELDCQQGTRALLQTLGDLGYRASAKKAQICQKQVKYLGYLLKEGQRWLTEARKETVMGQPIPKTPRQLREFLGTAGFCRLWIPGFAEMAAPLYPLTKPGTLFNWGPDQQKAFQEIKQALLTAPALGLPDLTKPFELFVDEKQGYAKGVLTQKLGPWRRPVAYLSKKLDPVAAGWPPCLRMVAAIAVLTKDAGKLTMGQPLVILAPHAVEALVKQPPDRWLSNARMTHYQALLLDTDRVQFGPVVALNPATLLPLPEEGLQHDCLDILAEAHGTRSDLMDQPLPDADHTWYTDGSSFLQEGQRKAGAAVTTETEVIWARALPAGTSAQRAELIALTQALKMAEGKKLNVYTDSRYAFATAHIHGEIYRRRGWLTSEGKEIKNKDEILALLKALFLPKRLSIIHCPGHQKGNSAEARGNRMADQAAREVATRETPETSTLLAGKRTADGSEFEKRTADGSEFESPKKKAKVE

SEQ ID NO: 2295 - protein, 2094 aa, synthetic construct
  source 1..2094: note = Description of Artificial Sequence: Synthetic polypeptide
MPAAKRVKLDGGDKKYSIGLDIGTNSVGWAVITDEYKVPSKKFKVLGNTDRHSIKKNLIGALLFDSGETAEATRLKRTARRRYTRRKNRICYLQEIFSNEMAKVDDSFFHRLEESFLVEEDKKHERHPIFGNIVDEVAYHEKYPTIYHLRKKLVDSTDKADLRLIYLALAHMIKFRGHFLIEGDLNPDNSDVDKLFIQLVQTYNQLFEENPINASGVDAKAILSARLSKSRRLENLIAQLPGEKKNGLFGNLIALSLGLTPNFKSNFDLAEDAKLQLSKDTYDDDLDNLLAQIGDQYADLFLAAKNLSDAILLSDILRVNTEITKAPLSASMIKRYDEHHQDLTLLKALVRQQLPEKYKEIFFDQSKNGYAGYIDGGASQEEFYKFIKPILEKMDGTEELLVKLNREDLLRKQRTFDNGSIPHQIHLGELHAILRRQEDFYPFLKDNREKIEKILTFRIPYYVGPLARGNSRFAWMTRKSEETITPWNFEEVVDKGASAQSFIERMTNFDKNLPNEKVLPKHSLLYEYFTVYNELTKVKYVTEGMRKPAFLSGEQKKAIVDLLFKTNRKVTVKQLKEDYFKKIECFDSVEISGVEDRFNASLGTYHDLLKIIKDKDFLDNEENEDILEDIVLTLTLFEDREMIEERLKTYAHLFDDKVMKQLKRRRYTGWGRLSRKLINGIRDKQSGKTILDFLKSDGFANRNFMQLIHDDSLTFKEDIQKAQVSGQGDSLHEHIANLAGSPAIKKGILQTVKVVDELVKVMGRHKPENIVIEMARENQTTQKGQKNSRERMKRIEEGIKELGSQILKEHPVENTQLQNEKLYLYYLQNGRDMYVDQELDINRLSDYDVDHIVPQSFLKDDSIDNKVLTRSDKARGKSDNVPSEEVVKKMKNYWRQLLNAKLITQRKFDNLTKAERGGLSELDKAGFIKRQLVETRQITKHVAQILDSRMNTKYDENDKLIREVKVITLKSKLVSDFRKDFQFYKVREINNYHHAHDAYLNAVVGTALIKKYPKLESEFVYGDYKVYDVRKMIAKSEQEIGKATAKYFFYSNIMNFFKTEITLANGEIRKRPLIETNGETGEIVWDKGRDFATVRKVLSMPQVNIVKKTEVQTGGFSKESILPKRNSDKLIARKKDWDPKKYGGFDSPTVAYSVLVVAKVEKGKSKKLKSVKELLGITIMERSSFEKNPIDFLEAKGYKEVKKDLIIKLPKYSLFELENGRKRMLASAGELQKGNELALPSKYVNFLYLASHYEKLKGSPEDNEQKQLFVEQHKHYLDEIIEQISEFSKRVILADANLDKVLSAYNKHRDKPIREQAENIIHLFTLTNLGAPAAFKYFDTTIDRKRYTSTKEVLDATLIHQSITGLYETRIDLSQLGGDGGPAPAPAPAPGGTLNIEDEYRLHETSKEPDVSLGSTWLSDFPQAWAETGGMGLAVRQAPLIIPLKATSTPVSIKQYPMSQEARLGIKPHIQRLLDQGILVPCQSPWNTPLLPVKKPGTNDYRPVQDLREVNKRVEDIHPTVPNPYNLLSGLPPSHQWYTVLDLKDAFFCLRLHPTSQPLFAFEWRDPEMGISGQLTWTRLPQGFKNSPTLFNEALHRDLAGFRIQHPDLILLQYVDDLLLAATSELDCQQGTRALLQTLGDLGYRASAKKAQICQKQVKYLGYLLKEGQRWLTEARKETVMGQPIPKTPRQLREFLGTAGFCRLWIPGFAEMAAPLYPLTKPGTLFNWGPDQQKAFQEIKQALLTAPALGLPDLTKPFELFVDEKQGYAKGVLTQKLGPWRRPVAYLSKKLDPVAAGWPPCLRMVAAIAVLTKDAGKLTMGQPLVILAPHAVEALVKQPPDRWLSNARMTHYQALLLDTDRVQFGPVVALNPATLLPLPEEGLQHDCLDILAEAHGTRSDLMDQPLPDADHTWYTDGSSFLQEGQRKAGAAVTTETEVIWARALPAGTSAQRAELIALTQALKMAEGKKLNVYTDSRYAFATAHIHGEIYRRRGWLTSEGKEIKNKDEILALLKALFLPKRLSIIHCPGHQKGNSAEARGNRMADQAAREVATRETPETSTLLAGKRTADGSEFEKRTADGSEFESPKKKAKVE

SEQ ID NO: 2296 - protein, 2096 aa, synthetic construct
  source 1..2096: note = Description of Artificial Sequence: Synthetic polypeptide
MPAAKRVKLDGGDKKYSIGLDIGTNSVGWAVITDEYKVPSKKFKVLGNTDRHSIKKNLIGALLFDSGETAEATRLKRTARRRYTRRKNRICYLQEIFSNEMAKVDDSFFHRLEESFLVEEDKKHERHPIFGNIVDEVAYHEKYPTIYHLRKKLVDSTDKADLRLIYLALAHMIKFRGHFLIEGDLNPDNSDVDKLFIQLVQTYNQLFEENPINASGVDAKAILSARLSKSRRLENLIAQLPGEKKNGLFGNLIALSLGLTPNFKSNFDLAEDAKLQLSKDTYDDDLDNLLAQIGDQYADLFLAAKNLSDAILLSDILRVNTEITKAPLSASMIKRYDEHHQDLTLLKALVRQQLPEKYKEIFFDQSKNGYAGYIDGGASQEEFYKFIKPILEKMDGTEELLVKLNREDLLRKQRTFDNGSIPHQIHLGELHAILRRQEDFYPFLKDNREKIEKILTFRIPYYVGPLARGNSRFAWMTRKSEETITPWNFEEVVDKGASAQSFIERMTNFDKNLPNEKVLPKHSLLYEYFTVYNELTKVKYVTEGMRKPAFLSGEQKKAIVDLLFKTNRKVTVKQLKEDYFKKIECFDSVEISGVEDRFNASLGTYHDLLKIIKDKDFLDNEENEDILEDIVLTLTLFEDREMIEERLKTYAHLFDDKVMKQLKRRRYTGWGRLSRKLINGIRDKQSGKTILDFLKSDGFANRNFMQLIHDDSLTFKEDIQKAQVSGQGDSLHEHIANLAGSPAIKKGILQTVKVVDELVKVMGRHKPENIVIEMARENQTTQKGQKNSRERMKRIEEGIKELGSQILKEHPVENTQLQNEKLYLYYLQNGRDMYVDQELDINRLSDYDVDHIVPQSFLKDDSIDNKVLTRSDKARGKSDNVPSEEVVKKMKNYWRQLLNAKLITQRKFDNLTKAERGGLSELDKAGFIKRQLVETRQITKHVAQILDSRMNTKYDENDKLIREVKVITLKSKLVSDFRKDFQFYKVREINNYHHAHDAYLNAVVGTALIKKYPKLESEFVYGDYKVYDVRKMIAKSEQEIGKATAKYFFYSNIMNFFKTEITLANGEIRKRPLIETNGETGEIVWDKGRDFATVRKVLSMPQVNIVKKTEVQTGGFSKESILPKRNSDKLIARKKDWDPKKYGGFDSPTVAYSVLVVAKVEKGKSKKLKSVKELLGITIMERSSFEKNPIDFLEAKGYKEVKKDLIIKLPKYSLFELENGRKRMLASAGELQKGNELALPSKYVNFLYLASHYEKLKGSPEDNEQKQLFVEQHKHYLDEIIEQISEFSKRVILADANLDKVLSAYNKHRDKPIREQAENIIHLFTLTNLGAPAAFKYFDTTIDRKRYTSTKEVLDATLIHQSITGLYETRIDLSQLGGDGGGGSEAAAKGSSGGTLNIEDEYRLHETSKEPDVSLGSTWLSDFPQAWAETGGMGLAVRQAPLIIPLKATSTPVSIKQYPMSQEARLGIKPHIQRLLDQGILVPCQSPWNTPLLPVKKPGTNDYRPVQDLREVNKRVEDIHPTVPNPYNLLSGLPPSHQWYTVLDLKDAFFCLRLHPTSQPLFAFEWRDPEMGISGQLTWTRLPQGFKNSPTLFNEALHRDLAGFRIQHPDLILLQYVDDLLLAATSELDCQQGTRALLQTLGDLGYRASAKKAQICQKQVKYLGYLLKEGQRWLTEARKETVMGQPIPKTPRQLREFLGTAGFCRLWIPGFAEMAAPLYPLTKPGTLFNWGPDQQKAFQEIKQALLTAPALGLPDLTKPFELFVDEKQGYAKGVLTQKLGPWRRPVAYLSKKLDPVAAGWPPCLRMVAAIAVLTKDAGKLTMGQPLVILAPHAVEALVKQPPDRWLSNARMTHYQALLLDTDRVQFGPVVALNPATLLPLPEEGLQHDCLDILAEAHGTRSDLMDQPLPDADHTWYTDGSSFLQEGQRKAGAAVTTETEVIWARALPAGTSAQRAELIALTQALKMAEGKKLNVYTDSRYAFATAHIHGEIYRRRGWLTSEGKEIKNKDEILALLKALFLPKRLSIIHCPGHQKGNSAEARGNRMADQAAREVATRETPETSTLLAGKRTADGSEFEKRTADGSEFESPKKKAKVE

SEQ ID NO: 2297 - protein, 2093 aa, synthetic construct
  source 1..2093: note = Description of Artificial Sequence: Synthetic polypeptide
MPAAKRVKLDGGDKKYSIGLDIGTNSVGWAVITDEYKVPSKKFKVLGNTDRHSIKKNLIGALLFDSGETAEATRLKRTARRRYTRRKNRICYLQEIFSNEMAKVDDSFFHRLEESFLVEEDKKHERHPIFGNIVDEVAYHEKYPTIYHLRKKLVDSTDKADLRLIYLALAHMIKFRGHFLIEGDLNPDNSDVDKLFIQLVQTYNQLFEENPINASGVDAKAILSARLSKSRRLENLIAQLPGEKKNGLFGNLIALSLGLTPNFKSNFDLAEDAKLQLSKDTYDDDLDNLLAQIGDQYADLFLAAKNLSDAILLSDILRVNTEITKAPLSASMIKRYDEHHQDLTLLKALVRQQLPEKYKEIFFDQSKNGYAGYIDGGASQEEFYKFIKPILEKMDGTEELLVKLNREDLLRKQRTFDNGSIPHQIHLGELHAILRRQEDFYPFLKDNREKIEKILTFRIPYYVGPLARGNSRFAWMTRKSEETITPWNFEEVVDKGASAQSFIERMTNFDKNLPNEKVLPKHSLLYEYFTVYNELTKVKYVTEGMRKPAFLSGEQKKAIVDLLFKTNRKVTVKQLKEDYFKKIECFDSVEISGVEDRFNASLGTYHDLLKIIKDKDFLDNEENEDILEDIVLTLTLFEDREMIEERLKTYAHLFDDKVMKQLKRRRYTGWGRLSRKLINGIRDKQSGKTILDFLKSDGFANRNFMQLIHDDSLTFKEDIQKAQVSGQGDSLHEHIANLAGSPAIKKGILQTVKVVDELVKVMGRHKPENIVIEMARENQTTQKGQKNSRERMKRIEEGIKELGSQILKEHPVENTQLQNEKLYLYYLQNGRDMYVDQELDINRLSDYDVDHIVPQSFLKDDSIDNKVLTRSDKARGKSDNVPSEEVVKKMKNYWRQLLNAKLITQRKFDNLTKAERGGLSELDKAGFIKRQLVETRQITKHVAQILDSRMNTKYDENDKLIREVKVITLKSKLVSDFRKDFQFYKVREINNYHHAHDAYLNAVVGTALIKKYPKLESEFVYGDYKVYDVRKMIAKSEQEIGKATAKYFFYSNIMNFFKTEITLANGEIRKRPLIETNGETGEIVWDKGRDFATVRKVLSMPQVNIVKKTEVQTGGFSKESILPKRNSDKLIARKKDWDPKKYGGFDSPTVAYSVLVVAKVEKGKSKKLKSVKELLGITIMERSSFEKNPIDFLEAKGYKEVKKDLIIKLPKYSLFELENGRKRMLASAGELQKGNELALPSKYVNFLYLASHYEKLKGSPEDNEQKQLFVEQHKHYLDEIIEQISEFSKRVILADANLDKVLSAYNKHRDKPIREQAENIIHLFTLTNLGAPAAFKYFDTTIDRKRYTSTKEVLDATLIHQSITGLYETRIDLSQLGGDGGEAAAKGSSGGTLNIEDEYRLHETSKEPDVSLGSTWLSDFPQAWAETGGMGLAVRQAPLIIPLKATSTPVSIKQYPMSQEARLGIKPHIQRLLDQGILVPCQSPWNTPLLPVKKPGTNDYRPVQDLREVNKRVEDIHPTVPNPYNLLSGLPPSHQWYTVLDLKDAFFCLRLHPTSQPLFAFEWRDPEMGISGQLTWTRLPQGFKNSPTLFNEALHRDLAGFRIQHPDLILLQYVDDLLLAATSELDCQQGTRALLQTLGDLGYRASAKKAQICQKQVKYLGYLLKEGQRWLTEARKETVMGQPIPKTPRQLREFLGTAGFCRLWIPGFAEMAAPLYPLTKPGTLFNWGPDQQKAFQEIKQALLTAPALGLPDLTKPFELFVDEKQGYAKGVLTQKLGPWRRPVAYLSKKLDPVAAGWPPCLRMVAAIAVLTKDAGKLTMGQPLVILAPHAVEALVKQPPDRWLSNARMTHYQALLLDTDRVQFGPVVALNPATLLPLPEEGLQHDCLDILAEAHGTRSDLMDQPLPDADHTWYTDGSSFLQEGQRKAGAAVTTETEVIWARALPAGTSAQRAELIALTQALKMAEGKKLNVYTDSRYAFATAHIHGEIYRRRGWLTSEGKEIKNKDEILALLKALFLPKRLSIIHCPGHQKGNSAEARGNRMADQAAREVATRETPETSTLLAGKRTADGSEFEKRTADGSEFESPKKKAKVE

SEQ ID NO: 2298 - protein, 2091 aa, synthetic construct
  source 1..2091: note = Description of Artificial Sequence: Synthetic polypeptide
MPAAKRVKLDGGDKKYSIGLDIGTNSVGWAVITDEYKVPSKKFKVLGNTDRHSIKKNLIGALLFDSGETAEATRLKRTARRRYTRRKNRICYLQEIFSNEMAKVDDSFFHRLEESFLVEEDKKHERHPIFGNIVDEVAYHEKYPTIYHLRKKLVDSTDKADLRLIYLALAHMIKFRGHFLIEGDLNPDNSDVDKLFIQLVQTYNQLFEENPINASGVDAKAILSARLSKSRRLENLIAQLPGEKKNGLFGNLIALSLGLTPNFKSNFDLAEDAKLQLSKDTYDDDLDNLLAQIGDQYADLFLAAKNLSDAILLSDILRVNTEITKAPLSASMIKRYDEHHQDLTLLKALVRQQLPEKYKEIFFDQSKNGYAGYIDGGASQEEFYKFIKPILEKMDGTEELLVKLNREDLLRKQRTFDNGSIPHQIHLGELHAILRRQEDFYPFLKDNREKIEKILTFRIPYYVGPLARGNSRFAWMTRKSEETITPWNFEEVVDKGASAQSFIERMTNFDKNLPNEKVLPKHSLLYEYFTVYNELTKVKYVTEGMRKPAFLSGEQKKAIVDLLFKTNRKVTVKQLKEDYFKKIECFDSVEISGVEDRFNASLGTYHDLLKIIKDKDFLDNEENEDILEDIVLTLTLFEDREMIEERLKTYAHLFDDKVMKQLKRRRYTGWGRLSRKLINGIRDKQSGKTILDFLKSDGFANRNFMQLIHDDSLTFKEDIQKAQVSGQGDSLHEHIANLAGSPAIKKGILQTVKVVDELVKVMGRHKPENIVIEMARENQTTQKGQKNSRERMKRIEEGIKELGSQILKEHPVENTQLQNEKLYLYYLQNGRDMYVDQELDINRLSDYDVDHIVPQSFLKDDSIDNKVLTRSDKARGKSDNVPSEEVVKKMKNYWRQLLNAKLITQRKFDNLTKAERGGLSELDKAGFIKRQLVETRQITKHVAQILDSRMNTKYDENDKLIREVKVITLKSKLVSDFRKDFQFYKVREINNYHHAHDAYLNAVVGTALIKKYPKLESEFVYGDYKVYDVRKMIAKSEQEIGKATAKYFFYSNIMNFFKTEITLANGEIRKRPLIETNGETGEIVWDKGRDFATVRKVLSMPQVNIVKKTEVQTGGFSKESILPKRNSDKLIARKKDWDPKKYGGFDSPTVAYSVLVVAKVEKGKSKKLKSVKELLGITIMERSSFEKNPIDFLEAKGYKEVKKDLIIKLPKYSLFELENGRKRMLASAGELQKGNELALPSKYVNFLYLASHYEKLKGSPEDNEQKQLFVEQHKHYLDEIIEQISEFSKRVILADANLDKVLSAYNKHRDKPIREQAENIIHLFTLTNLGAPAAFKYFDTTIDRKRYTSTKEVLDATLIHQSITGLYETRIDLSQLGGDGGPAPGGGGGTLNIEDEYRLHETSKEPDVSLGSTWLSDFPQAWAETGGMGLAVRQAPLIIPLKATSTPVSIKQYPMSQEARLGIKPHIQRLLDQGILVPCQSPWNTPLLPVKKPGTNDYRPVQDLREVNKRVEDIHPTVPNPYNLLSGLPPSHQWYTVLDLKDAFFCLRLHPTSQPLFAFEWRDPEMGISGQLTWTRLPQGFKNSPTLFNEALHRDLAGFRIQHPDLILLQYVDDLLLAATSELDCQQGTRALLQTLGDLGYRASAKKAQICQKQVKYLGYLLKEGQRWLTEARKETVMGQPIPKTPRQLREFLGTAGFCRLWIPGFAEMAAPLYPLTKPGTLFNWGPDQQKAFQEIKQALLTAPALGLPDLTKPFELFVDEKQGYAKGVLTQKLGPWRRPVAYLSKKLDPVAAGWPPCLRMVAAIAVLTKDAGKLTMGQPLVILAPHAVEALVKQPPDRWLSNARMTHYQALLLDTDRVQFGPVVALNPATLLPLPEEGLQHDCLDILAEAHGTRSDLMDQPLPDADHTWYTDGSSFLQEGQRKAGAAVTTETEVIWARALPAGTSAQRAELIALTQALKMAEGKKLNVYTDSRYAFATAHIHGEIYRRRGWLTSEGKEIKNKDEILALLKALFLPKRLSIIHCPGHQKGNSAEARGNRMADQAAREVATRETPETSTLLAGKRTADGSEFEKRTADGSEFESPKKKAKVE

SEQ ID NO: 2299 - protein, 2088 aa, synthetic construct
  source 1..2088: note = Description of Artificial Sequence: Synthetic polypeptide
MPAAKRVKLDGGDKKYSIGLDIGTNSVGWAVITDEYKVPSKKFKVLGNTDRHSIKKNLIGALLFDSGETAEATRLKRTARRRYTRRKNRICYLQEIFSNEMAKVDDSFFHRLEESFLVEEDKKHERHPIFGNIVDEVAYHEKYPTIYHLRKKLVDSTDKADLRLIYLALAHMIKFRGHFLIEGDLNPDNSDVDKLFIQLVQTYNQLFEENPINASGVDAKAILSARLSKSRRLENLIAQLPGEKKNGLFGNLIALSLGLTPNFKSNFDLAEDAKLQLSKDTYDDDLDNLLAQIGDQYADLFLAAKNLSDAILLSDILRVNTEITKAPLSASMIKRYDEHHQDLTLLKALVRQQLPEKYKEIFFDQSKNGYAGYIDGGASQEEFYKFIKPILEKMDGTEELLVKLNREDLLRKQRTFDNGSIPHQIHLGELHAILRRQEDFYPFLKDNREKIEKILTFRIPYYVGPLARGNSRFAWMTRKSEETITPWNFEEVVDKGASAQSFIERMTNFDKNLPNEKVLPKHSLLYEYFTVYNELTKVKYVTEGMRKPAFLSGEQKKAIVDLLFKTNRKVTVKQLKEDYFKKIECFDSVEISGVEDRFNASLGTYHDLLKIIKDKDFLDNEENEDILEDIVLTLTLFEDREMIEERLKTYAHLFDDKVMKQLKRRRYTGWGRLSRKLINGIRDKQSGKTILDFLKSDGFANRNFMQLIHDDSLTFKEDIQKAQVSGQGDSLHEHIANLAGSPAIKKGILQTVKVVDELVKVMGRHKPENIVIEMARENQTTQKGQKNSRERMKRIEEGIKELGSQILKEHPVENTQLQNEKLYLYYLQNGRDMYVDQELDINRLSDYDVDHIVPQSFLKDDSIDNKVLTRSDKARGKSDNVPSEEVVKKMKNYWRQLLNAKLITQRKFDNLTKAERGGLSELDKAGFIKRQLVETRQITKHVAQILDSRMNTKYDENDKLIREVKVITLKSKLVSDFRKDFQFYKVREINNYHHAHDAYLNAVVGTALIKKYPKLESEFVYGDYKVYDVRKMIAKSEQEIGKATAKYFFYSNIMNFFKTEITLANGEIRKRPLIETNGETGEIVWDKGRDFATVRKVLSMPQVNIVKKTEVQTGGFSKESILPKRNSDKLIARKKDWDPKKYGGFDSPTVAYSVLVVAKVEKGKSKKLKSVKELLGITIMERSSFEKNPIDFLEAKGYKEVKKDLIIKLPKYSLFELENGRKRMLASAGELQKGNELALPSKYVNFLYLASHYEKLKGSPEDNEQKQLFVEQHKHYLDEIIEQISEFSKRVILADANLDKVLSAYNKHRDKPIREQAENIIHLFTLTNLGAPAAFKYFDTTIDRKRYTSTKEVLDATLIHQSITGLYETRIDLSQLGGDGGPAPGGTLNIEDEYRLHETSKEPDVSLGSTWLSDFPQAWAETGGMGLAVRQAPLIIPLKATSTPVSIKQYPMSQEARLGIKPHIQRLLDQGILVPCQSPWNTPLLPVKKPGTNDYRPVQDLREVNKRVEDIHPTVPNPYNLLSGLPPSHQWYTVLDLKDAFFCLRLHPTSQPLFAFEWRDPEMGISGQLTWTRLPQGFKNSPTLFNEALHRDLAGFRIQHPDLILLQYVDDLLLAATSELDCQQGTRALLQTLGDLGYRASAKKAQICQKQVKYLGYLLKEGQRWLTEARKETVMGQPIPKTPRQLREFLGKAGFCRLFIPGFAEMAAPLYPLTKPGTLFNWGPDQQKAFQEIKQALLTAPALGLPDLTKPFELFVDEKQGYAKGVLTQKLGPWRRPVAYLSKKLDPVAAGWPPCLRMVAAIAVLTKDAGKLTMGQPLVILAPHAVEALVKQPPDRWLSNARMTHYQALLLDTDRVQFGPVVALNPATLLPLPEEGLQHDCLDILAEAHGTRSDLMDQPLPDADHTWYTDGSSFLQEGQRKAGAAVTTETEVIWARALPAGTSAQRAELIALTQALKMAEGKKLNVYTDSRYAFATAHIHGEIYRRRGWLTSEGKEIKNKDEILALLKALFLPKRLSIIHCPGHQKGNSAEARGNRMADQAAREVATRETPETSTLLAGKRTADGSEFEKRTADGSEFESPKKKAKVE

SEQ ID NO: 2300 - protein, 2103 aa, synthetic construct
  source 1..2103: note = Description of Artificial Sequence: Synthetic polypeptide
MPAAKRVKLDGGDKKYSIGLDIGTNSVGWAVITDEYKVPSKKFKVLGNTDRHSIKKNLIGALLFDSGETAEATRLKRTARRRYTRRKNRICYLQEIFSNEMAKVDDSFFHRLEESFLVEEDKKHERHPIFGNIVDEVAYHEKYPTIYHLRKKLVDSTDKADLRLIYLALAHMIKFRGHFLIEGDLNPDNSDVDKLFIQLVQTYNQLFEENPINASGVDAKAILSARLSKSRRLENLIAQLPGEKKNGLFGNLIALSLGLTPNFKSNFDLAEDAKLQLSKDTYDDDLDNLLAQIGDQYADLFLAAKNLSDAILLSDILRVNTEITKAPLSASMIKRYDEHHQDLTLLKALVRQQLPEKYKEIFFDQSKNGYAGYIDGGASQEEFYKFIKPILEKMDGTEELLVKLNREDLLRKQRTFDNGSIPHQIHLGELHAILRRQEDFYPFLKDNREKIEKILTFRIPYYVGPLARGNSRFAWMTRKSEETITPWNFEEVVDKGASAQSFIERMTNFDKNLPNEKVLPKHSLLYEYFTVYNELTKVKYVTEGMRKPAFLSGEQKKAIVDLLFKTNRKVTVKQLKEDYFKKIECFDSVEISGVEDRFNASLGTYHDLLKIIKDKDFLDNEENEDILEDIVLTLTLFEDREMIEERLKTYAHLFDDKVMKQLKRRRYTGWGRLSRKLINGIRDKQSGKTILDFLKSDGFANRNFMQLIHDDSLTFKEDIQKAQVSGQGDSLHEHIANLAGSPAIKKGILQTVKVVDELVKVMGRHKPENIVIEMARENQTTQKGQKNSRERMKRIEEGIKELGSQILKEHPVENTQLQNEKLYLYYLQNGRDMYVDQELDINRLSDYDVDHIVPQSFLKDDSIDNKVLTRSDKARGKSDNVPSEEVVKKMKNYWRQLLNAKLITQRKFDNLTKAERGGLSELDKAGFIKRQLVETRQITKHVAQILDSRMNTKYDENDKLIREVKVITLKSKLVSDFRKDFQFYKVREINNYHHAHDAYLNAVVGTALIKKYPKLESEFVYGDYKVYDVRKMIAKSEQEIGKATAKYFFYSNIMNFFKTEITLANGEIRKRPLIETNGETGEIVWDKGRDFATVRKVLSMPQVNIVKKTEVQTGGFSKESILPKRNSDKLIARKKDWDPKKYGGFDSPTVAYSVLVVAKVEKGKSKKLKSVKELLGITIMERSSFEKNPIDFLEAKGYKEVKKDLIIKLPKYSLFELENGRKRMLASAGELQKGNELALPSKYVNFLYLASHYEKLKGSPEDNEQKQLFVEQHKHYLDEIIEQISEFSKRVILADANLDKVLSAYNKHRDKPIREQAENIIHLFTLTNLGAPAAFKYFDTTIDRKRYTSTKEVLDATLIHQSITGLYETRIDLSQLGGDGGGGSGGSGGSGGSGGSGGSGGTLNIEDEYRLHETSKEPDVSLGSTWLSDFPQAWAETGGMGLAVRQAPLIIPLKATSTPVSIKQYPMSQEARLGIKPHIQRLLDQGILVPCQSPWNTPLLPVKKPGTNDYRPVQDLREVNKRVEDIHPTVPNPYNLLSGLPPSHQWYTVLDLKDAFFCLRLHPTSQPLFAFEWRDPEMGISGQLTWTRLPQGFKNSPTLFNEALHRDLAGFRIQHPDLILLQYVDDLLLAATSELDCQQGTRALLQTLGDLGYRASAKKAQICQKQVKYLGYLLKEGQRWLTEARKETVMGQPIPKTPRQLREFLGKAGFCRLFIPGFAEMAAPLYPLTKPGTLFNWGPDQQKAFQEIKQALLTAPALGLPDLTKPFELFVDEKQGYAKGVLTQKLGPWRRPVAYLSKKLDPVAAGWPPCLRMVAAIAVLTKDAGKLTMGQPLVILAPHAVEALVKQPPDRWLSNARMTHYQALLLDTDRVQFGPVVALNPATLLPLPEEGLQHDCLDILAEAHGTRSDLMDQPLPDADHTWYTDGSSFLQEGQRKAGAAVTTETEVIWARALPAGTSAQRAELIALTQALKMAEGKKLNVYTDSRYAFATAHIHGEIYRRRGWLTSEGKEIKNKDEILALLKALFLPKRLSIIHCPGHQKGNSAEARGNRMADQAAREVATRETPETSTLLAGKRTADGSEFEKRTADGSEFESPKKKAKVE

SEQ ID NO: 2301 - protein, 2096 aa, synthetic construct
  source 1..2096: note = Description of Artificial Sequence: Synthetic polypeptide
MPAAKRVKLDGGDKKYSIGLDIGTNSVGWAVITDEYKVPSKKFKVLGNTDRHSIKKNLIGALLFDSGETAEATRLKRTARRRYTRRKNRICYLQEIFSNEMAKVDDSFFHRLEESFLVEEDKKHERHPIFGNIVDEVAYHEKYPTIYHLRKKLVDSTDKADLRLIYLALAHMIKFRGHFLIEGDLNPDNSDVDKLFIQLVQTYNQLFEENPINASGVDAKAILSARLSKSRRLENLIAQLPGEKKNGLFGNLIALSLGLTPNFKSNFDLAEDAKLQLSKDTYDDDLDNLLAQIGDQYADLFLAAKNLSDAILLSDILRVNTEITKAPLSASMIKRYDEHHQDLTLLKALVRQQLPEKYKEIFFDQSKNGYAGYIDGGASQEEFYKFIKPILEKMDGTEELLVKLNREDLLRKQRTFDNGSIPHQIHLGELHAILRRQEDFYPFLKDNREKIEKILTFRIPYYVGPLARGNSRFAWMTRKSEETITPWNFEEVVDKGASAQSFIERMTNFDKNLPNEKVLPKHSLLYEYFTVYNELTKVKYVTEGMRKPAFLSGEQKKAIVDLLFKTNRKVTVKQLKEDYFKKIECFDSVEISGVEDRFNASLGTYHDLLKIIKDKDFLDNEENEDILEDIVLTLTLFEDREMIEERLKTYAHLFDDKVMKQLKRRRYTGWGRLSRKLINGIRDKQSGKTILDFLKSDGFANRNFMQLIHDDSLTFKEDIQKAQVSGQGDSLHEHIANLAGSPAIKKGILQTVKVVDELVKVMGRHKPENIVIEMARENQTTQKGQKNSRERMKRIEEGIKELGSQILKEHPVENTQLQNEKLYLYYLQNGRDMYVDQELDINRLSDYDVDHIVPQSFLKDDSIDNKVLTRSDKARGKSDNVPSEEVVKKMKNYWRQLLNAKLITQRKFDNLTKAERGGLSELDKAGFIKRQLVETRQITKHVAQILDSRMNTKYDENDKLIREVKVITLKSKLVSDFRKDFQFYKVREINNYHHAHDAYLNAVVGTALIKKYPKLESEFVYGDYKVYDVRKMIAKSEQEIGKATAKYFFYSNIMNFFKTEITLANGEIRKRPLIETNGETGEIVWDKGRDFATVRKVLSMPQVNIVKKTEVQTGGFSKESILPKRNSDKLIARKKDWDPKKYGGFDSPTVAYSVLVVAKVEKGKSKKLKSVKELLGITIMERSSFEKNPIDFLEAKGYKEVKKDLIIKLPKYSLFELENGRKRMLASAGELQKGNELALPSKYVNFLYLASHYEKLKGSPEDNEQKQLFVEQHKHYLDEIIEQISEFSKRVILADANLDKVLSAYNKHRDKPIREQAENIIHLFTLTNLGAPAAFKYFDTTIDRKRYTSTKEVLDATLIHQSITGLYETRIDLSQLGGDGGPAPAPAPAPAPGGTLNIEDEYRLHETSKEPDVSLGSTWLSDFPQAWAETGGMGLAVRQAPLIIPLKATSTPVSIKQYPMSQEARLGIKPHIQRLLDQGILVPCQSPWNTPLLPVKKPGTNDYRPVQDLREVNKRVEDIHPTVPNPYNLLSGLPPSHQWYTVLDLKDAFFCLRLHPTSQPLFAFEWRDPEMGISGQLTWTRLPQGFKNSPTLFNEALHRDLAGFRIQHPDLILLQYVDDLLLAATSELDCQQGTRALLQTLGDLGYRASAKKAQICQKQVKYLGYLLKEGQRWLTEARKETVMGQPIPKTPRQLREFLGKAGFCRLFIPGFAEMAAPLYPLTKPGTLFNWGPDQQKAFQEIKQALLTAPALGLPDLTKPFELFVDEKQGYAKGVLTQKLGPWRRPVAYLSKKLDPVAAGWPPCLRMVAAIAVLTKDAGKLTMGQPLVILAPHAVEALVKQPPDRWLSNARMTHYQALLLDTDRVQFGPVVALNPATLLPLPEEGLQHDCLDILAEAHGTRSDLMDQPLPDADHTWYTDGSSFLQEGQRKAGAAVTTETEVIWARALPAGTSAQRAELIALTQALKMAEGKKLNVYTDSRYAFATAHIHGEIYRRRGWLTSEGKEIKNKDEILALLKALFLPKRLSIIHCPGHQKGNSAEARGNRMADQAAREVATRETPETSTLLAGKRTADGSEFEKRTADGSEFESPKKKAKVE

SEQ ID NO: 2302 - protein, 2091 aa, synthetic construct
  source 1..2091: note = Description of Artificial Sequence: Synthetic polypeptide
MPAAKRVKLDGGDKKYSIGLDIGTNSVGWAVITDEYKVPSKKFKVLGNTDRHSIKKNLIGALLFDSGETAEATRLKRTARRRYTRRKNRICYLQEIFSNEMAKVDDSFFHRLEESFLVEEDKKHERHPIFGNIVDEVAYHEKYPTIYHLRKKLVDSTDKADLRLIYLALAHMIKFRGHFLIEGDLNPDNSDVDKLFIQLVQTYNQLFEENPINASGVDAKAILSARLSKSRRLENLIAQLPGEKKNGLFGNLIALSLGLTPNFKSNFDLAEDAKLQLSKDTYDDDLDNLLAQIGDQYADLFLAAKNLSDAILLSDILRVNTEITKAPLSASMIKRYDEHHQDLTLLKALVRQQLPEKYKEIFFDQSKNGYAGYIDGGASQEEFYKFIKPILEKMDGTEELLVKLNREDLLRKQRTFDNGSIPHQIHLGELHAILRRQEDFYPFLKDNREKIEKILTFRIPYYVGPLARGNSRFAWMTRKSEETITPWNFEEVVDKGASAQSFIERMTNFDKNLPNEKVLPKHSLLYEYFTVYNELTKVKYVTEGMRKPAFLSGEQKKAIVDLLFKTNRKVTVKQLKEDYFKKIECFDSVEISGVEDRFNASLGTYHDLLKIIKDKDFLDNEENEDILEDIVLTLTLFEDREMIEERLKTYAHLFDDKVMKQLKRRRYTGWGRLSRKLINGIRDKQSGKTILDFLKSDGFANRNFMQLIHDDSLTFKEDIQKAQVSGQGDSLHEHIANLAGSPAIKKGILQTVKVVDELVKVMGRHKPENIVIEMARENQTTQKGQKNSRERMKRIEEGIKELGSQILKEHPVENTQLQNEKLYLYYLQNGRDMYVDQELDINRLSDYDVDHIVPQSFLKDDSIDNKVLTRSDKARGKSDNVPSEEVVKKMKNYWRQLLNAKLITQRKFDNLTKAERGGLSELDKAGFIKRQLVETRQITKHVAQILDSRMNTKYDENDKLIREVKVITLKSKLVSDFRKDFQFYKVREINNYHHAHDAYLNAVVGTALIKKYPKLESEFVYGDYKVYDVRKMIAKSEQEIGKATAKYFFYSNIMNFFKTEITLANGEIRKRPLIETNGETGEIVWDKGRDFATVRKVLSMPQVNIVKKTEVQTGGFSKESILPKRNSDKLIARKKDWDPKKYGGFDSPTVAYSVLVVAKVEKGKSKKLKSVKELLGITIMERSSFEKNPIDFLEAKGYKEVKKDLIIKLPKYSLFELENGRKRMLASAGELQKGNELALPSKYVNFLYLASHYEKLKGSPEDNEQKQLFVEQHKHYLDEIIEQISEFSKRVILADANLDKVLSAYNKHRDKPIREQAENIIHLFTLTNLGAPAAFKYFDTTIDRKRYTSTKEVLDATLIHQSITGLYETRIDLSQLGGDGGGGGPAPGGTLNIEDEYRLHETSKEPDVSLGSTWLSDFPQAWAETGGMGLAVRQAPLIIPLKATSTPVSIKQYPMSQEARLGIKPHIQRLLDQGILVPCQSPWNTPLLPVKKPGTNDYRPVQDLREVNKRVEDIHPTVPNPYNLLSGLPPSHQWYTVLDLKDAFFCLRLHPTSQPLFAFEWRDPEMGISGQLTWTRLPQGFKNSPTLFNEALHRDLAGFRIQHPDLILLQYVDDLLLAATSELDCQQGTRALLQTLGDLGYRASAKKAQICQKQVKYLGYLLKEGQRWLTEARKETVMGQPIPKTPRQLREFLGKAGFCRLFIPGFAEMAAPLYPLTKPGTLFNWGPDQQKAFQEIKQALLTAPALGLPDLTKPFELFVDEKQGYAKGVLTQKLGPWRRPVAYLSKKLDPVAAGWPPCLRMVAAIAVLTKDAGKLTMGQPLVILAPHAVEALVKQPPDRWLSNARMTHYQALLLDTDRVQFGPVVALNPATLLPLPEEGLQHDCLDILAEAHGTRSDLMDQPLPDADHTWYTDGSSFLQEGQRKAGAAVTTETEVIWARALPAGTSAQRAELIALTQALKMAEGKKLNVYTDSRYAFATAHIHGEIYRRRGWLTSEGKEIKNKDEILALLKALFLPKRLSIIHCPGHQKGNSAEARGNRMADQAAREVATRETPETSTLLAGKRTADGSEFEKRTADGSEFESPKKKAKVE

SEQ ID NO: 2303 - protein, 2115 aa, synthetic construct
  source 1..2115: note = Description of Artificial Sequence: Synthetic polypeptide
MPAAKRVKLDGGDKKYSIGLDIGTNSVGWAVITDEYKVPSKKFKVLGNTDRHSIKKNLIGALLFDSGETAEATRLKRTARRRYTRRKNRICYLQEIFSNEMAKVDDSFFHRLEESFLVEEDKKHERHPIFGNIVDEVAYHEKYPTIYHLRKKLVDSTDKADLRLIYLALAHMIKFRGHFLIEGDLNPDNSDVDKLFIQLVQTYNQLFEENPINASGVDAKAILSARLSKSRRLENLIAQLPGEKKNGLFGNLIALSLGLTPNFKSNFDLAEDAKLQLSKDTYDDDLDNLLAQIGDQYADLFLAAKNLSDAILLSDILRVNTEITKAPLSASMIKRYDEHHQDLTLLKALVRQQLPEKYKEIFFDQSKNGYAGYIDGGASQEEFYKFIKPILEKMDGTEELLVKLNREDLLRKQRTFDNGSIPHQIHLGELHAILRRQEDFYPFLKDNREKIEKILTFRIPYYVGPLARGNSRFAWMTRKSEETITPWNFEEVVDKGASAQSFIERMTNFDKNLPNEKVLPKHSLLYEYFTVYNELTKVKYVTEGMRKPAFLSGEQKKAIVDLLFKTNRKVTVKQLKEDYFKKIECFDSVEISGVEDRFNASLGTYHDLLKIIKDKDFLDNEENEDILEDIVLTLTLFEDREMIEERLKTYAHLFDDKVMKQLKRRRYTGWGRLSRKLINGIRDKQSGKTILDFLKSDGFANRNFMQLIHDDSLTFKEDIQKAQVSGQGDSLHEHIANLAGSPAIKKGILQTVKVVDELVKVMGRHKPENIVIEMARENQTTQKGQKNSRERMKRIEEGIKELGSQILKEHPVENTQLQNEKLYLYYLQNGRDMYVDQELDINRLSDYDVDHIVPQSFLKDDSIDNKVLTRSDKARGKSDNVPSEEVVKKMKNYWRQLLNAKLITQRKFDNLTKAERGGLSELDKAGFIKRQLVETRQITKHVAQILDSRMNTKYDENDKLIREVKVITLKSKLVSDFRKDFQFYKVREINNYHHAHDAYLNAVVGTALIKKYPKLESEFVYGDYKVYDVRKMIAKSEQEIGKATAKYFFYSNIMNFFKTEITLANGEIRKRPLIETNGETGEIVWDKGRDFATVRKVLSMPQVNIVKKTEVQTGGFSKESILPKRNSDKLIARKKDWDPKKYGGFDSPTVAYSVLVVAKVEKGKSKKLKSVKELLGITIMERSSFEKNPIDFLEAKGYKEVKKDLIIKLPKYSLFELENGRKRMLASAGELQKGNELALPSKYVNFLYLASHYEKLKGSPEDNEQKQLFVEQHKHYLDEIIEQISEFSKRVILADANLDKVLSAYNKHRDKPIREQAENIIHLFTLTNLGAPAAFKYFDTTIDRKRYTSTKEVLDATLIHQSITGLYETRIDLSQLGGDGGGGGGSGGGGSGGGGSGGGGSGGGGSGGGGSGGTLNIEDEYRLHETSKEPDVSLGSTWLSDFPQAWAETGGMGLAVRQAPLIIPLKATSTPVSIKQYPMSQEARLGIKPHIQRLLDQGILVPCQSPWNTPLLPVKKPGTNDYRPVQDLREVNKRVEDIHPTVPNPYNLLSGLPPSHQWYTVLDLKDAFFCLRLHPTSQPLFAFEWRDPEMGISGQLTWTRLPQGFKNSPTLFNEALHRDLAGFRIQHPDLILLQYVDDLLLAATSELDCQQGTRALLQTLGDLGYRASAKKAQICQKQVKYLGYLLKEGQRWLTEARKETVMGQPIPKTPRQLREFLGKAGFCRLFIPGFAEMAAPLYPLTKPGTLFNWGPDQQKAFQEIKQALLTAPALGLPDLTKPFELFVDEKQGYAKGVLTQKLGPWRRPVAYLSKKLDPVAAGWPPCLRMVAAIAVLTKDAGKLTMGQPLVILAPHAVEALVKQPPDRWLSNARMTHYQALLLDTDRVQFGPVVALNPATLLPLPEEGLQHDCLDILAEAHGTRSDLMDQPLPDADHTWYTDGSSFLQEGQRKAGAAVTTETEVIWARALPAGTSAQRAELIALTQALKMAEGKKLNVYTDSRYAFATAHIHGEIYRRRGWLTSEGKEIKNKDEILALLKALFLPKRLSIIHCPGHQKGNSAEARGNRMADQAAREVATRETPETSTLLAGKRTADGSEFEKRTADGSEFESPKKKAKVE

SEQ ID NO: 2304 - protein, 2103 aa, synthetic construct
  source 1..2103: note = Description of Artificial Sequence: Synthetic polypeptide
MPAAKRVKLDGGDKKYSIGLDIGTNSVGWAVITDEYKVPSKKFKVLGNTDRHSIKKNLIGALLFDSGETAEATRLKRTARRRYTRRKNRICYLQEIFSNEMAKVDDSFFHRLEESFLVEEDKKHERHPIFGNIVDEVAYHEKYPTIYHLRKKLVDSTDKADLRLIYLALAHMIKFRGHFLIEGDLNPDNSDVDKLFIQLVQTYNQLFEENPINASGVDAKAILSARLSKSRRLENLIAQLPGEKKNGLFGNLIALSLGLTPNFKSNFDLAEDAKLQLSKDTYDDDLDNLLAQIGDQYADLFLAAKNLSDAILLSDILRVNTEITKAPLSASMIKRYDEHHQDLTLLKALVRQQLPEKYKEIFFDQSKNGYAGYIDGGASQEEFYKFIKPILEKMDGTEELLVKLNREDLLRKQRTFDNGSIPHQIHLGELHAILRRQEDFYPFLKDNREKIEKILTFRIPYYVGPLARGNSRFAWMTRKSEETITPWNFEEVVDKGASAQSFIERMTNFDKNLPNEKVLPKHSLLYEYFTVYNELTKVKYVTEGMRKPAFLSGEQKKAIVDLLFKTNRKVTVKQLKEDYFKKIECFDSVEISGVEDRFNASLGTYHDLLKIIKDKDFLDNEENEDILEDIVLTLTLFEDREMIEERLKTYAHLFDDKVMKQLKRRRYTGWGRLSRKLINGIRDKQSGKTILDFLKSDGFANRNFMQLIHDDSLTFKEDIQKAQVSGQGDSLHEHIANLAGSPAIKKGILQTVKVVDELVKVMGRHKPENIVIEMARENQTTQKGQKNSRERMKRIEEGIKELGSQILKEHPVENTQLQNEKLYLYYLQNGRDMYVDQELDINRLSDYDVDHIVPQSFLKDDSIDNKVLTRSDKARGKSDNVPSEEVVKKMKNYWRQLLNAKLITQRKFDNLTKAERGGLSELDKAGFIKRQLVETRQITKHVAQILDSRMNTKYDENDKLIREVKVITLKSKLVSDFRKDFQFYKVREINNYHHAHDAYLNAVVGTALIKKYPKLESEFVYGDYKVYDVRKMIAKSEQEIGKATAKYFFYSNIMNFFKTEITLANGEIRKRPLIETNGETGEIVWDKGRDFATVRKVLSMPQVNIVKKTEVQTGGFSKESILPKRNSDKLIARKKDWDPKKYGGFDSPTVAYSVLVVAKVEKGKSKKLKSVKELLGITIMERSSFEKNPIDFLEAKGYKEVKKDLIIKLPKYSLFELENGRKRMLASAGELQKGNELALPSKYVNFLYLASHYEKLKGSPEDNEQKQLFVEQHKHYLDEIIEQISEFSKRVILADANLDKVLSAYNKHRDKPIREQAENIIHLFTLTNLGAPAAFKYFDTTIDRKRYTSTKEVLDATLIHQSITGLYETRIDLSQLGGDGGGSSGSSGSSGSSGSSGSSGGTLNIEDEYRLHETSKEPDVSLGSTWLSDFPQAWAETGGMGLAVRQAPLIIPLKATSTPVSIKQYPMSQEARLGIKPHIQRLLDQGILVPCQSPWNTPLLPVKKPGTNDYRPVQDLREVNKRVEDIHPTVPNPYNLLSGLPPSHQWYTVLDLKDAFFCLRLHPTSQPLFAFEWRDPEMGISGQLTWTRLPQGFKNSPTLFNEALHRDLAGFRIQHPDLILLQYVDDLLLAATSELDCQQGTRALLQTLGDLGYRASAKKAQICQKQVKYLGYLLKEGQRWLTEARKETVMGQPIPKTPRQLREFLGKAGFCRLFIPGFAEMAAPLYPLTKPGTLFNWGPDQQKAFQEIKQALLTAPALGLPDLTKPFELFVDEKQGYAKGVLTQKLGPWRRPVAYLSKKLDPVAAGWPPCLRMVAAIAVLTKDAGKLTMGQPLVILAPHAVEALVKQPPDRWLSNARMTHYQALLLDTDRVQFGPVVALNPATLLPLPEEGLQHDCLDILAEAHGTRSDLMDQPLPDADHTWYTDGSSFLQEGQRKAGAAVTTETEVIWARALPAGTSAQRAELIALTQALKMAEGKKLNVYTDSRYAFATAHIHGEIYRRRGWLTSEGKEIKNKDEILALLKALFLPKRLSIIHCPGHQKGNSAEARGNRMADQAAREVATRETPETSTLLAGKRTADGSEFEKRTADGSEFESPKKKAKVE

SEQ ID NO: 2305 - protein, 2100 aa, synthetic construct
  source 1..2100: note = Description of Artificial Sequence: Synthetic polypeptide
MPAAKRVKLDGGDKKYSIGLDIGTNSVGWAVITDEYKVPSKKFKVLGNTDRHSIKKNLIGALLFDSGETAEATRLKRTARRRYTRRKNRICYLQEIFSNEMAKVDDSFFHRLEESFLVEEDKKHERHPIFGNIVDEVAYHEKYPTIYHLRKKLVDSTDKADLRLIYLALAHMIKFRGHFLIEGDLNPDNSDVDKLFIQLVQTYNQLFEENPINASGVDAKAILSARLSKSRRLENLIAQLPGEKKNGLFGNLIALSLGLTPNFKSNFDLAEDAKLQLSKDTYDDDLDNLLAQIGDQYADLFLAAKNLSDAILLSDILRVNTEITKAPLSASMIKRYDEHHQDLTLLKALVRQQLPEKYKEIFFDQSKNGYAGYIDGGASQEEFYKFIKPILEKMDGTEELLVKLNREDLLRKQRTFDNGSIPHQIHLGELHAILRRQEDFYPFLKDNREKIEKILTFRIPYYVGPLARGNSRFAWMTRKSEETITPWNFEEVVDKGASAQSFIERMTNFDKNLPNEKVLPKHSLLYEYFTVYNELTKVKYVTEGMRKPAFLSGEQKKAIVDLLFKTNRKVTVKQLKEDYFKKIECFDSVEISGVEDRFNASLGTYHDLLKIIKDKDFLDNEENEDILEDIVLTLTLFEDREMIEERLKTYAHLFDDKVMKQLKRRRYTGWGRLSRKLINGIRDKQSGKTILDFLKSDGFANRNFMQLIHDDSLTFKEDIQKAQVSGQGDSLHEHIANLAGSPAIKKGILQTVKVVDELVKVMGRHKPENIVIEMARENQTTQKGQKNSRERMKRIEEGIKELGSQILKEHPVENTQLQNEKLYLYYLQNGRDMYVDQELDINRLSDYDVDHIVPQSFLKDDSIDNKVLTRSDKARGKSDNVPSEEVVKKMKNYWRQLLNAKLITQRKFDNLTKAERGGLSELDKAGFIKRQLVETRQITKHVAQILDSRMNTKYDENDKLIREVKVITLKSKLVSDFRKDFQFYKVREINNYHHAHDAYLNAVVGTALIKKYPKLESEFVYGDYKVYDVRKMIAKSEQEIGKATAKYFFYSNIMNFFKTEITLANGEIRKRPLIETNGETGEIVWDKGRDFATVRKVLSMPQVNIVKKTEVQTGGFSKESILPKRNSDKLIARKKDWDPKKYGGFDSPTVAYSVLVVAKVEKGKSKKLKSVKELLGITIMERSSFEKNPIDFLEAKGYKEVKKDLIIKLPKYSLFELENGRKRMLASAGELQKGNELALPSKYVNFLYLASHYEKLKGSPEDNEQKQLFVEQHKHYLDEIIEQISEFSKRVILADANLDKVLSAYNKHRDKPIREQAENIIHLFTLTNLGAPAAFKYFDTTIDRKRYTSTKEVLDATLIHQSITGLYETRIDLSQLGGDGGEAAAKGGGGSEAAAKGGTLNIEDEYRLHETSKEPDVSLGSTWLSDFPQAWAETGGMGLAVRQAPLIIPLKATSTPVSIKQYPMSQEARLGIKPHIQRLLDQGILVPCQSPWNTPLLPVKKPGTNDYRPVQDLREVNKRVEDIHPTVPNPYNLLSGLPPSHQWYTVLDLKDAFFCLRLHPTSQPLFAFEWRDPEMGISGQLTWTRLPQGFKNSPTLFNEALHRDLAGFRIQHPDLILLQYVDDLLLAATSELDCQQGTRALLQTLGDLGYRASAKKAQICQKQVKYLGYLLKEGQRWLTEARKETVMGQPIPKTPRQLREFLGKAGFCRLFIPGFAEMAAPLYPLTKPGTLFNWGPDQQKAFQEIKQALLTAPALGLPDLTKPFELFVDEKQGYAKGVLTQKLGPWRRPVAYLSKKLDPVAAGWPPCLRMVAAIAVLTKDAGKLTMGQPLVILAPHAVEALVKQPPDRWLSNARMTHYQALLLDTDRVQFGPVVALNPATLLPLPEEGLQHDCLDILAEAHGTRSDLMDQPLPDADHTWYTDGSSFLQEGQRKAGAAVTTETEVIWARALPAGTSAQRAELIALTQALKMAEGKKLNVYTDSRYAFATAHIHGEIYRRRGWLTSEGKEIKNKDEILALLKALFLPKRLSIIHCPGHQKGNSAEARGNRMADQAAREVATRETPETSTLLAGKRTADGSEFEKRTADGSEFESPKKKAKVE

SEQ ID NO: 2306 - protein, 2096 aa, synthetic construct
  source 1..2096: note = Description of Artificial Sequence: Synthetic polypeptide
MPAAKRVKLDGGDKKYSIGLDIGTNSVGWAVITDEYKVPSKKFKVLGNTDRHSIKKNLIGALLFDSGETAEATRLKRTARRRYTRRKNRICYLQEIFSNEMAKVDDSFFHRLEESFLVEEDKKHERHPIFGNIVDEVAYHEKYPTIYHLRKKLVDSTDKADLRLIYLALAHMIKFRGHFLIEGDLNPDNSDVDKLFIQLVQTYNQLFEENPINASGVDAKAILSARLSKSRRLENLIAQLPGEKKNGLFGNLIALSLGLTPNFKSNFDLAEDAKLQLSKDTYDDDLDNLLAQIGDQYADLFLAAKNLSDAILLSDILRVNTEITKAPLSASMIKRYDEHHQDLTLLKALVRQQLPEKYKEIFFDQSKNGYAGYIDGGASQEEFYKFIKPILEKMDGTEELLVKLNREDLLRKQRTFDNGSIPHQIHLGELHAILRRQEDFYPFLKDNREKIEKILTFRIPYYVGPLARGNSRFAWMTRKSEETITPWNFEEVVDKGASAQSFIERMTNFDKNLPNEKVLPKHSLLYEYFTVYNELTKVKYVTEGMRKPAFLSGEQKKAIVDLLFKTNRKVTVKQLKEDYFKKIECFDSVEISGVEDRFNASLGTYHDLLKIIKDKDFLDNEENEDILEDIVLTLTLFEDREMIEERLKTYAHLFDDKVMKQLKRRRYTGWGRLSRKLINGIRDKQSGKTILDFLKSDGFANRNFMQLIHDDSLTFKEDIQKAQVSGQGDSLHEHIANLAGSPAIKKGILQTVKVVDELVKVMGRHKPENIVIEMARENQTTQKGQKNSRERMKRIEEGIKELGSQILKEHPVENTQLQNEKLYLYYLQNGRDMYVDQELDINRLSDYDVDHIVPQSFLKDDSIDNKVLTRSDKARGKSDNVPSEEVVKKMKNYWRQLLNAKLITQRKFDNLTKAERGGLSELDKAGFIKRQLVETRQITKHVAQILDSRMNTKYDENDKLIREVKVITLKSKLVSDFRKDFQFYKVREINNYHHAHDAYLNAVVGTALIKKYPKLESEFVYGDYKVYDVRKMIAKSEQEIGKATAKYFFYSNIMNFFKTEITLANGEIRKRPLIETNGETGEIVWDKGRDFATVRKVLSMPQVNIVKKTEVQTGGFSKESILPKRNSDKLIARKKDWDPKKYGGFDSPTVAYSVLVVAKVEKGKSKKLKSVKELLGITIMERSSFEKNPIDFLEAKGYKEVKKDLIIKLPKYSLFELENGRKRMLASAGELQKGNELALPSKYVNFLYLASHYEKLKGSPEDNEQKQLFVEQHKHYLDEIIEQISEFSKRVILADANLDKVLSAYNKHRDKPIREQAENIIHLFTLTNLGAPAAFKYFDTTIDRKRYTSTKEVLDATLIHQSITGLYETRIDLSQLGGDGGGGGEAAAKGGSGGTLNIEDEYRLHETSKEPDVSLGSTWLSDFPQAWAETGGMGLAVRQAPLIIPLKATSTPVSIKQYPMSQEARLGIKPHIQRLLDQGILVPCQSPWNTPLLPVKKPGTNDYRPVQDLREVNKRVEDIHPTVPNPYNLLSGLPPSHQWYTVLDLKDAFFCLRLHPTSQPLFAFEWRDPEMGISGQLTWTRLPQGFKNSPTLFNEALHRDLAGFRIQHPDLILLQYVDDLLLAATSELDCQQGTRALLQTLGDLGYRASAKKAQICQKQVKYLGYLLKEGQRWLTEARKETVMGQPIPKTPRQLREFLGKAGFCRLFIPGFAEMAAPLYPLTKPGTLFNWGPDQQKAFQEIKQALLTAPALGLPDLTKPFELFVDEKQGYAKGVLTQKLGPWRRPVAYLSKKLDPVAAGWPPCLRMVAAIAVLTKDAGKLTMGQPLVILAPHAVEALVKQPPDRWLSNARMTHYQALLLDTDRVQFGPVVALNPATLLPLPEEGLQHDCLDILAEAHGTRSDLMDQPLPDADHTWYTDGSSFLQEGQRKAGAAVTTETEVIWARALPAGTSAQRAELIALTQALKMAEGKKLNVYTDSRYAFATAHIHGEIYRRRGWLTSEGKEIKNKDEILALLKALFLPKRLSIIHCPGHQKGNSAEARGNRMADQAAREVATRETPETSTLLAGKRTADGSEFEKRTADGSEFESPKKKAKVE

SEQ ID NO: 2307 - protein, 2092 aa, synthetic construct
  source 1..2092: note = Description of Artificial Sequence: Synthetic polypeptide
MPAAKRVKLDGGDKKYSIGLDIGTNSVGWAVITDEYKVPSKKFKVLGNTDRHSIKKNLIGALLFDSGETAEATRLKRTARRRYTRRKNRICYLQEIFSNEMAKVDDSFFHRLEESFLVEEDKKHERHPIFGNIVDEVAYHEKYPTIYHLRKKLVDSTDKADLRLIYLALAHMIKFRGHFLIEGDLNPDNSDVDKLFIQLVQTYNQLFEENPINASGVDAKAILSARLSKSRRLENLIAQLPGEKKNGLFGNLIALSLGLTPNFKSNFDLAEDAKLQLSKDTYDDDLDNLLAQIGDQYADLFLAAKNLSDAILLSDILRVNTEITKAPLSASMIKRYDEHHQDLTLLKALVRQQLPEKYKEIFFDQSKNGYAGYIDGGASQEEFYKFIKPILEKMDGTEELLVKLNREDLLRKQRTFDNGSIPHQIHLGELHAILRRQEDFYPFLKDNREKIEKILTFRIPYYVGPLARGNSRFAWMTRKSEETITPWNFEEVVDKGASAQSFIERMTNFDKNLPNEKVLPKHSLLYEYFTVYNELTKVKYVTEGMRKPAFLSGEQKKAIVDLLFKTNRKVTVKQLKEDYFKKIECFDSVEISGVEDRFNASLGTYHDLLKIIKDKDFLDNEENEDILEDIVLTLTLFEDREMIEERLKTYAHLFDDKVMKQLKRRRYTGWGRLSRKLINGIRDKQSGKTILDFLKSDGFANRNFMQLIHDDSLTFKEDIQKAQVSGQGDSLHEHIANLAGSPAIKKGILQTVKVVDELVKVMGRHKPENIVIEMARENQTTQKGQKNSRERMKRIEEGIKELGSQILKEHPVENTQLQNEKLYLYYLQNGRDMYVDQELDINRLSDYDVDHIVPQSFLKDDSIDNKVLTRSDKARGKSDNVPSEEVVKKMKNYWRQLLNAKLITQRKFDNLTKAERGGLSELDKAGFIKRQLVETRQITKHVAQILDSRMNTKYDENDKLIREVKVITLKSKLVSDFRKDFQFYKVREINNYHHAHDAYLNAVVGTALIKKYPKLESEFVYGDYKVYDVRKMIAKSEQEIGKATAKYFFYSNIMNFFKTEITLANGEIRKRPLIETNGETGEIVWDKGRDFATVRKVLSMPQVNIVKKTEVQTGGFSKESILPKRNSDKLIARKKDWDPKKYGGFDSPTVAYSVLVVAKVEKGKSKKLKSVKELLGITIMERSSFEKNPIDFLEAKGYKEVKKDLIIKLPKYSLFELENGRKRMLASAGELQKGNELALPSKYVNFLYLASHYEKLKGSPEDNEQKQLFVEQHKHYLDEIIEQISEFSKRVILADANLDKVLSAYNKHRDKPIREQAENIIHLFTLTNLGAPAAFKYFDTTIDRKRYTSTKEVLDATLIHQSITGLYETRIDLSQLGGDGGGGGGGGGGGTLNIEDEYRLHETSKEPDVSLGSTWLSDFPQAWAETGGMGLAVRQAPLIIPLKATSTPVSIKQYPMSQEARLGIKPHIQRLLDQGILVPCQSPWNTPLLPVKKPGTNDYRPVQDLREVNKRVEDIHPTVPNPYNLLSGLPPSHQWYTVLDLKDAFFCLRLHPTSQPLFAFEWRDPEMGISGQLTWTRLPQGFKNSPTLFNEALHRDLAGFRIQHPDLILLQYVDDLLLAATSELDCQQGTRALLQTLGDLGYRASAKKAQICQKQVKYLGYLLKEGQRWLTEARKETVMGQPIPKTPRQLREFLGKAGFCRLFIPGFAEMAAPLYPLTKPGTLFNWGPDQQKAFQEIKQALLTAPALGLPDLTKPFELFVDEKQGYAKGVLTQKLGPWRRPVAYLSKKLDPVAAGWPPCLRMVAAIAVLTKDAGKLTMGQPLVILAPHAVEALVKQPPDRWLSNARMTHYQALLLDTDRVQFGPVVALNPATLLPLPEEGLQHDCLDILAEAHGTRSDLMDQPLPDADHTWYTDGSSFLQEGQRKAGAAVTTETEVIWARALPAGTSAQRAELIALTQALKMAEGKKLNVYTDSRYAFATAHIHGEIYRRRGWLTSEGKEIKNKDEILALLKALFLPKRLSIIHCPGHQKGNSAEARGNRMADQAAREVATRETPETSTLLAGKRTADGSEFEKRTADGSEFESPKKKAKVE

SEQ ID NO: 2308 - protein, 2094 aa, synthetic construct
  source 1..2094: note = Description of Artificial Sequence: Synthetic polypeptide
MPAAKRVKLDGGDKKYSIGLDIGTNSVGWAVITDEYKVPSKKFKVLGNTDRHSIKKNLIGALLFDSGETAEATRLKRTARRRYTRRKNRICYLQEIFSNEMAKVDDSFFHRLEESFLVEEDKKHERHPIFGNIVDEVAYHEKYPTIYHLRKKLVDSTDKADLRLIYLALAHMIKFRGHFLIEGDLNPDNSDVDKLFIQLVQTYNQLFEENPINASGVDAKAILSARLSKSRRLENLIAQLPGEKKNGLFGNLIALSLGLTPNFKSNFDLAEDAKLQLSKDTYDDDLDNLLAQIGDQYADLFLAAKNLSDAILLSDILRVNTEITKAPLSASMIKRYDEHHQDLTLLKALVRQQLPEKYKEIFFDQSKNGYAGYIDGGASQEEFYKFIKPILEKMDGTEELLVKLNREDLLRKQRTFDNGSIPHQIHLGELHAILRRQEDFYPFLKDNREKIEKILTFRIPYYVGPLARGNSRFAWMTRKSEETITPWNFEEVVDKGASAQSFIERMTNFDKNLPNEKVLPKHSLLYEYFTVYNELTKVKYVTEGMRKPAFLSGEQKKAIVDLLFKTNRKVTVKQLKEDYFKKIECFDSVEISGVEDRFNASLGTYHDLLKIIKDKDFLDNEENEDILEDIVLTLTLFEDREMIEERLKTYAHLFDDKVMKQLKRRRYTGWGRLSRKLINGIRDKQSGKTILDFLKSDGFANRNFMQLIHDDSLTFKEDIQKAQVSGQGDSLHEHIANLAGSPAIKKGILQTVKVVDELVKVMGRHKPENIVIEMARENQTTQKGQKNSRERMKRIEEGIKELGSQILKEHPVENTQLQNEKLYLYYLQNGRDMYVDQELDINRLSDYDVDHIVPQSFLKDDSIDNKVLTRSDKARGKSDNVPSEEVVKKMKNYWRQLLNAKLITQRKFDNLTKAERGGLSELDKAGFIKRQLVETRQITKHVAQILDSRMNTKYDENDKLIREVKVITLKSKLVSDFRKDFQFYKVREINNYHHAHDAYLNAVVGTALIKKYPKLESEFVYGDYKVYDVRKMIAKSEQEIGKATAKYFFYSNIMNFFKTEITLANGEIRKRPLIETNGETGEIVWDKGRDFATVRKVLSMPQVNIVKKTEVQTGGFSKESILPKRNSDKLIARKKDWDPKKYGGFDSPTVAYSVLVVAKVEKGKSKKLKSVKELLGITIMERSSFEKNPIDFLEAKGYKEVKKDLIIKLPKYSLFELENGRKRMLASAGELQKGNELALPSKYVNFLYLASHYEKLKGSPEDNEQKQLFVEQHKHYLDEIIEQISEFSKRVILADANLDKVLSAYNKHRDKPIREQAENIIHLFTLTNLGAPAAFKYFDTTIDRKRYTSTKEVLDATLIHQSITGLYETRIDLSQLGGDGGPAPGGGGSSGGTLNIEDEYRLHETSKEPDVSLGSTWLSDFPQAWAETGGMGLAVRQAPLIIPLKATSTPVSIKQYPMSQEARLGIKPHIQRLLDQGILVPCQSPWNTPLLPVKKPGTNDYRPVQDLREVNKRVEDIHPTVPNPYNLLSGLPPSHQWYTVLDLKDAFFCLRLHPTSQPLFAFEWRDPEMGISGQLTWTRLPQGFKNSPTLFNEALHRDLAGFRIQHPDLILLQYVDDLLLAATSELDCQQGTRALLQTLGDLGYRASAKKAQICQKQVKYLGYLLKEGQRWLTEARKETVMGQPIPKTPRQLREFLGKAGFCRLFIPGFAEMAAPLYPLTKPGTLFNWGPDQQKAFQEIKQALLTAPALGLPDLTKPFELFVDEKQGYAKGVLTQKLGPWRRPVAYLSKKLDPVAAGWPPCLRMVAAIAVLTKDAGKLTMGQPLVILAPHAVEALVKQPPDRWLSNARMTHYQALLLDTDRVQFGPVVALNPATLLPLPEEGLQHDCLDILAEAHGTRSDLMDQPLPDADHTWYTDGSSFLQEGQRKAGAAVTTETEVIWARALPAGTSAQRAELIALTQALKMAEGKKLNVYTDSRYAFATAHIHGEIYRRRGWLTSEGKEIKNKDEILALLKALFLPKRLSIIHCPGHQKGNSAEARGNRMADQAAREVATRETPETSTLLAGKRTADGSEFEKRTADGSEFESPKKKAKVE

SEQ ID NO: 2309 - protein, 2098 aa, synthetic construct
  source 1..2098: note = Description of Artificial Sequence: Synthetic polypeptide
MPAAKRVKLDGGDKKYSIGLDIGTNSVGWAVITDEYKVPSKKFKVLGNTDRHSIKKNLIGALLFDSGETAEATRLKRTARRRYTRRKNRICYLQEIFSNEMAKVDDSFFHRLEESFLVEEDKKHERHPIFGNIVDEVAYHEKYPTIYHLRKKLVDSTDKADLRLIYLALAHMIKFRGHFLIEGDLNPDNSDVDKLFIQLVQTYNQLFEENPINASGVDAKAILSARLSKSRRLENLIAQLPGEKKNGLFGNLIALSLGLTPNFKSNFDLAEDAKLQLSKDTYDDDLDNLLAQIGDQYADLFLAAKNLSDAILLSDILRVNTEITKAPLSASMIKRYDEHHQDLTLLKALVRQQLPEKYKEIFFDQSKNGYAGYIDGGASQEEFYKFIKPILEKMDGTEELLVKLNREDLLRKQRTFDNGSIPHQIHLGELHAILRRQEDFYPFLKDNREKIEKILTFRIPYYVGPLARGNSRFAWMTRKSEETITPWNFEEVVDKGASAQSFIERMTNFDKNLPNEKVLPKHSLLYEYFTVYNELTKVKYVTEGMRKPAFLSGEQKKAIVDLLFKTNRKVTVKQLKEDYFKKIECFDSVEISGVEDRFNASLGTYHDLLKIIKDKDFLDNEENEDILEDIVLTLTLFEDREMIEERLKTYAHLFDDKVMKQLKRRRYTGWGRLSRKLINGIRDKQSGKTILDFLKSDGFANRNFMQLIHDDSLTFKEDIQKAQVSGQGDSLHEHIANLAGSPAIKKGILQTVKVVDELVKVMGRHKPENIVIEMARENQTTQKGQKNSRERMKRIEEGIKELGSQILKEHPVENTQLQNEKLYLYYLQNGRDMYVDQELDINRLSDYDVDHIVPQSFLKDDSIDNKVLTRSDKARGKSDNVPSEEVVKKMKNYWRQLLNAKLITQRKFDNLTKAERGGLSELDKAGFIKRQLVETRQITKHVAQILDSRMNTKYDENDKLIREVKVITLKSKLVSDFRKDFQFYKVREINNYHHAHDAYLNAVVGTALIKKYPKLESEFVYGDYKVYDVRKMIAKSEQEIGKATAKYFFYSNIMNFFKTEITLANGEIRKRPLIETNGETGEIVWDKGRDFATVRKVLSMPQVNIVKKTEVQTGGFSKESILPKRNSDKLIARKKDWDPKKYGGFDSPTVAYSVLVVAKVEKGKSKKLKSVKELLGITIMERSSFEKNPIDFLEAKGYKEVKKDLIIKLPKYSLFELENGRKRMLASAGELQKGNELALPSKYVNFLYLASHYEKLKGSPEDNEQKQLFVEQHKHYLDEIIEQISEFSKRVILADANLDKVLSAYNKHRDKPIREQAENIIHLFTLTNLGAPAAFKYFDTTIDRKRYTSTKEVLDATLIHQSITGLYETRIDLSQLGGDGGPAPAPAPAPAPAPGGTLNIEDEYRLHETSKEPDVSLGSTWLSDFPQAWAETGGMGLAVRQAPLIIPLKATSTPVSIKQYPMSQEARLGIKPHIQRLLDQGILVPCQSPWNTPLLPVKKPGTNDYRPVQDLREVNKRVEDIHPTVPNPYNLLSGLPPSHQWYTVLDLKDAFFCLRLHPTSQPLFAFEWRDPEMGISGQLTWTRLPQGFKNSPTLFNEALHRDLAGFRIQHPDLILLQYVDDLLLAATSELDCQQGTRALLQTLGDLGYRASAKKAQICQKQVKYLGYLLKEGQRWLTEARKETVMGQPIPKTPRQLREFLGKAGFCRLFIPGFAEMAAPLYPLTKPGTLFNWGPDQQKAFQEIKQALLTAPALGLPDLTKPFELFVDEKQGYAKGVLTQKLGPWRRPVAYLSKKLDPVAAGWPPCLRMVAAIAVLTKDAGKLTMGQPLVILAPHAVEALVKQPPDRWLSNARMTHYQALLLDTDRVQFGPVVALNPATLLPLPEEGLQHDCLDILAEAHGTRSDLMDQPLPDADHTWYTDGSSFLQEGQRKAGAAVTTETEVIWARALPAGTSAQRAELIALTQALKMAEGKKLNVYTDSRYAFATAHIHGEIYRRRGWLTSEGKEIKNKDEILALLKALFLPKRLSIIHCPGHQKGNSAEARGNRMADQAAREVATRETPETSTLLAGKRTADGSEFEKRTADGSEFESPKKKAKVE

SEQ ID NO: 2310 - protein, 2100 aa, synthetic construct
  source 1..2100: note = Description of Artificial Sequence: Synthetic polypeptide
MPAAKRVKLDGGDKKYSIGLDIGTNSVGWAVITDEYKVPSKKFKVLGNTDRHSIKKNLIGALLFDSGETAEATRLKRTARRRYTRRKNRICYLQEIFSNEMAKVDDSFFHRLEESFLVEEDKKHERHPIFGNIVDEVAYHEKYPTIYHLRKKLVDSTDKADLRLIYLALAHMIKFRGHFLIEGDLNPDNSDVDKLFIQLVQTYNQLFEENPINASGVDAKAILSARLSKSRRLENLIAQLPGEKKNGLFGNLIALSLGLTPNFKSNFDLAEDAKLQLSKDTYDDDLDNLLAQIGDQYADLFLAAKNLSDAILLSDILRVNTEITKAPLSASMIKRYDEHHQDLTLLKALVRQQLPEKYKEIFFDQSKNGYAGYIDGGASQEEFYKFIKPILEKMDGTEELLVKLNREDLLRKQRTFDNGSIPHQIHLGELHAILRRQEDFYPFLKDNREKIEKILTFRIPYYVGPLARGNSRFAWMTRKSEETITPWNFEEVVDKGASAQSFIERMTNFDKNLPNEKVLPKHSLLYEYFTVYNELTKVKYVTEGMRKPAFLSGEQKKAIVDLLFKTNRKVTVKQLKEDYFKKIECFDSVEISGVEDRFNASLGTYHDLLKIIKDKDFLDNEENEDILEDIVLTLTLFEDREMIEERLKTYAHLFDDKVMKQLKRRRYTGWGRLSRKLINGIRDKQSGKTILDFLKSDGFANRNFMQLIHDDSLTFKEDIQKAQVSGQGDSLHEHIANLAGSPAIKKGILQTVKVVDELVKVMGRHKPENIVIEMARENQTTQKGQKNSRERMKRIEEGIKELGSQILKEHPVENTQLQNEKLYLYYLQNGRDMYVDQELDINRLSDYDVDHIVPQSFLKDDSIDNKVLTRSDKARGKSDNVPSEEVVKKMKNYWRQLLNAKLITQRKFDNLTKAERGGLSELDKAGFIKRQLVETRQITKHVAQILDSRMNTKYDENDKLIREVKVITLKSKLVSDFRKDFQFYKVREINNYHHAHDAYLNAVVGTALIKKYPKLESEFVYGDYKVYDVRKMIAKSEQEIGKATAKYFFYSNIMNFFKTEITLANGEIRKRPLIETNGETGEIVWDKGRDFATVRKVLSMPQVNIVKKTEVQTGGFSKESILPKRNSDKLIARKKDWDPKKYGGFDSPTVAYSVLVVAKVEKGKSKKLKSVKELLGITIMERSSFEKNPIDFLEAKGYKEVKKDLIIKLPKYSLFELENGRKRMLASAGELQKGNELALPSKYVNFLYLASHYEKLKGSPEDNEQKQLFVEQHKHYLDEIIEQISEFSKRVILADANLDKVLSAYNKHRDKPIREQAENIIHLFTLTNLGAPAAFKYFDTTIDRKRYTSTKEVLDATLIHQSITGLYETRIDLSQLGGDGGGGSGGSGGSGGSGGSGGTLNIEDEYRLHETSKEPDVSLGSTWLSDFPQAWAETGGMGLAVRQAPLIIPLKATSTPVSIKQYPMSQEARLGIKPHIQRLLDQGILVPCQSPWNTPLLPVKKPGTNDYRPVQDLREVNKRVEDIHPTVPNPYNLLSGLPPSHQWYTVLDLKDAFFCLRLHPTSQPLFAFEWRDPEMGISGQLTWTRLPQGFKNSPTLFNEALHRDLAGFRIQHPDLILLQYVDDLLLAATSELDCQQGTRALLQTLGDLGYRASAKKAQICQKQVKYLGYLLKEGQRWLTEARKETVMGQPIPKTPRQLREFLGKAGFCRLFIPGFAEMAAPLYPLTKPGTLFNWGPDQQKAFQEIKQALLTAPALGLPDLTKPFELFVDEKQGYAKGVLTQKLGPWRRPVAYLSKKLDPVAAGWPPCLRMVAAIAVLTKDAGKLTMGQPLVILAPHAVEALVKQPPDRWLSNARMTHYQALLLDTDRVQFGPVVALNPATLLPLPEEGLQHDCLDILAEAHGTRSDLMDQPLPDADHTWYTDGSSFLQEGQRKAGAAVTTETEVIWARALPAGTSAQRAELIALTQALKMAEGKKLNVYTDSRYAFATAHIHGEIYRRRGWLTSEGKEIKNKDEILALLKALFLPKRLSIIHCPGHQKGNSAEARGNRMADQAAREVATRETPETSTLLAGKRTADGSEFEKRTADGSEFESPKKKAKVE

SEQ ID NO: 2311 - protein, 2105 aa, synthetic construct
  source 1..2105: note = Description of Artificial Sequence: Synthetic polypeptide
MPAAKRVKLDGGDKKYSIGLDIGTNSVGWAVITDEYKVPSKKFKVLGNTDRHSIKKNLIGALLFDSGETAEATRLKRTARRRYTRRKNRICYLQEIFSNEMAKVDDSFFHRLEESFLVEEDKKHERHPIFGNIVDEVAYHEKYPTIYHLRKKLVDSTDKADLRLIYLALAHMIKFRGHFLIEGDLNPDNSDVDKLFIQLVQTYNQLFEENPINASGVDAKAILSARLSKSRRLENLIAQLPGEKKNGLFGNLIALSLGLTPNFKSNFDLAEDAKLQLSKDTYDDDLDNLLAQIGDQYADLFLAAKNLSDAILLSDILRVNTEITKAPLSASMIKRYDEHHQDLTLLKALVRQQLPEKYKEIFFDQSKNGYAGYIDGGASQEEFYKFIKPILEKMDGTEELLVKLNREDLLRKQRTFDNGSIPHQIHLGELHAILRRQEDFYPFLKDNREKIEKILTFRIPYYVGPLARGNSRFAWMTRKSEETITPWNFEEVVDKGASAQSFIERMTNFDKNLPNEKVLPKHSLLYEYFTVYNELTKVKYVTEGMRKPAFLSGEQKKAIVDLLFKTNRKVTVKQLKEDYFKKIECFDSVEISGVEDRFNASLGTYHDLLKIIKDKDFLDNEENEDILEDIVLTLTLFEDREMIEERLKTYAHLFDDKVMKQLKRRRYTGWGRLSRKLINGIRDKQSGKTILDFLKSDGFANRNFMQLIHDDSLTFKEDIQKAQVSGQGDSLHEHIANLAGSPAIKKGILQTVKVVDELVKVMGRHKPENIVIEMARENQTTQKGQKNSRERMKRIEEGIKELGSQILKEHPVENTQLQNEKLYLYYLQNGRDMYVDQELDINRLSDYDVDHIVPQSFLKDDSIDNKVLTRSDKARGKSDNVPSEEVVKKMKNYWRQLLNAKLITQRKFDNLTKAERGGLSELDKAGFIKRQLVETRQITKHVAQILDSRMNTKYDENDKLIREVKVITLKSKLVSDFRKDFQFYKVREINNYHHAHDAYLNAVVGTALIKKYPKLESEFVYGDYKVYDVRKMIAKSEQEIGKATAKYFFYSNIMNFFKTEITLANGEIRKRPLIETNGETGEIVWDKGRDFATVRKVLSMPQVNIVKKTEVQTGGFSKESILPKRNSDKLIARKKDWDPKKYGGFDSPTVAYSVLVVAKVEKGKSKKLKSVKELLGITIMERSSFEKNPIDFLEAKGYKEVKKDLIIKLPKYSLFELENGRKRMLASAGELQKGNELALPSKYVNFLYLASHYEKLKGSPEDNEQKQLFVEQHKHYLDEIIEQISEFSKRVILADANLDKVLSAYNKHRDKPIREQAENIIHLFTLTNLGAPAAFKYFDTTIDRKRYTSTKEVLDATLIHQSITGLYETRIDLSQLGGDGGGGGGSGGGGSGGGGSGGGGSGGTLNIEDEYRLHETSKEPDVSLGSTWLSDFPQAWAETGGMGLAVRQAPLIIPLKATSTPVSIKQYPMSQEARLGIKPHIQRLLDQGILVPCQSPWNTPLLPVKKPGTNDYRPVQDLREVNKRVEDIHPTVPNPYNLLSGLPPSHQWYTVLDLKDAFFCLRLHPTSQPLFAFEWRDPEMGISGQLTWTRLPQGFKNSPTLFNEALHRDLAGFRIQHPDLILLQYVDDLLLAATSELDCQQGTRALLQTLGDLGYRASAKKAQICQKQVKYLGYLLKEGQRWLTEARKETVMGQPIPKTPRQLREFLGKAGFCRLFIPGFAEMAAPLYPLTKPGTLFNWGPDQQKAFQEIKQALLTAPALGLPDLTKPFELFVDEKQGYAKGVLTQKLGPWRRPVAYLSKKLDPVAAGWPPCLRMVAAIAVLTKDAGKLTMGQPLVILAPHAVEALVKQPPDRWLSNARMTHYQALLLDTDRVQFGPVVALNPATLLPLPEEGLQHDCLDILAEAHGTRSDLMDQPLPDADHTWYTDGSSFLQEGQRKAGAAVTTETEVIWARALPAGTSAQRAELIALTQALKMAEGKKLNVYTDSRYAFATAHIHGEIYRRRGWLTSEGKEIKNKDEILALLKALFLPKRLSIIHCPGHQKGNSAEARGNRMADQAAREVATRETPETSTLLAGKRTADGSEFEKRTADGSEFESPKKKAKVE

SEQ ID NO: 2312 - protein, 2094 aa, synthetic construct
  source 1..2094: note = Description of Artificial Sequence: Synthetic polypeptide
MPAAKRVKLDGGDKKYSIGLDIGTNSVGWAVITDEYKVPSKKFKVLGNTDRHSIKKNLIGALLFDSGETAEATRLKRTARRRYTRRKNRICYLQEIFSNEMAKVDDSFFHRLEESFLVEEDKKHERHPIFGNIVDEVAYHEKYPTIYHLRKKLVDSTDKADLRLIYLALAHMIKFRGHFLIEGDLNPDNSDVDKLFIQLVQTYNQLFEENPINASGVDAKAILSARLSKSRRLENLIAQLPGEKKNGLFGNLIALSLGLTPNFKSNFDLAEDAKLQLSKDTYDDDLDNLLAQIGDQYADLFLAAKNLSDAILLSDILRVNTEITKAPLSASMIKRYDEHHQDLTLLKALVRQQLPEKYKEIFFDQSKNGYAGYIDGGASQEEFYKFIKPILEKMDGTEELLVKLNREDLLRKQRTFDNGSIPHQIHLGELHAILRRQEDFYPFLKDNREKIEKILTFRIPYYVGPLARGNSRFAWMTRKSEETITPWNFEEVVDKGASAQSFIERMTNFDKNLPNEKVLPKHSLLYEYFTVYNELTKVKYVTEGMRKPAFLSGEQKKAIVDLLFKTNRKVTVKQLKEDYFKKIECFDSVEISGVEDRFNASLGTYHDLLKIIKDKDFLDNEENEDILEDIVLTLTLFEDREMIEERLKTYAHLFDDKVMKQLKRRRYTGWGRLSRKLINGIRDKQSGKTILDFLKSDGFANRNFMQLIHDDSLTFKEDIQKAQVSGQGDSLHEHIANLAGSPAIKKGILQTVKVVDELVKVMGRHKPENIVIEMARENQTTQKGQKNSRERMKRIEEGIKELGSQILKEHPVENTQLQNEKLYLYYLQNGRDMYVDQELDINRLSDYDVDHIVPQSFLKDDSIDNKVLTRSDKARGKSDNVPSEEVVKKMKNYWRQLLNAKLITQRKFDNLTKAERGGLSELDKAGFIKRQLVETRQITKHVAQILDSRMNTKYDENDKLIREVKVITLKSKLVSDFRKDFQFYKVREINNYHHAHDAYLNAVVGTALIKKYPKLESEFVYGDYKVYDVRKMIAKSEQEIGKATAKYFFYSNIMNFFKTEITLANGEIRKRPLIETNGETGEIVWDKGRDFATVRKVLSMPQVNIVKKTEVQTGGFSKESILPKRNSDKLIARKKDWDPKKYGGFDSPTVAYSVLVVAKVEKGKSKKLKSVKELLGITIMERSSFEKNPIDFLEAKGYKEVKKDLIIKLPKYSLFELENGRKRMLASAGELQKGNELALPSKYVNFLYLASHYEKLKGSPEDNEQKQLFVEQHKHYLDEIIEQISEFSKRVILADANLDKVLSAYNKHRDKPIREQAENIIHLFTLTNLGAPAAFKYFDTTIDRKRYTSTKEVLDATLIHQSITGLYETRIDLSQLGGDGGGGGGGSGSSGGTLNIEDEYRLHETSKEPDVSLGSTWLSDFPQAWAETGGMGLAVRQAPLIIPLKATSTPVSIKQYPMSQEARLGIKPHIQRLLDQGILVPCQSPWNTPLLPVKKPGTNDYRPVQDLREVNKRVEDIHPTVPNPYNLLSGLPPSHQWYTVLDLKDAFFCLRLHPTSQPLFAFEWRDPEMGISGQLTWTRLPQGFKNSPTLFNEALHRDLAGFRIQHPDLILLQYVDDLLLAATSELDCQQGTRALLQTLGDLGYRASAKKAQICQKQVKYLGYLLKEGQRWLTEARKETVMGQPIPKTPRQLREFLGKAGFCRLFIPGFAEMAAPLYPLTKPGTLFNWGPDQQKAFQEIKQALLTAPALGLPDLTKPFELFVDEKQGYAKGVLTQKLGPWRRPVAYLSKKLDPVAAGWPPCLRMVAAIAVLTKDAGKLTMGQPLVILAPHAVEALVKQPPDRWLSNARMTHYQALLLDTDRVQFGPVVALNPATLLPLPEEGLQHDCLDILAEAHGTRSDLMDQPLPDADHTWYTDGSSFLQEGQRKAGAAVTTETEVIWARALPAGTSAQRAELIALTQALKMAEGKKLNVYTDSRYAFATAHIHGEIYRRRGWLTSEGKEIKNKDEILALLKALFLPKRLSIIHCPGHQKGNSAEARGNRMADQAAREVATRETPETSTLLAGKRTADGSEFEKRTADGSEFESPKKKAKVE

SEQ ID NO: 2313 - protein, 2097 aa, synthetic construct
  source 1..2097: note = Description of Artificial Sequence: Synthetic polypeptide
MPAAKRVKLDGGDKKYSIGLDIGTNSVGWAVITDEYKVPSKKFKVLGNTDRHSIKKNLIGALLFDSGETAEATRLKRTARRRYTRRKNRICYLQEIFSNEMAKVDDSFFHRLEESFLVEEDKKHERHPIFGNIVDEVAYHEKYPTIYHLRKKLVDSTDKADLRLIYLALAHMIKFRGHFLIEGDLNPDNSDVDKLFIQLVQTYNQLFEENPINASGVDAKAILSARLSKSRRLENLIAQLPGEKKNGLFGNLIALSLGLTPNFKSNFDLAEDAKLQLSKDTYDDDLDNLLAQIGDQYADLFLAAKNLSDAILLSDILRVNTEITKAPLSASMIKRYDEHHQDLTLLKALVRQQLPEKYKEIFFDQSKNGYAGYIDGGASQEEFYKFIKPILEKMDGTEELLVKLNREDLLRKQRTFDNGSIPHQIHLGELHAILRRQEDFYPFLKDNREKIEKILTFRIPYYVGPLARGNSRFAWMTRKSEETITPWNFEEVVDKGASAQSFIERMTNFDKNLPNEKVLPKHSLLYEYFTVYNELTKVKYVTEGMRKPAFLSGEQKKAIVDLLFKTNRKVTVKQLKEDYFKKIECFDSVEISGVEDRFNASLGTYHDLLKIIKDKDFLDNEENEDILEDIVLTLTLFEDREMIEERLKTYAHLFDDKVMKQLKRRRYTGWGRLSRKLINGIRDKQSGKTILDFLKSDGFANRNFMQLIHDDSLTFKEDIQKAQVSGQGDSLHEHIANLAGSPAIKKGILQTVKVVDELVKVMGRHKPENIVIEMARENQTTQKGQKNSRERMKRIEEGIKELGSQILKEHPVENTQLQNEKLYLYYLQNGRDMYVDQELDINRLSDYDVDHIVPQSFLKDDSIDNKVLTRSDKARGKSDNVPSEEVVKKMKNYWRQLLNAKLITQRKFDNLTKAERGGLSELDKAGFIKRQLVETRQITKHVAQILDSRMNTKYDENDKLIREVKVITLKSKLVSDFRKDFQFYKVREINNYHHAHDAYLNAVVGTALIKKYPKLESEFVYGDYKVYDVRKMIAKSEQEIGKATAKYFFYSNIMNFFKTEITLANGEIRKRPLIETNGETGEIVWDKGRDFATVRKVLSMPQVNIVKKTEVQTGGFSKESILPKRNSDKLIARKKDWDPKKYGGFDSPTVAYSVLVVAKVEKGKSKKLKSVKELLGITIMERSSFEKNPIDFLEAKGYKEVKKDLIIKLPKYSLFELENGRKRMLASAGELQKGNELALPSKYVNFLYLASHYEKLKGSPEDNEQKQLFVEQHKHYLDEIIEQISEFSKRVILADANLDKVLSAYNKHRDKPIREQAENIIHLFTLTNLGAPAAFKYFDTTIDRKRYTSTKEVLDATLIHQSITGLYETRIDLSQLGGDGGGSAGSAAGSGEFGGTLNIEDEYRLHETSKEPDVSLGSTWLSDFPQAWAETGGMGLAVRQAPLIIPLKATSTPVSIKQYPMSQEARLGIKPHIQRLLDQGILVPCQSPWNTPLLPVKKPGTNDYRPVQDLREVNKRVEDIHPTVPNPYNLLSGLPPSHQWYTVLDLKDAFFCLRLHPTSQPLFAFEWRDPEMGISGQLTWTRLPQGFKNSPTLFNEALHRDLAGFRIQHPDLILLQYVDDLLLAATSELDCQQGTRALLQTLGDLGYRASAKKAQICQKQVKYLGYLLKEGQRWLTEARKETVMGQPIPKTPRQLREFLGKAGFCRLFIPGFAEMAAPLYPLTKPGTLFNWGPDQQKAFQEIKQALLTAPALGLPDLTKPFELFVDEKQGYAKGVLTQKLGPWRRPVAYLSKKLDPVAAGWPPCLRMVAAIAVLTKDAGKLTMGQPLVILAPHAVEALVKQPPDRWLSNARMTHYQALLLDTDRVQFGPVVALNPATLLPLPEEGLQHDCLDILAEAHGTRSDLMDQPLPDADHTWYTDGSSFLQEGQRKAGAAVTTETEVIWARALPAGTSAQRAELIALTQALKMAEGKKLNVYTDSRYAFATAHIHGEIYRRRGWLTSEGKEIKNKDEILALLKALFLPKRLSIIHCPGHQKGNSAEARGNRMADQAAREVATRETPETSTLLAGKRTADGSEFEKRTADGSEFESPKKKAKVE

SEQ ID NO: 2314 - protein, 2096 aa, synthetic construct
  source 1..2096: note = Description of Artificial Sequence: Synthetic polypeptide
MPAAKRVKLDGGDKKYSIGLDIGTNSVGWAVITDEYKVPSKKFKVLGNTDRHSIKKNLIGALLFDSGETAEATRLKRTARRRYTRRKNRICYLQEIFSNEMAKVDDSFFHRLEESFLVEEDKKHERHPIFGNIVDEVAYHEKYPTIYHLRKKLVDSTDKADLRLIYLALAHMIKFRGHFLIEGDLNPDNSDVDKLFIQLVQTYNQLFEENPINASGVDAKAILSARLSKSRRLENLIAQLPGEKKNGLFGNLIALSLGLTPNFKSNFDLAEDAKLQLSKDTYDDDLDNLLAQIGDQYADLFLAAKNLSDAILLSDILRVNTEITKAPLSASMIKRYDEHHQDLTLLKALVRQQLPEKYKEIFFDQSKNGYAGYIDGGASQEEFYKFIKPILEKMDGTEELLVKLNREDLLRKQRTFDNGSIPHQIHLGELHAILRRQEDFYPFLKDNREKIEKILTFRIPYYVGPLARGNSRFAWMTRKSEETITPWNFEEVVDKGASAQSFIERMTNFDKNLPNEKVLPKHSLLYEYFTVYNELTKVKYVTEGMRKPAFLSGEQKKAIVDLLFKTNRKVTVKQLKEDYFKKIECFDSVEISGVEDRFNASLGTYHDLLKIIKDKDFLDNEENEDILEDIVLTLTLFEDREMIEERLKTYAHLFDDKVMKQLKRRRYTGWGRLSRKLINGIRDKQSGKTILDFLKSDGFANRNFMQLIHDDSLTFKEDIQKAQVSGQGDSLHEHIANLAGSPAIKKGILQTVKVVDELVKVMGRHKPENIVIEMARENQTTQKGQKNSRERMKRIEEGIKELGSQILKEHPVENTQLQNEKLYLYYLQNGRDMYVDQELDINRLSDYDVDHIVPQSFLKDDSIDNKVLTRSDKARGKSDNVPSEEVVKKMKNYWRQLLNAKLITQRKFDNLTKAERGGLSELDKAGFIKRQLVETRQITKHVAQILDSRMNTKYDENDKLIREVKVITLKSKLVSDFRKDFQFYKVREINNYHHAHDAYLNAVVGTALIKKYPKLESEFVYGDYKVYDVRKMIAKSEQEIGKATAKYFFYSNIMNFFKTEITLANGEIRKRPLIETNGETGEIVWDKGRDFATVRKVLSMPQVNIVKKTEVQTGGFSKESILPKRNSDKLIARKKDWDPKKYGGFDSPTVAYSVLVVAKVEKGKSKKLKSVKELLGITIMERSSFEKNPIDFLEAKGYKEVKKDLIIKLPKYSLFELENGRKRMLASAGELQKGNELALPSKYVNFLYLASHYEKLKGSPEDNEQKQLFVEQHKHYLDEIIEQISEFSKRVILADANLDKVLSAYNKHRDKPIREQAENIIHLFTLTNLGAPAAFKYFDTTIDRKRYTSTKEVLDATLIHQSITGLYETRIDLSQLGGDGGPAPEAAAKGGSGGTLNIEDEYRLHETSKEPDVSLGSTWLSDFPQAWAETGGMGLAVRQAPLIIPLKATSTPVSIKQYPMSQEARLGIKPHIQRLLDQGILVPCQSPWNTPLLPVKKPGTNDYRPVQDLREVNKRVEDIHPTVPNPYNLLSGLPPSHQWYTVLDLKDAFFCLRLHPTSQPLFAFEWRDPEMGISGQLTWTRLPQGFKNSPTLFNEALHRDLAGFRIQHPDLILLQYVDDLLLAATSELDCQQGTRALLQTLGDLGYRASAKKAQICQKQVKYLGYLLKEGQRWLTEARKETVMGQPIPKTPRQLREFLGKAGFCRLFIPGFAEMAAPLYPLTKPGTLFNWGPDQQKAFQEIKQALLTAPALGLPDLTKPFELFVDEKQGYAKGVLTQKLGPWRRPVAYLSKKLDPVAAGWPPCLRMVAAIAVLTKDAGKLTMGQPLVILAPHAVEALVKQPPDRWLSNARMTHYQALLLDTDRVQFGPVVALNPATLLPLPEEGLQHDCLDILAEAHGTRSDLMDQPLPDADHTWYTDGSSFLQEGQRKAGAAVTTETEVIWARALPAGTSAQRAELIALTQALKMAEGKKLNVYTDSRYAFATAHIHGEIYRRRGWLTSEGKEIKNKDEILALLKALFLPKRLSIIHCPGHQKGNSAEARGNRMADQAAREVATRETPETSTLLAGKRTADGSEFEKRTADGSEFESPKKKAKVE

SEQ ID NO: 2315 - protein, 2096 aa, synthetic construct
  source 1..2096: note = Description of Artificial Sequence: Synthetic polypeptide
MPAAKRVKLDGGDKKYSIGLDIGTNSVGWAVITDEYKVPSKKFKVLGNTDRHSIKKNLIGALLFDSGETAEATRLKRTARRRYTRRKNRICYLQEIFSNEMAKVDDSFFHRLEESFLVEEDKKHERHPIFGNIVDEVAYHEKYPTIYHLRKKLVDSTDKADLRLIYLALAHMIKFRGHFLIEGDLNPDNSDVDKLFIQLVQTYNQLFEENPINASGVDAKAILSARLSKSRRLENLIAQLPGEKKNGLFGNLIALSLGLTPNFKSNFDLAEDAKLQLSKDTYDDDLDNLLAQIGDQYADLFLAAKNLSDAILLSDILRVNTEITKAPLSASMIKRYDEHHQDLTLLKALVRQQLPEKYKEIFFDQSKNGYAGYIDGGASQEEFYKFIKPILEKMDGTEELLVKLNREDLLRKQRTFDNGSIPHQIHLGELHAILRRQEDFYPFLKDNREKIEKILTFRIPYYVGPLARGNSRFAWMTRKSEETITPWNFEEVVDKGASAQSFIERMTNFDKNLPNEKVLPKHSLLYEYFTVYNELTKVKYVTEGMRKPAFLSGEQKKAIVDLLFKTNRKVTVKQLKEDYFKKIECFDSVEISGVEDRFNASLGTYHDLLKIIKDKDFLDNEENEDILEDIVLTLTLFEDREMIEERLKTYAHLFDDKVMKQLKRRRYTGWGRLSRKLINGIRDKQSGKTILDFLKSDGFANRNFMQLIHDDSLTFKEDIQKAQVSGQGDSLHEHIANLAGSPAIKKGILQTVKVVDELVKVMGRHKPENIVIEMARENQTTQKGQKNSRERMKRIEEGIKELGSQILKEHPVENTQLQNEKLYLYYLQNGRDMYVDQELDINRLSDYDVDHIVPQSFLKDDSIDNKVLTRSDKARGKSDNVPSEEVVKKMKNYWRQLLNAKLITQRKFDNLTKAERGGLSELDKAGFIKRQLVETRQITKHVAQILDSRMNTKYDENDKLIREVKVITLKSKLVSDFRKDFQFYKVREINNYHHAHDAYLNAVVGTALIKKYPKLESEFVYGDYKVYDVRKMIAKSEQEIGKATAKYFFYSNIMNFFKTEITLANGEIRKRPLIETNGETGEIVWDKGRDFATVRKVLSMPQVNIVKKTEVQTGGFSKESILPKRNSDKLIARKKDWDPKKYGGFDSPTVAYSVLVVAKVEKGKSKKLKSVKELLGITIMERSSFEKNPIDFLEAKGYKEVKKDLIIKLPKYSLFELENGRKRMLASAGELQKGNELALPSKYVNFLYLASHYEKLKGSPEDNEQKQLFVEQHKHYLDEIIEQISEFSKRVILADANLDKVLSAYNKHRDKPIREQAENIIHLFTLTNLGAPAAFKYFDTTIDRKRYTSTKEVLDATLIHQSITGLYETRIDLSQLGGDGGEAAAKPAPGGSGGTLNIEDEYRLHETSKEPDVSLGSTWLSDFPQAWAETGGMGLAVRQAPLIIPLKATSTPVSIKQYPMSQEARLGIKPHIQRLLDQGILVPCQSPWNTPLLPVKKPGTNDYRPVQDLREVNKRVEDIHPTVPNPYNLLSGLPPSHQWYTVLDLKDAFFCLRLHPTSQPLFAFEWRDPEMGISGQLTWTRLPQGFKNSPTLFNEALHRDLAGFRIQHPDLILLQYVDDLLLAATSELDCQQGTRALLQTLGDLGYRASAKKAQICQKQVKYLGYLLKEGQRWLTEARKETVMGQPIPKTPRQLREFLGKAGFCRLFIPGFAEMAAPLYPLTKPGTLFNWGPDQQKAFQEIKQALLTAPALGLPDLTKPFELFVDEKQGYAKGVLTQKLGPWRRPVAYLSKKLDPVAAGWPPCLRMVAAIAVLTKDAGKLTMGQPLVILAPHAVEALVKQPPDRWLSNARMTHYQALLLDTDRVQFGPVVALNPATLLPLPEEGLQHDCLDILAEAHGTRSDLMDQPLPDADHTWYTDGSSFLQEGQRKAGAAVTTETEVIWARALPAGTSAQRAELIALTQALKMAEGKKLNVYTDSRYAFATAHIHGEIYRRRGWLTSEGKEIKNKDEILALLKALFLPKRLSIIHCPGHQKGNSAEARGNRMADQAAREVATRETPETSTLLAGKRTADGSEFEKRTADGSEFESPKKKAKVE

SEQ ID NO: 2316 - protein, 2096 aa, synthetic construct
  source 1..2096: note = Description of Artificial Sequence: Synthetic polypeptide
MPAAKRVKLDGGDKKYSIGLDIGTNSVGWAVITDEYKVPSKKFKVLGNTDRHSIKKNLIGALLFDSGETAEATRLKRTARRRYTRRKNRICYLQEIFSNEMAKVDDSFFHRLEESFLVEEDKKHERHPIFGNIVDEVAYHEKYPTIYHLRKKLVDSTDKADLRLIYLALAHMIKFRGHFLIEGDLNPDNSDVDKLFIQLVQTYNQLFEENPINASGVDAKAILSARLSKSRRLENLIAQLPGEKKNGLFGNLIALSLGLTPNFKSNFDLAEDAKLQLSKDTYDDDLDNLLAQIGDQYADLFLAAKNLSDAILLSDILRVNTEITKAPLSASMIKRYDEHHQDLTLLKALVRQQLPEKYKEIFFDQSKNGYAGYIDGGASQEEFYKFIKPILEKMDGTEELLVKLNREDLLRKQRTFDNGSIPHQIHLGELHAILRRQEDFYPFLKDNREKIEKILTFRIPYYVGPLARGNSRFAWMTRKSEETITPWNFEEVVDKGASAQSFIERMTNFDKNLPNEKVLPKHSLLYEYFTVYNELTKVKYVTEGMRKPAFLSGEQKKAIVDLLFKTNRKVTVKQLKEDYFKKIECFDSVEISGVEDRFNASLGTYHDLLKIIKDKDFLDNEENEDILEDIVLTLTLFEDREMIEERLKTYAHLFDDKVMKQLKRRRYTGWGRLSRKLINGIRDKQSGKTILDFLKSDGFANRNFMQLIHDDSLTFKEDIQKAQVSGQGDSLHEHIANLAGSPAIKKGILQTVKVVDELVKVMGRHKPENIVIEMARENQTTQKGQKNSRERMKRIEEGIKELGSQILKEHPVENTQLQNEKLYLYYLQNGRDMYVDQELDINRLSDYDVDHIVPQSFLKDDSIDNKVLTRSDKARGKSDNVPSEEVVKKMKNYWRQLLNAKLITQRKFDNLTKAERGGLSELDKAGFIKRQLVETRQITKHVAQILDSRMNTKYDENDKLIREVKVITLKSKLVSDFRKDFQFYKVREINNYHHAHDAYLNAVVGTALIKKYPKLESEFVYGDYKVYDVRKMIAKSEQEIGKATAKYFFYSNIMNFFKTEITLANGEIRKRPLIETNGETGEIVWDKGRDFATVRKVLSMPQVNIVKKTEVQTGGFSKESILPKRNSDKLIARKKDWDPKKYGGFDSPTVAYSVLVVAKVEKGKSKKLKSVKELLGITIMERSSFEKNPIDFLEAKGYKEVKKDLIIKLPKYSLFELENGRKRMLASAGELQKGNELALPSKYVNFLYLASHYEKLKGSPEDNEQKQLFVEQHKHYLDEIIEQISEFSKRVILADANLDKVLSAYNKHRDKPIREQAENIIHLFTLTNLGAPAAFKYFDTTIDRKRYTSTKEVLDATLIHQSITGLYETRIDLSQLGGDGGGGGEAAAKGSSGGTLNIEDEYRLHETSKEPDVSLGSTWLSDFPQAWAETGGMGLAVRQAPLIIPLKATSTPVSIKQYPMSQEARLGIKPHIQRLLDQGILVPCQSPWNTPLLPVKKPGTNDYRPVQDLREVNKRVEDIHPTVPNPYNLLSGLPPSHQWYTVLDLKDAFFCLRLHPTSQPLFAFEWRDPEMGISGQLTWTRLPQGFKNSPTLFNEALHRDLAGFRIQHPDLILLQYVDDLLLAATSELDCQQGTRALLQTLGDLGYRASAKKAQICQKQVKYLGYLLKEGQRWLTEARKETVMGQPIPKTPRQLREFLGKAGFCRLFIPGFAEMAAPLYPLTKPGTLFNWGPDQQKAFQEIKQALLTAPALGLPDLTKPFELFVDEKQGYAKGVLTQKLGPWRRPVAYLSKKLDPVAAGWPPCLRMVAAIAVLTKDAGKLTMGQPLVILAPHAVEALVKQPPDRWLSNARMTHYQALLLDTDRVQFGPVVALNPATLLPLPEEGLQHDCLDILAEAHGTRSDLMDQPLPDADHTWYTDGSSFLQEGQRKAGAAVTTETEVIWARALPAGTSAQRAELIALTQALKMAEGKKLNVYTDSRYAFATAHIHGEIYRRRGWLTSEGKEIKNKDEILALLKALFLPKRLSIIHCPGHQKGNSAEARGNRMADQAAREVATRETPETSTLLAGKRTADGSEFEKRTADGSEFESPKKKAKVE

SEQ ID NO: 2317 - protein, 2094 aa, synthetic construct
  source 1..2094: note = Description of Artificial Sequence: Synthetic polypeptide
MPAAKRVKLDGGDKKYSIGLDIGTNSVGWAVITDEYKVPSKKFKVLGNTDRHSIKKNLIGALLFDSGETAEATRLKRTARRRYTRRKNRICYLQEIFSNEMAKVDDSFFHRLEESFLVEEDKKHERHPIFGNIVDEVAYHEKYPTIYHLRKKLVDSTDKADLRLIYLALAHMIKFRGHFLIEGDLNPDNSDVDKLFIQLVQTYNQLFEENPINASGVDAKAILSARLSKSRRLENLIAQLPGEKKNGLFGNLIALSLGLTPNFKSNFDLAEDAKLQLSKDTYDDDLDNLLAQIGDQYADLFLAAKNLSDAILLSDILRVNTEITKAPLSASMIKRYDEHHQDLTLLKALVRQQLPEKYKEIFFDQSKNGYAGYIDGGASQEEFYKFIKPILEKMDGTEELLVKLNREDLLRKQRTFDNGSIPHQIHLGELHAILRRQEDFYPFLKDNREKIEKILTFRIPYYVGPLARGNSRFAWMTRKSEETITPWNFEEVVDKGASAQSFIERMTNFDKNLPNEKVLPKHSLLYEYFTVYNELTKVKYVTEGMRKPAFLSGEQKKAIVDLLFKTNRKVTVKQLKEDYFKKIECFDSVEISGVEDRFNASLGTYHDLLKIIKDKDFLDNEENEDILEDIVLTLTLFEDREMIEERLKTYAHLFDDKVMKQLKRRRYTGWGRLSRKLINGIRDKQSGKTILDFLKSDGFANRNFMQLIHDDSLTFKEDIQKAQVSGQGDSLHEHIANLAGSPAIKKGILQTVKVVDELVKVMGRHKPENIVIEMARENQTTQKGQKNSRERMKRIEEGIKELGSQILKEHPVENTQLQNEKLYLYYLQNGRDMYVDQELDINRLSDYDVDHIVPQSFLKDDSIDNKVLTRSDKARGKSDNVPSEEVVKKMKNYWRQLLNAKLITQRKFDNLTKAERGGLSELDKAGFIKRQLVETRQITKHVAQILDSRMNTKYDENDKLIREVKVITLKSKLVSDFRKDFQFYKVREINNYHHAHDAYLNAVVGTALIKKYPKLESEFVYGDYKVYDVRKMIAKSEQEIGKATAKYFFYSNIMNFFKTEITLANGEIRKRPLIETNGETGEIVWDKGRDFATVRKVLSMPQVNIVKKTEVQTGGFSKESILPKRNSDKLIARKKDWDPKKYGGFDSPTVAYSVLVVAKVEKGKSKKLKSVKELLGITIMERSSFEKNPIDFLEAKGYKEVKKDLIIKLPKYSLFELENGRKRMLASAGELQKGNELALPSKYVNFLYLASHYEKLKGSPEDNEQKQLFVEQHKHYLDEIIEQISEFSKRVILADANLDKVLSAYNKHRDKPIREQAENIIHLFTLTNLGAPAAFKYFDTTIDRKRYTSTKEVLDATLIHQSITGLYETRIDLSQLGGDGGGGSGGGPAPGGTLNIEDEYRLHETSKEPDVSLGSTWLSDFPQAWAETGGMGLAVRQAPLIIPLKATSTPVSIKQYPMSQEARLGIKPHIQRLLDQGILVPCQSPWNTPLLPVKKPGTNDYRPVQDLREVNKRVEDIHPTVPNPYNLLSGLPPSHQWYTVLDLKDAFFCLRLHPTSQPLFAFEWRDPEMGISGQLTWTRLPQGFKNSPTLFNEALHRDLAGFRIQHPDLILLQYVDDLLLAATSELDCQQGTRALLQTLGDLGYRASAKKAQICQKQVKYLGYLLKEGQRWLTEARKETVMGQPIPKTPRQLREFLGKAGFCRLFIPGFAEMAAPLYPLTKPGTLFNWGPDQQKAFQEIKQALLTAPALGLPDLTKPFELFVDEKQGYAKGVLTQKLGPWRRPVAYLSKKLDPVAAGWPPCLRMVAAIAVLTKDAGKLTMGQPLVILAPHAVEALVKQPPDRWLSNARMTHYQALLLDTDRVQFGPVVALNPATLLPLPEEGLQHDCLDILAEAHGTRSDLMDQPLPDADHTWYTDGSSFLQEGQRKAGAAVTTETEVIWARALPAGTSAQRAELIALTQALKMAEGKKLNVYTDSRYAFATAHIHGEIYRRRGWLTSEGKEIKNKDEILALLKALFLPKRLSIIHCPGHQKGNSAEARGNRMADQAAREVATRETPETSTLLAGKRTADGSEFEKRTADGSEFESPKKKAKVE

SEQ ID NO: 2318 - protein, 2094 aa, synthetic construct
  source 1..2094: note = Description of Artificial Sequence: Synthetic polypeptide
MPAAKRVKLDGGDKKYSIGLDIGTNSVGWAVITDEYKVPSKKFKVLGNTDRHSIKKNLIGALLFDSGETAEATRLKRTARRRYTRRKNRICYLQEIFSNEMAKVDDSFFHRLEESFLVEEDKKHERHPIFGNIVDEVAYHEKYPTIYHLRKKLVDSTDKADLRLIYLALAHMIKFRGHFLIEGDLNPDNSDVDKLFIQLVQTYNQLFEENPINASGVDAKAILSARLSKSRRLENLIAQLPGEKKNGLFGNLIALSLGLTPNFKSNFDLAEDAKLQLSKDTYDDDLDNLLAQIGDQYADLFLAAKNLSDAILLSDILRVNTEITKAPLSASMIKRYDEHHQDLTLLKALVRQQLPEKYKEIFFDQSKNGYAGYIDGGASQEEFYKFIKPILEKMDGTEELLVKLNREDLLRKQRTFDNGSIPHQIHLGELHAILRRQEDFYPFLKDNREKIEKILTFRIPYYVGPLARGNSRFAWMTRKSEETITPWNFEEVVDKGASAQSFIERMTNFDKNLPNEKVLPKHSLLYEYFTVYNELTKVKYVTEGMRKPAFLSGEQKKAIVDLLFKTNRKVTVKQLKEDYFKKIECFDSVEISGVEDRFNASLGTYHDLLKIIKDKDFLDNEENEDILEDIVLTLTLFEDREMIEERLKTYAHLFDDKVMKQLKRRRYTGWGRLSRKLINGIRDKQSGKTILDFLKSDGFANRNFMQLIHDDSLTFKEDIQKAQVSGQGDSLHEHIANLAGSPAIKKGILQTVKVVDELVKVMGRHKPENIVIEMARENQTTQKGQKNSRERMKRIEEGIKELGSQILKEHPVENTQLQNEKLYLYYLQNGRDMYVDQELDINRLSDYDVDHIVPQSFLKDDSIDNKVLTRSDKARGKSDNVPSEEVVKKMKNYWRQLLNAKLITQRKFDNLTKAERGGLSELDKAGFIKRQLVETRQITKHVAQILDSRMNTKYDENDKLIREVKVITLKSKLVSDFRKDFQFYKVREINNYHHAHDAYLNAVVGTALIKKYPKLESEFVYGDYKVYDVRKMIAKSEQEIGKATAKYFFYSNIMNFFKTEITLANGEIRKRPLIETNGETGEIVWDKGRDFATVRKVLSMPQVNIVKKTEVQTGGFSKESILPKRNSDKLIARKKDWDPKKYGGFDSPTVAYSVLVVAKVEKGKSKKLKSVKELLGITIMERSSFEKNPIDFLEAKGYKEVKKDLIIKLPKYSLFELENGRKRMLASAGELQKGNELALPSKYVNFLYLASHYEKLKGSPEDNEQKQLFVEQHKHYLDEIIEQISEFSKRVILADANLDKVLSAYNKHRDKPIREQAENIIHLFTLTNLGAPAAFKYFDTTIDRKRYTSTKEVLDATLIHQSITGLYETRIDLSQLGGDGGPAPAPAPAPGGTLNIEDEYRLHETSKEPDVSLGSTWLSDFPQAWAETGGMGLAVRQAPLIIPLKATSTPVSIKQYPMSQEARLGIKPHIQRLLDQGILVPCQSPWNTPLLPVKKPGTNDYRPVQDLREVNKRVEDIHPTVPNPYNLLSGLPPSHQWYTVLDLKDAFFCLRLHPTSQPLFAFEWRDPEMGISGQLTWTRLPQGFKNSPTLFNEALHRDLAGFRIQHPDLILLQYVDDLLLAATSELDCQQGTRALLQTLGDLGYRASAKKAQICQKQVKYLGYLLKEGQRWLTEARKETVMGQPIPKTPRQLREFLGKAGFCRLFIPGFAEMAAPLYPLTKPGTLFNWGPDQQKAFQEIKQALLTAPALGLPDLTKPFELFVDEKQGYAKGVLTQKLGPWRRPVAYLSKKLDPVAAGWPPCLRMVAAIAVLTKDAGKLTMGQPLVILAPHAVEALVKQPPDRWLSNARMTHYQALLLDTDRVQFGPVVALNPATLLPLPEEGLQHDCLDILAEAHGTRSDLMDQPLPDADHTWYTDGSSFLQEGQRKAGAAVTTETEVIWARALPAGTSAQRAELIALTQALKMAEGKKLNVYTDSRYAFATAHIHGEIYRRRGWLTSEGKEIKNKDEILALLKALFLPKRLSIIHCPGHQKGNSAEARGNRMADQAAREVATRETPETSTLLAGKRTADGSEFEKRTADGSEFESPKKKAKVE

SEQ ID NO: 2319 - protein, 2097 aa, synthetic construct
  source 1..2097: note = Description of Artificial Sequence: Synthetic polypeptide
MPAAKRVKLDGGDKKYSIGLDIGTNSVGWAVITDEYKVPSKKFKVLGNTDRHSIKKNLIGALLFDSGETAEATRLKRTARRRYTRRKNRICYLQEIFSNEMAKVDDSFFHRLEESFLVEEDKKHERHPIFGNIVDEVAYHEKYPTIYHLRKKLVDSTDKADLRLIYLALAHMIKFRGHFLIEGDLNPDNSDVDKLFIQLVQTYNQLFEENPINASGVDAKAILSARLSKSRRLENLIAQLPGEKKNGLFGNLIALSLGLTPNFKSNFDLAEDAKLQLSKDTYDDDLDNLLAQIGDQYADLFLAAKNLSDAILLSDILRVNTEITKAPLSASMIKRYDEHHQDLTLLKALVRQQLPEKYKEIFFDQSKNGYAGYIDGGASQEEFYKFIKPILEKMDGTEELLVKLNREDLLRKQRTFDNGSIPHQIHLGELHAILRRQEDFYPFLKDNREKIEKILTFRIPYYVGPLARGNSRFAWMTRKSEETITPWNFEEVVDKGASAQSFIERMTNFDKNLPNEKVLPKHSLLYEYFTVYNELTKVKYVTEGMRKPAFLSGEQKKAIVDLLFKTNRKVTVKQLKEDYFKKIECFDSVEISGVEDRFNASLGTYHDLLKIIKDKDFLDNEENEDILEDIVLTLTLFEDREMIEERLKTYAHLFDDKVMKQLKRRRYTGWGRLSRKLINGIRDKQSGKTILDFLKSDGFANRNFMQLIHDDSLTFKEDIQKAQVSGQGDSLHEHIANLAGSPAIKKGILQTVKVVDELVKVMGRHKPENIVIEMARENQTTQKGQKNSRERMKRIEEGIKELGSQILKEHPVENTQLQNEKLYLYYLQNGRDMYVDQELDINRLSDYDVDHIVPQSFLKDDSIDNKVLTRSDKARGKSDNVPSEEVVKKMKNYWRQLLNAKLITQRKFDNLTKAERGGLSELDKAGFIKRQLVETRQITKHVAQILDSRMNTKYDENDKLIREVKVITLKSKLVSDFRKDFQFYKVREINNYHHAHDAYLNAVVGTALIKKYPKLESEFVYGDYKVYDVRKMIAKSEQEIGKATAKYFFYSNIMNFFKTEITLANGEIRKRPLIETNGETGEIVWDKGRDFATVRKVLSMPQVNIVKKTEVQTGGFSKESILPKRNSDKLIARKKDWDPKKYGGFDSPTVAYSVLVVAKVEKGKSKKLKSVKELLGITIMERSSFEKNPIDFLEAKGYKEVKKDLIIKLPKYSLFELENGRKRMLASAGELQKGNELALPSKYVNFLYLASHYEKLKGSPEDNEQKQLFVEQHKHYLDEIIEQISEFSKRVILADANLDKVLSAYNKHRDKPIREQAENIIHLFTLTNLGAPAAFKYFDTTIDRKRYTSTKEVLDATLIHQSITGLYETRIDLSQLGGDGGGGSGGSGGSGGSGGTLNIEDEYRLHETSKEPDVSLGSTWLSDFPQAWAETGGMGLAVRQAPLIIPLKATSTPVSIKQYPMSQEARLGIKPHIQRLLDQGILVPCQSPWNTPLLPVKKPGTNDYRPVQDLREVNKRVEDIHPTVPNPYNLLSGLPPSHQWYTVLDLKDAFFCLRLHPTSQPLFAFEWRDPEMGISGQLTWTRLPQGFKNSPTLFNEALHRDLAGFRIQHPDLILLQYVDDLLLAATSELDCQQGTRALLQTLGDLGYRASAKKAQICQKQVKYLGYLLKEGQRWLTEARKETVMGQPIPKTPRQLREFLGKAGFCRLFIPGFAEMAAPLYPLTKPGTLFNWGPDQQKAFQEIKQALLTAPALGLPDLTKPFELFVDEKQGYAKGVLTQKLGPWRRPVAYLSKKLDPVAAGWPPCLRMVAAIAVLTKDAGKLTMGQPLVILAPHAVEALVKQPPDRWLSNARMTHYQALLLDTDRVQFGPVVALNPATLLPLPEEGLQHDCLDILAEAHGTRSDLMDQPLPDADHTWYTDGSSFLQEGQRKAGAAVTTETEVIWARALPAGTSAQRAELIALTQALKMAEGKKLNVYTDSRYAFATAHIHGEIYRRRGWLTSEGKEIKNKDEILALLKALFLPKRLSIIHCPGHQKGNSAEARGNRMADQAAREVATRETPETSTLLAGKRTADGSEFEKRTADGSEFESPKKKAKVE

SEQ ID NO: 2320 - protein, 2094 aa, synthetic construct
  source 1..2094: note = Description of Artificial Sequence: Synthetic polypeptide
MPAAKRVKLDGGDKKYSIGLDIGTNSVGWAVITDEYKVPSKKFKVLGNTDRHSIKKNLIGALLFDSGETAEATRLKRTARRRYTRRKNRICYLQEIFSNEMAKVDDSFFHRLEESFLVEEDKKHERHPIFGNIVDEVAYHEKYPTIYHLRKKLVDSTDKADLRLIYLALAHMIKFRGHFLIEGDLNPDNSDVDKLFIQLVQTYNQLFEENPINASGVDAKAILSARLSKSRRLENLIAQLPGEKKNGLFGNLIALSLGLTPNFKSNFDLAEDAKLQLSKDTYDDDLDNLLAQIGDQYADLFLAAKNLSDAILLSDILRVNTEITKAPLSASMIKRYDEHHQDLTLLKALVRQQLPEKYKEIFFDQSKNGYAGYIDGGASQEEFYKFIKPILEKMDGTEELLVKLNREDLLRKQRTFDNGSIPHQIHLGELHAILRRQEDFYPFLKDNREKIEKILTFRIPYYVGPLARGNSRFAWMTRKSEETITPWNFEEVVDKGASAQSFIERMTNFDKNLPNEKVLPKHSLLYEYFTVYNELTKVKYVTEGMRKPAFLSGEQKKAIVDLLFKTNRKVTVKQLKEDYFKKIECFDSVEISGVEDRFNASLGTYHDLLKIIKDKDFLDNEENEDILEDIVLTLTLFEDREMIEERLKTYAHLFDDKVMKQLKRRRYTGWGRLSRKLINGIRDKQSGKTILDFLKSDGFANRNFMQLIHDDSLTFKEDIQKAQVSGQGDSLHEHIANLAGSPAIKKGILQTVKVVDELVKVMGRHKPENIVIEMARENQTTQKGQKNSRERMKRIEEGIKELGSQILKEHPVENTQLQNEKLYLYYLQNGRDMYVDQELDINRLSDYDVDHIVPQSFLKDDSIDNKVLTRSDKARGKSDNVPSEEVVKKMKNYWRQLLNAKLITQRKFDNLTKAERGGLSELDKAGFIKRQLVETRQITKHVAQILDSRMNTKYDENDKLIREVKVITLKSKLVSDFRKDFQFYKVREINNYHHAHDAYLNAVVGTALIKKYPKLESEFVYGDYKVYDVRKMIAKSEQEIGKATAKYFFYSNIMNFFKTEITLANGEIRKRPLIETNGETGEIVWDKGRDFATVRKVLSMPQVNIVKKTEVQTGGFSKESILPKRNSDKLIARKKDWDPKKYGGFDSPTVAYSVLVVAKVEKGKSKKLKSVKELLGITIMERSSFEKNPIDFLEAKGYKEVKKDLIIKLPKYSLFELENGRKRMLASAGELQKGNELALPSKYVNFLYLASHYEKLKGSPEDNEQKQLFVEQHKHYLDEIIEQISEFSKRVILADANLDKVLSAYNKHRDKPIREQAENIIHLFTLTNLGAPAAFKYFDTTIDRKRYTSTKEVLDATLIHQSITGLYETRIDLSQLGGDGGGGGPAPGGSGGTLNIEDEYRLHETSKEPDVSLGSTWLSDFPQAWAETGGMGLAVRQAPLIIPLKATSTPVSIKQYPMSQEARLGIKPHIQRLLDQGILVPCQSPWNTPLLPVKKPGTNDYRPVQDLREVNKRVEDIHPTVPNPYNLLSGLPPSHQWYTVLDLKDAFFCLRLHPTSQPLFAFEWRDPEMGISGQLTWTRLPQGFKNSPTLFNEALHRDLAGFRIQHPDLILLQYVDDLLLAATSELDCQQGTRALLQTLGDLGYRASAKKAQICQKQVKYLGYLLKEGQRWLTEARKETVMGQPIPKTPRQLREFLGKAGFCRLFIPGFAEMAAPLYPLTKPGTLFNWGPDQQKAFQEIKQALLTAPALGLPDLTKPFELFVDEKQGYAKGVLTQKLGPWRRPVAYLSKKLDPVAAGWPPCLRMVAAIAVLTKDAGKLTMGQPLVILAPHAVEALVKQPPDRWLSNARMTHYQALLLDTDRVQFGPVVALNPATLLPLPEEGLQHDCLDILAEAHGTRSDLMDQPLPDADHTWYTDGSSFLQEGQRKAGAAVTTETEVIWARALPAGTSAQRAELIALTQALKMAEGKKLNVYTDSRYAFATAHIHGEIYRRRGWLTSEGKEIKNKDEILALLKALFLPKRLSIIHCPGHQKGNSAEARGNRMADQAAREVATRETPETSTLLAGKRTADGSEFEKRTADGSEFESPKKKAKVE

SEQ ID NO: 2321 - protein, 2094 aa, synthetic construct
  source 1..2094: note = Description of Artificial Sequence: Synthetic polypeptide
MPAAKRVKLDGGDKKYSIGLDIGTNSVGWAVITDEYKVPSKKFKVLGNTDRHSIKKNLIGALLFDSGETAEATRLKRTARRRYTRRKNRICYLQEIFSNEMAKVDDSFFHRLEESFLVEEDKKHERHPIFGNIVDEVAYHEKYPTIYHLRKKLVDSTDKADLRLIYLALAHMIKFRGHFLIEGDLNPDNSDVDKLFIQLVQTYNQLFEENPINASGVDAKAILSARLSKSRRLENLIAQLPGEKKNGLFGNLIALSLGLTPNFKSNFDLAEDAKLQLSKDTYDDDLDNLLAQIGDQYADLFLAAKNLSDAILLSDILRVNTEITKAPLSASMIKRYDEHHQDLTLLKALVRQQLPEKYKEIFFDQSKNGYAGYIDGGASQEEFYKFIKPILEKMDGTEELLVKLNREDLLRKQRTFDNGSIPHQIHLGELHAILRRQEDFYPFLKDNREKIEKILTFRIPYYVGPLARGNSRFAWMTRKSEETITPWNFEEVVDKGASAQSFIERMTNFDKNLPNEKVLPKHSLLYEYFTVYNELTKVKYVTEGMRKPAFLSGEQKKAIVDLLFKTNRKVTVKQLKEDYFKKIECFDSVEISGVEDRFNASLGTYHDLLKIIKDKDFLDNEENEDILEDIVLTLTLFEDREMIEERLKTYAHLFDDKVMKQLKRRRYTGWGRLSRKLINGIRDKQSGKTILDFLKSDGFANRNFMQLIHDDSLTFKEDIQKAQVSGQGDSLHEHIANLAGSPAIKKGILQTVKVVDELVKVMGRHKPENIVIEMARENQTTQKGQKNSRERMKRIEEGIKELGSQILKEHPVENTQLQNEKLYLYYLQNGRDMYVDQELDINRLSDYDVDHIVPQSFLKDDSIDNKVLTRSDKARGKSDNVPSEEVVKKMKNYWRQLLNAKLITQRKFDNLTKAERGGLSELDKAGFIKRQLVETRQITKHVAQILDSRMNTKYDENDKLIREVKVITLKSKLVSDFRKDFQFYKVREINNYHHAHDAYLNAVVGTALIKKYPKLESEFVYGDYKVYDVRKMIAKSEQEIGKATAKYFFYSNIMNFFKTEITLANGEIRKRPLIETNGETGEIVWDKGRDFATVRKVLSMPQVNIVKKTEVQTGGFSKESILPKRNSDKLIARKKDWDPKKYGGFDSPTVAYSVLVVAKVEKGKSKKLKSVKELLGITIMERSSFEKNPIDFLEAKGYKEVKKDLIIKLPKYSLFELENGRKRMLASAGELQKGNELALPSKYVNFLYLASHYEKLKGSPEDNEQKQLFVEQHKHYLDEIIEQISEFSKRVILADANLDKVLSAYNKHRDKPIREQAENIIHLFTLTNLGAPAAFKYFDTTIDRKRYTSTKEVLDATLIHQSITGLYETRIDLSQLGGDGGPAPGGSGSSGGTLNIEDEYRLHETSKEPDVSLGSTWLSDFPQAWAETGGMGLAVRQAPLIIPLKATSTPVSIKQYPMSQEARLGIKPHIQRLLDQGILVPCQSPWNTPLLPVKKPGTNDYRPVQDLREVNKRVEDIHPTVPNPYNLLSGLPPSHQWYTVLDLKDAFFCLRLHPTSQPLFAFEWRDPEMGISGQLTWTRLPQGFKNSPTLFNEALHRDLAGFRIQHPDLILLQYVDDLLLAATSELDCQQGTRALLQTLGDLGYRASAKKAQICQKQVKYLGYLLKEGQRWLTEARKETVMGQPIPKTPRQLREFLGKAGFCRLFIPGFAEMAAPLYPLTKPGTLFNWGPDQQKAFQEIKQALLTAPALGLPDLTKPFELFVDEKQGYAKGVLTQKLGPWRRPVAYLSKKLDPVAAGWPPCLRMVAAIAVLTKDAGKLTMGQPLVILAPHAVEALVKQPPDRWLSNARMTHYQALLLDTDRVQFGPVVALNPATLLPLPEEGLQHDCLDILAEAHGTRSDLMDQPLPDADHTWYTDGSSFLQEGQRKAGAAVTTETEVIWARALPAGTSAQRAELIALTQALKMAEGKKLNVYTDSRYAFATAHIHGEIYRRRGWLTSEGKEIKNKDEILALLKALFLPKRLSIIHCPGHQKGNSAEARGNRMADQAAREVATRETPETSTLLAGKRTADGSEFEKRTADGSEFESPKKKAKVE

SEQ ID NO: 2322 - protein, 2115 aa, synthetic construct
  source 1..2115: note = Description of Artificial Sequence: Synthetic polypeptide
MPAAKRVKLDGGDKKYSIGLDIGTNSVGWAVITDEYKVPSKKFKVLGNTDRHSIKKNLIGALLFDSGETAEATRLKRTARRRYTRRKNRICYLQEIFSNEMAKVDDSFFHRLEESFLVEEDKKHERHPIFGNIVDEVAYHEKYPTIYHLRKKLVDSTDKADLRLIYLALAHMIKFRGHFLIEGDLNPDNSDVDKLFIQLVQTYNQLFEENPINASGVDAKAILSARLSKSRRLENLIAQLPGEKKNGLFGNLIALSLGLTPNFKSNFDLAEDAKLQLSKDTYDDDLDNLLAQIGDQYADLFLAAKNLSDAILLSDILRVNTEITKAPLSASMIKRYDEHHQDLTLLKALVRQQLPEKYKEIFFDQSKNGYAGYIDGGASQEEFYKFIKPILEKMDGTEELLVKLNREDLLRKQRTFDNGSIPHQIHLGELHAILRRQEDFYPFLKDNREKIEKILTFRIPYYVGPLARGNSRFAWMTRKSEETITPWNFEEVVDKGASAQSFIERMTNFDKNLPNEKVLPKHSLLYEYFTVYNELTKVKYVTEGMRKPAFLSGEQKKAIVDLLFKTNRKVTVKQLKEDYFKKIECFDSVEISGVEDRFNASLGTYHDLLKIIKDKDFLDNEENEDILEDIVLTLTLFEDREMIEERLKTYAHLFDDKVMKQLKRRRYTGWGRLSRKLINGIRDKQSGKTILDFLKSDGFANRNFMQLIHDDSLTFKEDIQKAQVSGQGDSLHEHIANLAGSPAIKKGILQTVKVVDELVKVMGRHKPENIVIEMARENQTTQKGQKNSRERMKRIEEGIKELGSQILKEHPVENTQLQNEKLYLYYLQNGRDMYVDQELDINRLSDYDVDHIVPQSFLKDDSIDNKVLTRSDKARGKSDNVPSEEVVKKMKNYWRQLLNAKLITQRKFDNLTKAERGGLSELDKAGFIKRQLVETRQITKHVAQILDSRMNTKYDENDKLIREVKVITLKSKLVSDFRKDFQFYKVREINNYHHAHDAYLNAVVGTALIKKYPKLESEFVYGDYKVYDVRKMIAKSEQEIGKATAKYFFYSNIMNFFKTEITLANGEIRKRPLIETNGETGEIVWDKGRDFATVRKVLSMPQVNIVKKTEVQTGGFSKESILPKRNSDKLIARKKDWDPKKYGGFDSPTVAYSVLVVAKVEKGKSKKLKSVKELLGITIMERSSFEKNPIDFLEAKGYKEVKKDLIIKLPKYSLFELENGRKRMLASAGELQKGNELALPSKYVNFLYLASHYEKLKGSPEDNEQKQLFVEQHKHYLDEIIEQISEFSKRVILADANLDKVLSAYNKHRDKPIREQAENIIHLFTLTNLGAPAAFKYFDTTIDRKRYTSTKEVLDATLIHQSITGLYETRIDLSQLGGDGGEAAAKEAAAKEAAAKEAAAKEAAAKEAAAKGGTLNIEDEYRLHETSKEPDVSLGSTWLSDFPQAWAETGGMGLAVRQAPLIIPLKATSTPVSIKQYPMSQEARLGIKPHIQRLLDQGILVPCQSPWNTPLLPVKKPGTNDYRPVQDLREVNKRVEDIHPTVPNPYNLLSGLPPSHQWYTVLDLKDAFFCLRLHPTSQPLFAFEWRDPEMGISGQLTWTRLPQGFKNSPTLFNEALHRDLAGFRIQHPDLILLQYVDDLLLAATSELDCQQGTRALLQTLGDLGYRASAKKAQICQKQVKYLGYLLKEGQRWLTEARKETVMGQPIPKTPRQLREFLGKAGFCRLFIPGFAEMAAPLYPLTKPGTLFNWGPDQQKAFQEIKQALLTAPALGLPDLTKPFELFVDEKQGYAKGVLTQKLGPWRRPVAYLSKKLDPVAAGWPPCLRMVAAIAVLTKDAGKLTMGQPLVILAPHAVEALVKQPPDRWLSNARMTHYQALLLDTDRVQFGPVVALNPATLLPLPEEGLQHDCLDILAEAHGTRSDLMDQPLPDADHTWYTDGSSFLQEGQRKAGAAVTTETEVIWARALPAGTSAQRAELIALTQALKMAEGKKLNVYTDSRYAFATAHIHGEIYRRRGWLTSEGKEIKNKDEILALLKALFLPKRLSIIHCPGHQKGNSAEARGNRMADQAAREVATRETPETSTLLAGKRTADGSEFEKRTADGSEFESPKKKAKVE

SEQ ID NO: 2323 - protein, 2088 aa, synthetic construct
  source 1..2088: note = Description of Artificial Sequence: Synthetic polypeptide
MPAAKRVKLDGGDKKYSIGLDIGTNSVGWAVITDEYKVPSKKFKVLGNTDRHSIKKNLIGALLFDSGETAEATRLKRTARRRYTRRKNRICYLQEIFSNEMAKVDDSFFHRLEESFLVEEDKKHERHPIFGNIVDEVAYHEKYPTIYHLRKKLVDSTDKADLRLIYLALAHMIKFRGHFLIEGDLNPDNSDVDKLFIQLVQTYNQLFEENPINASGVDAKAILSARLSKSRRLENLIAQLPGEKKNGLFGNLIALSLGLTPNFKSNFDLAEDAKLQLSKDTYDDDLDNLLAQIGDQYADLFLAAKNLSDAILLSDILRVNTEITKAPLSASMIKRYDEHHQDLTLLKALVRQQLPEKYKEIFFDQSKNGYAGYIDGGASQEEFYKFIKPILEKMDGTEELLVKLNREDLLRKQRTFDNGSIPHQIHLGELHAILRRQEDFYPFLKDNREKIEKILTFRIPYYVGPLARGNSRFAWMTRKSEETITPWNFEEVVDKGASAQSFIERMTNFDKNLPNEKVLPKHSLLYEYFTVYNELTKVKYVTEGMRKPAFLSGEQKKAIVDLLFKTNRKVTVKQLKEDYFKKIECFDSVEISGVEDRFNASLGTYHDLLKIIKDKDFLDNEENEDILEDIVLTLTLFEDREMIEERLKTYAHLFDDKVMKQLKRRRYTGWGRLSRKLINGIRDKQSGKTILDFLKSDGFANRNFMQLIHDDSLTFKEDIQKAQVSGQGDSLHEHIANLAGSPAIKKGILQTVKVVDELVKVMGRHKPENIVIEMARENQTTQKGQKNSRERMKRIEEGIKELGSQILKEHPVENTQLQNEKLYLYYLQNGRDMYVDQELDINRLSDYDVDHIVPQSFLKDDSIDNKVLTRSDKARGKSDNVPSEEVVKKMKNYWRQLLNAKLITQRKFDNLTKAERGGLSELDKAGFIKRQLVETRQITKHVAQILDSRMNTKYDENDKLIREVKVITLKSKLVSDFRKDFQFYKVREINNYHHAHDAYLNAVVGTALIKKYPKLESEFVYGDYKVYDVRKMIAKSEQEIGKATAKYFFYSNIMNFFKTEITLANGEIRKRPLIETNGETGEIVWDKGRDFATVRKVLSMPQVNIVKKTEVQTGGFSKESILPKRNSDKLIARKKDWDPKKYGGFDSPTVAYSVLVVAKVEKGKSKKLKSVKELLGITIMERSSFEKNPIDFLEAKGYKEVKKDLIIKLPKYSLFELENGRKRMLASAGELQKGNELALPSKYVNFLYLASHYEKLKGSPEDNEQKQLFVEQHKHYLDEIIEQISEFSKRVILADANLDKVLSAYNKHRDKPIREQAENIIHLFTLTNLGAPAAFKYFDTTIDRKRYTSTKEVLDATLIHQSITGLYETRIDLSQLGGDGGGGSGGTLNIEDEYRLHETSKEPDVSLGSTWLSDFPQAWAETGGMGLAVRQAPLIIPLKATSTPVSIKQYPMSQEARLGIKPHIQRLLDQGILVPCQSPWNTPLLPVKKPGTNDYRPVQDLREVNKRVEDIHPTVPNPYNLLSGLPPSHQWYTVLDLKDAFFCLRLHPTSQPLFAFEWRDPEMGISGQLTWTRLPQGFKNSPTLFNEALHRDLAGFRIQHPDLILLQYVDDLLLAATSELDCQQGTRALLQTLGDLGYRASAKKAQICQKQVKYLGYLLKEGQRWLTEARKETVMGQPIPKTPRQLREFLGKAGFCRLFIPGFAEMAAPLYPLTKPGTLFNWGPDQQKAFQEIKQALLTAPALGLPDLTKPFELFVDEKQGYAKGVLTQKLGPWRRPVAYLSKKLDPVAAGWPPCLRMVAAIAVLTKDAGKLTMGQPLVILAPHAVEALVKQPPDRWLSNARMTHYQALLLDTDRVQFGPVVALNPATLLPLPEEGLQHDCLDILAEAHGTRSDLMDQPLPDADHTWYTDGSSFLQEGQRKAGAAVTTETEVIWARALPAGTSAQRAELIALTQALKMAEGKKLNVYTDSRYAFATAHIHGEIYRRRGWLTSEGKEIKNKDEILALLKALFLPKRLSIIHCPGHQKGNSAEARGNRMADQAAREVATRETPETSTLLAGKRTADGSEFEKRTADGSEFESPKKKAKVE

SEQ ID NO: 2324 - protein, 2110 aa, synthetic construct
  source 1..2110: note = Description of Artificial Sequence: Synthetic polypeptide
MPAAKRVKLDGGDKKYSIGLDIGTNSVGWAVITDEYKVPSKKFKVLGNTDRHSIKKNLIGALLFDSGETAEATRLKRTARRRYTRRKNRICYLQEIFSNEMAKVDDSFFHRLEESFLVEEDKKHERHPIFGNIVDEVAYHEKYPTIYHLRKKLVDSTDKADLRLIYLALAHMIKFRGHFLIEGDLNPDNSDVDKLFIQLVQTYNQLFEENPINASGVDAKAILSARLSKSRRLENLIAQLPGEKKNGLFGNLIALSLGLTPNFKSNFDLAEDAKLQLSKDTYDDDLDNLLAQIGDQYADLFLAAKNLSDAILLSDILRVNTEITKAPLSASMIKRYDEHHQDLTLLKALVRQQLPEKYKEIFFDQSKNGYAGYIDGGASQEEFYKFIKPILEKMDGTEELLVKLNREDLLRKQRTFDNGSIPHQIHLGELHAILRRQEDFYPFLKDNREKIEKILTFRIPYYVGPLARGNSRFAWMTRKSEETITPWNFEEVVDKGASAQSFIERMTNFDKNLPNEKVLPKHSLLYEYFTVYNELTKVKYVTEGMRKPAFLSGEQKKAIVDLLFKTNRKVTVKQLKEDYFKKIECFDSVEISGVEDRFNASLGTYHDLLKIIKDKDFLDNEENEDILEDIVLTLTLFEDREMIEERLKTYAHLFDDKVMKQLKRRRYTGWGRLSRKLINGIRDKQSGKTILDFLKSDGFANRNFMQLIHDDSLTFKEDIQKAQVSGQGDSLHEHIANLAGSPAIKKGILQTVKVVDELVKVMGRHKPENIVIEMARENQTTQKGQKNSRERMKRIEEGIKELGSQILKEHPVENTQLQNEKLYLYYLQNGRDMYVDQELDINRLSDYDVDHIVPQSFLKDDSIDNKVLTRSDKARGKSDNVPSEEVVKKMKNYWRQLLNAKLITQRKFDNLTKAERGGLSELDKAGFIKRQLVETRQITKHVAQILDSRMNTKYDENDKLIREVKVITLKSKLVSDFRKDFQFYKVREINNYHHAHDAYLNAVVGTALIKKYPKLESEFVYGDYKVYDVRKMIAKSEQEIGKATAKYFFYSNIMNFFKTEITLANGEIRKRPLIETNGETGEIVWDKGRDFATVRKVLSMPQVNIVKKTEVQTGGFSKESILPKRNSDKLIARKKDWDPKKYGGFDSPTVAYSVLVVAKVEKGKSKKLKSVKELLGITIMERSSFEKNPIDFLEAKGYKEVKKDLIIKLPKYSLFELENGRKRMLASAGELQKGNELALPSKYVNFLYLASHYEKLKGSPEDNEQKQLFVEQHKHYLDEIIEQISEFSKRVILADANLDKVLSAYNKHRDKPIREQAENIIHLFTLTNLGAPAAFKYFDTTIDRKRYTSTKEVLDATLIHQSITGLYETRIDLSQLGGDGGEAAAKEAAAKEAAAKEAAAKEAAAKGGTLNIEDEYRLHETSKEPDVSLGSTWLSDFPQAWAETGGMGLAVRQAPLIIPLKATSTPVSIKQYPMSQEARLGIKPHIQRLLDQGILVPCQSPWNTPLLPVKKPGTNDYRPVQDLREVNKRVEDIHPTVPNPYNLLSGLPPSHQWYTVLDLKDAFFCLRLHPTSQPLFAFEWRDPEMGISGQLTWTRLPQGFKNSPTLFNEALHRDLAGFRIQHPDLILLQYVDDLLLAATSELDCQQGTRALLQTLGDLGYRASAKKAQICQKQVKYLGYLLKEGQRWLTEARKETVMGQPIPKTPRQLREFLGKAGFCRLFIPGFAEMAAPLYPLTKPGTLFNWGPDQQKAFQEIKQALLTAPALGLPDLTKPFELFVDEKQGYAKGVLTQKLGPWRRPVAYLSKKLDPVAAGWPPCLRMVAAIAVLTKDAGKLTMGQPLVILAPHAVEALVKQPPDRWLSNARMTHYQALLLDTDRVQFGPVVALNPATLLPLPEEGLQHDCLDILAEAHGTRSDLMDQPLPDADHTWYTDGSSFLQEGQRKAGAAVTTETEVIWARALPAGTSAQRAELIALTQALKMAEGKKLNVYTDSRYAFATAHIHGEIYRRRGWLTSEGKEIKNKDEILALLKALFLPKRLSIIHCPGHQKGNSAEARGNRMADQAAREVATRETPETSTLLAGKRTADGSEFEKRTADGSEFESPKKKAKVE

SEQ ID NO: 2325 - protein, 2105 aa, synthetic construct
  source 1..2105: note = Description of Artificial Sequence: Synthetic polypeptide
MPAAKRVKLDGGDKKYSIGLDIGTNSVGWAVITDEYKVPSKKFKVLGNTDRHSIKKNLIGALLFDSGETAEATRLKRTARRRYTRRKNRICYLQEIFSNEMAKVDDSFFHRLEESFLVEEDKKHERHPIFGNIVDEVAYHEKYPTIYHLRKKLVDSTDKADLRLIYLALAHMIKFRGHFLIEGDLNPDNSDVDKLFIQLVQTYNQLFEENPINASGVDAKAILSARLSKSRRLENLIAQLPGEKKNGLFGNLIALSLGLTPNFKSNFDLAEDAKLQLSKDTYDDDLDNLLAQIGDQYADLFLAAKNLSDAILLSDILRVNTEITKAPLSASMIKRYDEHHQDLTLLKALVRQQLPEKYKEIFFDQSKNGYAGYIDGGASQEEFYKFIKPILEKMDGTEELLVKLNREDLLRKQRTFDNGSIPHQIHLGELHAILRRQEDFYPFLKDNREKIEKILTFRIPYYVGPLARGNSRFAWMTRKSEETITPWNFEEVVDKGASAQSFIERMTNFDKNLPNEKVLPKHSLLYEYFTVYNELTKVKYVTEGMRKPAFLSGEQKKAIVDLLFKTNRKVTVKQLKEDYFKKIECFDSVEISGVEDRFNASLGTYHDLLKIIKDKDFLDNEENEDILEDIVLTLTLFEDREMIEERLKTYAHLFDDKVMKQLKRRRYTGWGRLSRKLINGIRDKQSGKTILDFLKSDGFANRNFMQLIHDDSLTFKEDIQKAQVSGQGDSLHEHIANLAGSPAIKKGILQTVKVVDELVKVMGRHKPENIVIEMARENQTTQKGQKNSRERMKRIEEGIKELGSQILKEHPVENTQLQNEKLYLYYLQNGRDMYVDQELDINRLSDYDVDHIVPQSFLKDDSIDNKVLTRSDKARGKSDNVPSEEVVKKMKNYWRQLLNAKLITQRKFDNLTKAERGGLSELDKAGFIKRQLVETRQITKHVAQILDSRMNTKYDENDKLIREVKVITLKSKLVSDFRKDFQFYKVREINNYHHAHDAYLNAVVGTALIKKYPKLESEFVYGDYKVYDVRKMIAKSEQEIGKATAKYFFYSNIMNFFKTEITLANGEIRKRPLIETNGETGEIVWDKGRDFATVRKVLSMPQVNIVKKTEVQTGGFSKESILPKRNSDKLIARKKDWDPKKYGGFDSPTVAYSVLVVAKVEKGKSKKLKSVKELLGITIMERSSFEKNPIDFLEAKGYKEVKKDLIIKLPKYSLFELENGRKRMLASAGELQKGNELALPSKYVNFLYLASHYEKLKGSPEDNEQKQLFVEQHKHYLDEIIEQISEFSKRVILADANLDKVLSAYNKHRDKPIREQAENIIHLFTLTNLGAPAAFKYFDTTIDRKRYTSTKEVLDATLIHQSITGLYETRIDLSQLGGDGGEAAAKEAAAKEAAAKEAAAKGGTLNIEDEYRLHETSKEPDVSLGSTWLSDFPQAWAETGGMGLAVRQAPLIIPLKATSTPVSIKQYPMSQEARLGIKPHIQRLLDQGILVPCQSPWNTPLLPVKKPGTNDYRPVQDLREVNKRVEDIHPTVPNPYNLLSGLPPSHQWYTVLDLKDAFFCLRLHPTSQPLFAFEWRDPEMGISGQLTWTRLPQGFKNSPTLFNEALHRDLAGFRIQHPDLILLQYVDDLLLAATSELDCQQGTRALLQTLGDLGYRASAKKAQICQKQVKYLGYLLKEGQRWLTEARKETVMGQPIPKTPRQLREFLGKAGFCRLFIPGFAEMAAPLYPLTKPGTLFNWGPDQQKAFQEIKQALLTAPALGLPDLTKPFELFVDEKQGYAKGVLTQKLGPWRRPVAYLSKKLDPVAAGWPPCLRMVAAIAVLTKDAGKLTMGQPLVILAPHAVEALVKQPPDRWLSNARMTHYQALLLDTDRVQFGPVVALNPATLLPLPEEGLQHDCLDILAEAHGTRSDLMDQPLPDADHTWYTDGSSFLQEGQRKAGAAVTTETEVIWARALPAGTSAQRAELIALTQALKMAEGKKLNVYTDSRYAFATAHIHGEIYRRRGWLTSEGKEIKNKDEILALLKALFLPKRLSIIHCPGHQKGNSAEARGNRMADQAAREVATRETPETSTLLAGKRTADGSEFEKRTADGSEFESPKKKAKVE

SEQ ID NO: 2326 - protein, 2096 aa, synthetic construct
  source 1..2096: note = Description of Artificial Sequence: Synthetic polypeptide
MPAAKRVKLDGGDKKYSIGLDIGTNSVGWAVITDEYKVPSKKFKVLGNTDRHSIKKNLIGALLFDSGETAEATRLKRTARRRYTRRKNRICYLQEIFSNEMAKVDDSFFHRLEESFLVEEDKKHERHPIFGNIVDEVAYHEKYPTIYHLRKKLVDSTDKADLRLIYLALAHMIKFRGHFLIEGDLNPDNSDVDKLFIQLVQTYNQLFEENPINASGVDAKAILSARLSKSRRLENLIAQLPGEKKNGLFGNLIALSLGLTPNFKSNFDLAEDAKLQLSKDTYDDDLDNLLAQIGDQYADLFLAAKNLSDAILLSDILRVNTEITKAPLSASMIKRYDEHHQDLTLLKALVRQQLPEKYKEIFFDQSKNGYAGYIDGGASQEEFYKFIKPILEKMDGTEELLVKLNREDLLRKQRTFDNGSIPHQIHLGELHAILRRQEDFYPFLKDNREKIEKILTFRIPYYVGPLARGNSRFAWMTRKSEETITPWNFEEVVDKGASAQSFIERMTNFDKNLPNEKVLPKHSLLYEYFTVYNELTKVKYVTEGMRKPAFLSGEQKKAIVDLLFKTNRKVTVKQLKEDYFKKIECFDSVEISGVEDRFNASLGTYHDLLKIIKDKDFLDNEENEDILEDIVLTLTLFEDREMIEERLKTYAHLFDDKVMKQLKRRRYTGWGRLSRKLINGIRDKQSGKTILDFLKSDGFANRNFMQLIHDDSLTFKEDIQKAQVSGQGDSLHEHIANLAGSPAIKKGILQTVKVVDELVKVMGRHKPENIVIEMARENQTTQKGQKNSRERMKRIEEGIKELGSQILKEHPVENTQLQNEKLYLYYLQNGRDMYVDQELDINRLSDYDVDHIVPQSFLKDDSIDNKVLTRSDKARGKSDNVPSEEVVKKMKNYWRQLLNAKLITQRKFDNLTKAERGGLSELDKAGFIKRQLVETRQITKHVAQILDSRMNTKYDENDKLIREVKVITLKSKLVSDFRKDFQFYKVREINNYHHAHDAYLNAVVGTALIKKYPKLESEFVYGDYKVYDVRKMIAKSEQEIGKATAKYFFYSNIMNFFKTEITLANGEIRKRPLIETNGETGEIVWDKGRDFATVRKVLSMPQVNIVKKTEVQTGGFSKESILPKRNSDKLIARKKDWDPKKYGGFDSPTVAYSVLVVAKVEKGKSKKLKSVKELLGITIMERSSFEKNPIDFLEAKGYKEVKKDLIIKLPKYSLFELENGRKRMLASAGELQKGNELALPSKYVNFLYLASHYEKLKGSPEDNEQKQLFVEQHKHYLDEIIEQISEFSKRVILADANLDKVLSAYNKHRDKPIREQAENIIHLFTLTNLGAPAAFKYFDTTIDRKRYTSTKEVLDATLIHQSITGLYETRIDLSQLGGDGGGGSEAAAKPAPGGTLNIEDEYRLHETSKEPDVSLGSTWLSDFPQAWAETGGMGLAVRQAPLIIPLKATSTPVSIKQYPMSQEARLGIKPHIQRLLDQGILVPCQSPWNTPLLPVKKPGTNDYRPVQDLREVNKRVEDIHPTVPNPYNLLSGLPPSHQWYTVLDLKDAFFCLRLHPTSQPLFAFEWRDPEMGISGQLTWTRLPQGFKNSPTLFNEALHRDLAGFRIQHPDLILLQYVDDLLLAATSELDCQQGTRALLQTLGDLGYRASAKKAQICQKQVKYLGYLLKEGQRWLTEARKETVMGQPIPKTPRQLREFLGKAGFCRLFIPGFAEMAAPLYPLTKPGTLFNWGPDQQKAFQEIKQALLTAPALGLPDLTKPFELFVDEKQGYAKGVLTQKLGPWRRPVAYLSKKLDPVAAGWPPCLRMVAAIAVLTKDAGKLTMGQPLVILAPHAVEALVKQPPDRWLSNARMTHYQALLLDTDRVQFGPVVALNPATLLPLPEEGLQHDCLDILAEAHGTRSDLMDQPLPDADHTWYTDGSSFLQEGQRKAGAAVTTETEVIWARALPAGTSAQRAELIALTQALKMAEGKKLNVYTDSRYAFATAHIHGEIYRRRGWLTSEGKEIKNKDEILALLKALFLPKRLSIIHCPGHQKGNSAEARGNRMADQAAREVATRETPETSTLLAGKRTADGSEFEKRTADGSEFESPKKKAKVE

SEQ ID NO: 2327 - protein, 2096 aa, synthetic construct
  source 1..2096: note = Description of Artificial Sequence: Synthetic polypeptide
MPAAKRVKLDGGDKKYSIGLDIGTNSVGWAVITDEYKVPSKKFKVLGNTDRHSIKKNLIGALLFDSGETAEATRLKRTARRRYTRRKNRICYLQEIFSNEMAKVDDSFFHRLEESFLVEEDKKHERHPIFGNIVDEVAYHEKYPTIYHLRKKLVDSTDKADLRLIYLALAHMIKFRGHFLIEGDLNPDNSDVDKLFIQLVQTYNQLFEENPINASGVDAKAILSARLSKSRRLENLIAQLPGEKKNGLFGNLIALSLGLTPNFKSNFDLAEDAKLQLSKDTYDDDLDNLLAQIGDQYADLFLAAKNLSDAILLSDILRVNTEITKAPLSASMIKRYDEHHQDLTLLKALVRQQLPEKYKEIFFDQSKNGYAGYIDGGASQEEFYKFIKPILEKMDGTEELLVKLNREDLLRKQRTFDNGSIPHQIHLGELHAILRRQEDFYPFLKDNREKIEKILTFRIPYYVGPLARGNSRFAWMTRKSEETITPWNFEEVVDKGASAQSFIERMTNFDKNLPNEKVLPKHSLLYEYFTVYNELTKVKYVTEGMRKPAFLSGEQKKAIVDLLFKTNRKVTVKQLKEDYFKKIECFDSVEISGVEDRFNASLGTYHDLLKIIKDKDFLDNEENEDILEDIVLTLTLFEDREMIEERLKTYAHLFDDKVMKQLKRRRYTGWGRLSRKLINGIRDKQSGKTILDFLKSDGFANRNFMQLIHDDSLTFKEDIQKAQVSGQGDSLHEHIANLAGSPAIKKGILQTVKVVDELVKVMGRHKPENIVIEMARENQTTQKGQKNSRERMKRIEEGIKELGSQILKEHPVENTQLQNEKLYLYYLQNGRDMYVDQELDINRLSDYDVDHIVPQSFLKDDSIDNKVLTRSDKARGKSDNVPSEEVVKKMKNYWRQLLNAKLITQRKFDNLTKAERGGLSELDKAGFIKRQLVETRQITKHVAQILDSRMNTKYDENDKLIREVKVITLKSKLVSDFRKDFQFYKVREINNYHHAHDAYLNAVVGTALIKKYPKLESEFVYGDYKVYDVRKMIAKSEQEIGKATAKYFFYSNIMNFFKTEITLANGEIRKRPLIETNGETGEIVWDKGRDFATVRKVLSMPQVNIVKKTEVQTGGFSKESILPKRNSDKLIARKKDWDPKKYGGFDSPTVAYSVLVVAKVEKGKSKKLKSVKELLGITIMERSSFEKNPIDFLEAKGYKEVKKDLIIKLPKYSLFELENGRKRMLASAGELQKGNELALPSKYVNFLYLASHYEKLKGSPEDNEQKQLFVEQHKHYLDEIIEQISEFSKRVILADANLDKVLSAYNKHRDKPIREQAENIIHLFTLTNLGAPAAFKYFDTTIDRKRYTSTKEVLDATLIHQSITGLYETRIDLSQLGGDGGGGGGSSEAAAKGGTLNIEDEYRLHETSKEPDVSLGSTWLSDFPQAWAETGGMGLAVRQAPLIIPLKATSTPVSIKQYPMSQEARLGIKPHIQRLLDQGILVPCQSPWNTPLLPVKKPGTNDYRPVQDLREVNKRVEDIHPTVPNPYNLLSGLPPSHQWYTVLDLKDAFFCLRLHPTSQPLFAFEWRDPEMGISGQLTWTRLPQGFKNSPTLFNEALHRDLAGFRIQHPDLILLQYVDDLLLAATSELDCQQGTRALLQTLGDLGYRASAKKAQICQKQVKYLGYLLKEGQRWLTEARKETVMGQPIPKTPRQLREFLGKAGFCRLFIPGFAEMAAPLYPLTKPGTLFNWGPDQQKAFQEIKQALLTAPALGLPDLTKPFELFVDEKQGYAKGVLTQKLGPWRRPVAYLSKKLDPVAAGWPPCLRMVAAIAVLTKDAGKLTMGQPLVILAPHAVEALVKQPPDRWLSNARMTHYQALLLDTDRVQFGPVVALNPATLLPLPEEGLQHDCLDILAEAHGTRSDLMDQPLPDADHTWYTDGSSFLQEGQRKAGAAVTTETEVIWARALPAGTSAQRAELIALTQALKMAEGKKLNVYTDSRYAFATAHIHGEIYRRRGWLTSEGKEIKNKDEILALLKALFLPKRLSIIHCPGHQKGNSAEARGNRMADQAAREVATRETPETSTLLAGKRTADGSEFEKRTADGSEFESPKKKAKVE

SEQ ID NO: 2328 - protein, 2090 aa, synthetic construct
  source 1..2090: note = Description of Artificial Sequence: Synthetic polypeptide
MPAAKRVKLDGGDKKYSIGLDIGTNSVGWAVITDEYKVPSKKFKVLGNTDRHSIKKNLIGALLFDSGETAEATRLKRTARRRYTRRKNRICYLQEIFSNEMAKVDDSFFHRLEESFLVEEDKKHERHPIFGNIVDEVAYHEKYPTIYHLRKKLVDSTDKADLRLIYLALAHMIKFRGHFLIEGDLNPDNSDVDKLFIQLVQTYNQLFEENPINASGVDAKAILSARLSKSRRLENLIAQLPGEKKNGLFGNLIALSLGLTPNFKSNFDLAEDAKLQLSKDTYDDDLDNLLAQIGDQYADLFLAAKNLSDAILLSDILRVNTEITKAPLSASMIKRYDEHHQDLTLLKALVRQQLPEKYKEIFFDQSKNGYAGYIDGGASQEEFYKFIKPILEKMDGTEELLVKLNREDLLRKQRTFDNGSIPHQIHLGELHAILRRQEDFYPFLKDNREKIEKILTFRIPYYVGPLARGNSRFAWMTRKSEETITPWNFEEVVDKGASAQSFIERMTNFDKNLPNEKVLPKHSLLYEYFTVYNELTKVKYVTEGMRKPAFLSGEQKKAIVDLLFKTNRKVTVKQLKEDYFKKIECFDSVEISGVEDRFNASLGTYHDLLKIIKDKDFLDNEENEDILEDIVLTLTLFEDREMIEERLKTYAHLFDDKVMKQLKRRRYTGWGRLSRKLINGIRDKQSGKTILDFLKSDGFANRNFMQLIHDDSLTFKEDIQKAQVSGQGDSLHEHIANLAGSPAIKKGILQTVKVVDELVKVMGRHKPENIVIEMARENQTTQKGQKNSRERMKRIEEGIKELGSQILKEHPVENTQLQNEKLYLYYLQNGRDMYVDQELDINRLSDYDVDHIVPQSFLKDDSIDNKVLTRSDKARGKSDNVPSEEVVKKMKNYWRQLLNAKLITQRKFDNLTKAERGGLSELDKAGFIKRQLVETRQITKHVAQILDSRMNTKYDENDKLIREVKVITLKSKLVSDFRKDFQFYKVREINNYHHAHDAYLNAVVGTALIKKYPKLESEFVYGDYKVYDVRKMIAKSEQEIGKATAKYFFYSNIMNFFKTEITLANGEIRKRPLIETNGETGEIVWDKGRDFATVRKVLSMPQVNIVKKTEVQTGGFSKESILPKRNSDKLIARKKDWDPKKYGGFDSPTVAYSVLVVAKVEKGKSKKLKSVKELLGITIMERSSFEKNPIDFLEAKGYKEVKKDLIIKLPKYSLFELENGRKRMLASAGELQKGNELALPSKYVNFLYLASHYEKLKGSPEDNEQKQLFVEQHKHYLDEIIEQISEFSKRVILADANLDKVLSAYNKHRDKPIREQAENIIHLFTLTNLGAPAAFKYFDTTIDRKRYTSTKEVLDATLIHQSITGLYETRIDLSQLGGDGGEAAAKGGTLNIEDEYRLHETSKEPDVSLGSTWLSDFPQAWAETGGMGLAVRQAPLIIPLKATSTPVSIKQYPMSQEARLGIKPHIQRLLDQGILVPCQSPWNTPLLPVKKPGTNDYRPVQDLREVNKRVEDIHPTVPNPYNLLSGLPPSHQWYTVLDLKDAFFCLRLHPTSQPLFAFEWRDPEMGISGQLTWTRLPQGFKNSPTLFNEALHRDLAGFRIQHPDLILLQYVDDLLLAATSELDCQQGTRALLQTLGDLGYRASAKKAQICQKQVKYLGYLLKEGQRWLTEARKETVMGQPIPKTPRQLREFLGKAGFCRLFIPGFAEMAAPLYPLTKPGTLFNWGPDQQKAFQEIKQALLTAPALGLPDLTKPFELFVDEKQGYAKGVLTQKLGPWRRPVAYLSKKLDPVAAGWPPCLRMVAAIAVLTKDAGKLTMGQPLVILAPHAVEALVKQPPDRWLSNARMTHYQALLLDTDRVQFGPVVALNPATLLPLPEEGLQHDCLDILAEAHGTRSDLMDQPLPDADHTWYTDGSSFLQEGQRKAGAAVTTETEVIWARALPAGTSAQRAELIALTQALKMAEGKKLNVYTDSRYAFATAHIHGEIYRRRGWLTSEGKEIKNKDEILALLKALFLPKRLSIIHCPGHQKGNSAEARGNRMADQAAREVATRETPETSTLLAGKRTADGSEFEKRTADGSEFESPKKKAKVE

SEQ ID NO: 2329 - protein, 2094 aa, synthetic construct
  source 1..2094: note = Description of Artificial Sequence: Synthetic polypeptide
MPAAKRVKLDGGDKKYSIGLDIGTNSVGWAVITDEYKVPSKKFKVLGNTDRHSIKKNLIGALLFDSGETAEATRLKRTARRRYTRRKNRICYLQEIFSNEMAKVDDSFFHRLEESFLVEEDKKHERHPIFGNIVDEVAYHEKYPTIYHLRKKLVDSTDKADLRLIYLALAHMIKFRGHFLIEGDLNPDNSDVDKLFIQLVQTYNQLFEENPINASGVDAKAILSARLSKSRRLENLIAQLPGEKKNGLFGNLIALSLGLTPNFKSNFDLAEDAKLQLSKDTYDDDLDNLLAQIGDQYADLFLAAKNLSDAILLSDILRVNTEITKAPLSASMIKRYDEHHQDLTLLKALVRQQLPEKYKEIFFDQSKNGYAGYIDGGASQEEFYKFIKPILEKMDGTEELLVKLNREDLLRKQRTFDNGSIPHQIHLGELHAILRRQEDFYPFLKDNREKIEKILTFRIPYYVGPLARGNSRFAWMTRKSEETITPWNFEEVVDKGASAQSFIERMTNFDKNLPNEKVLPKHSLLYEYFTVYNELTKVKYVTEGMRKPAFLSGEQKKAIVDLLFKTNRKVTVKQLKEDYFKKIECFDSVEISGVEDRFNASLGTYHDLLKIIKDKDFLDNEENEDILEDIVLTLTLFEDREMIEERLKTYAHLFDDKVMKQLKRRRYTGWGRLSRKLINGIRDKQSGKTILDFLKSDGFANRNFMQLIHDDSLTFKEDIQKAQVSGQGDSLHEHIANLAGSPAIKKGILQTVKVVDELVKVMGRHKPENIVIEMARENQTTQKGQKNSRERMKRIEEGIKELGSQILKEHPVENTQLQNEKLYLYYLQNGRDMYVDQELDINRLSDYDVDHIVPQSFLKDDSIDNKVLTRSDKARGKSDNVPSEEVVKKMKNYWRQLLNAKLITQRKFDNLTKAERGGLSELDKAGFIKRQLVETRQITKHVAQILDSRMNTKYDENDKLIREVKVITLKSKLVSDFRKDFQFYKVREINNYHHAHDAYLNAVVGTALIKKYPKLESEFVYGDYKVYDVRKMIAKSEQEIGKATAKYFFYSNIMNFFKTEITLANGEIRKRPLIETNGETGEIVWDKGRDFATVRKVLSMPQVNIVKKTEVQTGGFSKESILPKRNSDKLIARKKDWDPKKYGGFDSPTVAYSVLVVAKVEKGKSKKLKSVKELLGITIMERSSFEKNPIDFLEAKGYKEVKKDLIIKLPKYSLFELENGRKRMLASAGELQKGNELALPSKYVNFLYLASHYEKLKGSPEDNEQKQLFVEQHKHYLDEIIEQISEFSKRVILADANLDKVLSAYNKHRDKPIREQAENIIHLFTLTNLGAPAAFKYFDTTIDRKRYTSTKEVLDATLIHQSITGLYETRIDLSQLGGDGGGSSPAPGGGGGTLNIEDEYRLHETSKEPDVSLGSTWLSDFPQAWAETGGMGLAVRQAPLIIPLKATSTPVSIKQYPMSQEARLGIKPHIQRLLDQGILVPCQSPWNTPLLPVKKPGTNDYRPVQDLREVNKRVEDIHPTVPNPYNLLSGLPPSHQWYTVLDLKDAFFCLRLHPTSQPLFAFEWRDPEMGISGQLTWTRLPQGFKNSPTLFNEALHRDLAGFRIQHPDLILLQYVDDLLLAATSELDCQQGTRALLQTLGDLGYRASAKKAQICQKQVKYLGYLLKEGQRWLTEARKETVMGQPIPKTPRQLREFLGKAGFCRLFIPGFAEMAAPLYPLTKPGTLFNWGPDQQKAFQEIKQALLTAPALGLPDLTKPFELFVDEKQGYAKGVLTQKLGPWRRPVAYLSKKLDPVAAGWPPCLRMVAAIAVLTKDAGKLTMGQPLVILAPHAVEALVKQPPDRWLSNARMTHYQALLLDTDRVQFGPVVALNPATLLPLPEEGLQHDCLDILAEAHGTRSDLMDQPLPDADHTWYTDGSSFLQEGQRKAGAAVTTETEVIWARALPAGTSAQRAELIALTQALKMAEGKKLNVYTDSRYAFATAHIHGEIYRRRGWLTSEGKEIKNKDEILALLKALFLPKRLSIIHCPGHQKGNSAEARGNRMADQAAREVATRETPETSTLLAGKRTADGSEFEKRTADGSEFESPKKKAKVE

SEQ ID NO: 2330 - protein, 2088 aa, synthetic construct
  source 1..2088: note = Description of Artificial Sequence: Synthetic polypeptide
MPAAKRVKLDGGDKKYSIGLDIGTNSVGWAVITDEYKVPSKKFKVLGNTDRHSIKKNLIGALLFDSGETAEATRLKRTARRRYTRRKNRICYLQEIFSNEMAKVDDSFFHRLEESFLVEEDKKHERHPIFGNIVDEVAYHEKYPTIYHLRKKLVDSTDKADLRLIYLALAHMIKFRGHFLIEGDLNPDNSDVDKLFIQLVQTYNQLFEENPINASGVDAKAILSARLSKSRRLENLIAQLPGEKKNGLFGNLIALSLGLTPNFKSNFDLAEDAKLQLSKDTYDDDLDNLLAQIGDQYADLFLAAKNLSDAILLSDILRVNTEITKAPLSASMIKRYDEHHQDLTLLKALVRQQLPEKYKEIFFDQSKNGYAGYIDGGASQEEFYKFIKPILEKMDGTEELLVKLNREDLLRKQRTFDNGSIPHQIHLGELHAILRRQEDFYPFLKDNREKIEKILTFRIPYYVGPLARGNSRFAWMTRKSEETITPWNFEEVVDKGASAQSFIERMTNFDKNLPNEKVLPKHSLLYEYFTVYNELTKVKYVTEGMRKPAFLSGEQKKAIVDLLFKTNRKVTVKQLKEDYFKKIECFDSVEISGVEDRFNASLGTYHDLLKIIKDKDFLDNEENEDILEDIVLTLTLFEDREMIEERLKTYAHLFDDKVMKQLKRRRYTGWGRLSRKLINGIRDKQSGKTILDFLKSDGFANRNFMQLIHDDSLTFKEDIQKAQVSGQGDSLHEHIANLAGSPAIKKGILQTVKVVDELVKVMGRHKPENIVIEMARENQTTQKGQKNSRERMKRIEEGIKELGSQILKEHPVENTQLQNEKLYLYYLQNGRDMYVDQELDINRLSDYDVDHIVPQSFLKDDSIDNKVLTRSDKARGKSDNVPSEEVVKKMKNYWRQLLNAKLITQRKFDNLTKAERGGLSELDKAGFIKRQLVETRQITKHVAQILDSRMNTKYDENDKLIREVKVITLKSKLVSDFRKDFQFYKVREINNYHHAHDAYLNAVVGTALIKKYPKLESEFVYGDYKVYDVRKMIAKSEQEIGKATAKYFFYSNIMNFFKTEITLANGEIRKRPLIETNGETGEIVWDKGRDFATVRKVLSMPQVNIVKKTEVQTGGFSKESILPKRNSDKLIARKKDWDPKKYGGFDSPTVAYSVLVVAKVEKGKSKKLKSVKELLGITIMERSSFEKNPIDFLEAKGYKEVKKDLIIKLPKYSLFELENGRKRMLASAGELQKGNELALPSKYVNFLYLASHYEKLKGSPEDNEQKQLFVEQHKHYLDEIIEQISEFSKRVILADANLDKVLSAYNKHRDKPIREQAENIIHLFTLTNLGAPAAFKYFDTTIDRKRYTSTKEVLDATLIHQSITGLYETRIDLSQLGGDGGGSSGGTLNIEDEYRLHETSKEPDVSLGSTWLSDFPQAWAETGGMGLAVRQAPLIIPLKATSTPVSIKQYPMSQEARLGIKPHIQRLLDQGILVPCQSPWNTPLLPVKKPGTNDYRPVQDLREVNKRVEDIHPTVPNPYNLLSGLPPSHQWYTVLDLKDAFFCLRLHPTSQPLFAFEWRDPEMGISGQLTWTRLPQGFKNSPTLFNEALHRDLAGFRIQHPDLILLQYVDDLLLAATSELDCQQGTRALLQTLGDLGYRASAKKAQICQKQVKYLGYLLKEGQRWLTEARKETVMGQPIPKTPRQLREFLGKAGFCRLFIPGFAEMAAPLYPLTKPGTLFNWGPDQQKAFQEIKQALLTAPALGLPDLTKPFELFVDEKQGYAKGVLTQKLGPWRRPVAYLSKKLDPVAAGWPPCLRMVAAIAVLTKDAGKLTMGQPLVILAPHAVEALVKQPPDRWLSNARMTHYQALLLDTDRVQFGPVVALNPATLLPLPEEGLQHDCLDILAEAHGTRSDLMDQPLPDADHTWYTDGSSFLQEGQRKAGAAVTTETEVIWARALPAGTSAQRAELIALTQALKMAEGKKLNVYTDSRYAFATAHIHGEIYRRRGWLTSEGKEIKNKDEILALLKALFLPKRLSIIHCPGHQKGNSAEARGNRMADQAAREVATRETPETSTLLAGKRTADGSEFEKRTADGSEFESPKKKAKVE

SEQ ID NO: 2331 - protein, 2094 aa, synthetic construct
  source 1..2094: note = Description of Artificial Sequence: Synthetic polypeptide
MPAAKRVKLDGGDKKYSIGLDIGTNSVGWAVITDEYKVPSKKFKVLGNTDRHSIKKNLIGALLFDSGETAEATRLKRTARRRYTRRKNRICYLQEIFSNEMAKVDDSFFHRLEESFLVEEDKKHERHPIFGNIVDEVAYHEKYPTIYHLRKKLVDSTDKADLRLIYLALAHMIKFRGHFLIEGDLNPDNSDVDKLFIQLVQTYNQLFEENPINASGVDAKAILSARLSKSRRLENLIAQLPGEKKNGLFGNLIALSLGLTPNFKSNFDLAEDAKLQLSKDTYDDDLDNLLAQIGDQYADLFLAAKNLSDAILLSDILRVNTEITKAPLSASMIKRYDEHHQDLTLLKALVRQQLPEKYKEIFFDQSKNGYAGYIDGGASQEEFYKFIKPILEKMDGTEELLVKLNREDLLRKQRTFDNGSIPHQIHLGELHAILRRQEDFYPFLKDNREKIEKILTFRIPYYVGPLARGNSRFAWMTRKSEETITPWNFEEVVDKGASAQSFIERMTNFDKNLPNEKVLPKHSLLYEYFTVYNELTKVKYVTEGMRKPAFLSGEQKKAIVDLLFKTNRKVTVKQLKEDYFKKIECFDSVEISGVEDRFNASLGTYHDLLKIIKDKDFLDNEENEDILEDIVLTLTLFEDREMIEERLKTYAHLFDDKVMKQLKRRRYTGWGRLSRKLINGIRDKQSGKTILDFLKSDGFANRNFMQLIHDDSLTFKEDIQKAQVSGQGDSLHEHIANLAGSPAIKKGILQTVKVVDELVKVMGRHKPENIVIEMARENQTTQKGQKNSRERMKRIEEGIKELGSQILKEHPVENTQLQNEKLYLYYLQNGRDMYVDQELDINRLSDYDVDHIVPQSFLKDDSIDNKVLTRSDKARGKSDNVPSEEVVKKMKNYWRQLLNAKLITQRKFDNLTKAERGGLSELDKAGFIKRQLVETRQITKHVAQILDSRMNTKYDENDKLIREVKVITLKSKLVSDFRKDFQFYKVREINNYHHAHDAYLNAVVGTALIKKYPKLESEFVYGDYKVYDVRKMIAKSEQEIGKATAKYFFYSNIMNFFKTEITLANGEIRKRPLIETNGETGEIVWDKGRDFATVRKVLSMPQVNIVKKTEVQTGGFSKESILPKRNSDKLIARKKDWDPKKYGGFDSPTVAYSVLVVAKVEKGKSKKLKSVKELLGITIMERSSFEKNPIDFLEAKGYKEVKKDLIIKLPKYSLFELENGRKRMLASAGELQKGNELALPSKYVNFLYLASHYEKLKGSPEDNEQKQLFVEQHKHYLDEIIEQISEFSKRVILADANLDKVLSAYNKHRDKPIREQAENIIHLFTLTNLGAPAAFKYFDTTIDRKRYTSTKEVLDATLIHQSITGLYETRIDLSQLGGDGGGGSGSSGGGGGTLNIEDEYRLHETSKEPDVSLGSTWLSDFPQAWAETGGMGLAVRQAPLIIPLKATSTPVSIKQYPMSQEARLGIKPHIQRLLDQGILVPCQSPWNTPLLPVKKPGTNDYRPVQDLREVNKRVEDIHPTVPNPYNLLSGLPPSHQWYTVLDLKDAFFCLRLHPTSQPLFAFEWRDPEMGISGQLTWTRLPQGFKNSPTLFNEALHRDLAGFRIQHPDLILLQYVDDLLLAATSELDCQQGTRALLQTLGDLGYRASAKKAQICQKQVKYLGYLLKEGQRWLTEARKETVMGQPIPKTPRQLREFLGKAGFCRLFIPGFAEMAAPLYPLTKPGTLFNWGPDQQKAFQEIKQALLTAPALGLPDLTKPFELFVDEKQGYAKGVLTQKLGPWRRPVAYLSKKLDPVAAGWPPCLRMVAAIAVLTKDAGKLTMGQPLVILAPHAVEALVKQPPDRWLSNARMTHYQALLLDTDRVQFGPVVALNPATLLPLPEEGLQHDCLDILAEAHGTRSDLMDQPLPDADHTWYTDGSSFLQEGQRKAGAAVTTETEVIWARALPAGTSAQRAELIALTQALKMAEGKKLNVYTDSRYAFATAHIHGEIYRRRGWLTSEGKEIKNKDEILALLKALFLPKRLSIIHCPGHQKGNSAEARGNRMADQAAREVATRETPETSTLLAGKRTADGSEFEKRTADGSEFESPKKKAKVE

SEQ ID NO: 2332 - protein, 2096 aa, synthetic construct
  source 1..2096: note = Description of Artificial Sequence: Synthetic polypeptide
MPAAKRVKLDGGDKKYSIGLDIGTNSVGWAVITDEYKVPSKKFKVLGNTDRHSIKKNLIGALLFDSGETAEATRLKRTARRRYTRRKNRICYLQEIFSNEMAKVDDSFFHRLEESFLVEEDKKHERHPIFGNIVDEVAYHEKYPTIYHLRKKLVDSTDKADLRLIYLALAHMIKFRGHFLIEGDLNPDNSDVDKLFIQLVQTYNQLFEENPINASGVDAKAILSARLSKSRRLENLIAQLPGEKKNGLFGNLIALSLGLTPNFKSNFDLAEDAKLQLSKDTYDDDLDNLLAQIGDQYADLFLAAKNLSDAILLSDILRVNTEITKAPLSASMIKRYDEHHQDLTLLKALVRQQLPEKYKEIFFDQSKNGYAGYIDGGASQEEFYKFIKPILEKMDGTEELLVKLNREDLLRKQRTFDNGSIPHQIHLGELHAILRRQEDFYPFLKDNREKIEKILTFRIPYYVGPLARGNSRFAWMTRKSEETITPWNFEEVVDKGASAQSFIERMTNFDKNLPNEKVLPKHSLLYEYFTVYNELTKVKYVTEGMRKPAFLSGEQKKAIVDLLFKTNRKVTVKQLKEDYFKKIECFDSVEISGVEDRFNASLGTYHDLLKIIKDKDFLDNEENEDILEDIVLTLTLFEDREMIEERLKTYAHLFDDKVMKQLKRRRYTGWGRLSRKLINGIRDKQSGKTILDFLKSDGFANRNFMQLIHDDSLTFKEDIQKAQVSGQGDSLHEHIANLAGSPAIKKGILQTVKVVDELVKVMGRHKPENIVIEMARENQTTQKGQKNSRERMKRIEEGIKELGSQILKEHPVENTQLQNEKLYLYYLQNGRDMYVDQELDINRLSDYDVDHIVPQSFLKDDSIDNKVLTRSDKARGKSDNVPSEEVVKKMKNYWRQLLNAKLITQRKFDNLTKAERGGLSELDKAGFIKRQLVETRQITKHVAQILDSRMNTKYDENDKLIREVKVITLKSKLVSDFRKDFQFYKVREINNYHHAHDAYLNAVVGTALIKKYPKLESEFVYGDYKVYDVRKMIAKSEQEIGKATAKYFFYSNIMNFFKTEITLANGEIRKRPLIETNGETGEIVWDKGRDFATVRKVLSMPQVNIVKKTEVQTGGFSKESILPKRNSDKLIARKKDWDPKKYGGFDSPTVAYSVLVVAKVEKGKSKKLKSVKELLGITIMERSSFEKNPIDFLEAKGYKEVKKDLIIKLPKYSLFELENGRKRMLASAGELQKGNELALPSKYVNFLYLASHYEKLKGSPEDNEQKQLFVEQHKHYLDEIIEQISEFSKRVILADANLDKVLSAYNKHRDKPIREQAENIIHLFTLTNLGAPAAFKYFDTTIDRKRYTSTKEVLDATLIHQSITGLYETRIDLSQLGGDGGPAPGGSEAAAKGGTLNIEDEYRLHETSKEPDVSLGSTWLSDFPQAWAETGGMGLAVRQAPLIIPLKATSTPVSIKQYPMSQEARLGIKPHIQRLLDQGILVPCQSPWNTPLLPVKKPGTNDYRPVQDLREVNKRVEDIHPTVPNPYNLLSGLPPSHQWYTVLDLKDAFFCLRLHPTSQPLFAFEWRDPEMGISGQLTWTRLPQGFKNSPTLFNEALHRDLAGFRIQHPDLILLQYVDDLLLAATSELDCQQGTRALLQTLGDLGYRASAKKAQICQKQVKYLGYLLKEGQRWLTEARKETVMGQPIPKTPRQLREFLGKAGFCRLFIPGFAEMAAPLYPLTKPGTLFNWGPDQQKAFQEIKQALLTAPALGLPDLTKPFELFVDEKQGYAKGVLTQKLGPWRRPVAYLSKKLDPVAAGWPPCLRMVAAIAVLTKDAGKLTMGQPLVILAPHAVEALVKQPPDRWLSNARMTHYQALLLDTDRVQFGPVVALNPATLLPLPEEGLQHDCLDILAEAHGTRSDLMDQPLPDADHTWYTDGSSFLQEGQRKAGAAVTTETEVIWARALPAGTSAQRAELIALTQALKMAEGKKLNVYTDSRYAFATAHIHGEIYRRRGWLTSEGKEIKNKDEILALLKALFLPKRLSIIHCPGHQKGNSAEARGNRMADQAAREVATRETPETSTLLAGKRTADGSEFEKRTADGSEFESPKKKAKVE

SEQ ID NO: 2333 - protein, 2100 aa, synthetic construct
  source 1..2100: note = Description of Artificial Sequence: Synthetic polypeptide
MPAAKRVKLDGGDKKYSIGLDIGTNSVGWAVITDEYKVPSKKFKVLGNTDRHSIKKNLIGALLFDSGETAEATRLKRTARRRYTRRKNRICYLQEIFSNEMAKVDDSFFHRLEESFLVEEDKKHERHPIFGNIVDEVAYHEKYPTIYHLRKKLVDSTDKADLRLIYLALAHMIKFRGHFLIEGDLNPDNSDVDKLFIQLVQTYNQLFEENPINASGVDAKAILSARLSKSRRLENLIAQLPGEKKNGLFGNLIALSLGLTPNFKSNFDLAEDAKLQLSKDTYDDDLDNLLAQIGDQYADLFLAAKNLSDAILLSDILRVNTEITKAPLSASMIKRYDEHHQDLTLLKALVRQQLPEKYKEIFFDQSKNGYAGYIDGGASQEEFYKFIKPILEKMDGTEELLVKLNREDLLRKQRTFDNGSIPHQIHLGELHAILRRQEDFYPFLKDNREKIEKILTFRIPYYVGPLARGNSRFAWMTRKSEETITPWNFEEVVDKGASAQSFIERMTNFDKNLPNEKVLPKHSLLYEYFTVYNELTKVKYVTEGMRKPAFLSGEQKKAIVDLLFKTNRKVTVKQLKEDYFKKIECFDSVEISGVEDRFNASLGTYHDLLKIIKDKDFLDNEENEDILEDIVLTLTLFEDREMIEERLKTYAHLFDDKVMKQLKRRRYTGWGRLSRKLINGIRDKQSGKTILDFLKSDGFANRNFMQLIHDDSLTFKEDIQKAQVSGQGDSLHEHIANLAGSPAIKKGILQTVKVVDELVKVMGRHKPENIVIEMARENQTTQKGQKNSRERMKRIEEGIKELGSQILKEHPVENTQLQNEKLYLYYLQNGRDMYVDQELDINRLSDYDVDHIVPQSFLKDDSIDNKVLTRSDKARGKSDNVPSEEVVKKMKNYWRQLLNAKLITQRKFDNLTKAERGGLSELDKAGFIKRQLVETRQITKHVAQILDSRMNTKYDENDKLIREVKVITLKSKLVSDFRKDFQFYKVREINNYHHAHDAYLNAVVGTALIKKYPKLESEFVYGDYKVYDVRKMIAKSEQEIGKATAKYFFYSNIMNFFKTEITLANGEIRKRPLIETNGETGEIVWDKGRDFATVRKVLSMPQVNIVKKTEVQTGGFSKESILPKRNSDKLIARKKDWDPKKYGGFDSPTVAYSVLVVAKVEKGKSKKLKSVKELLGITIMERSSFEKNPIDFLEAKGYKEVKKDLIIKLPKYSLFELENGRKRMLASAGELQKGNELALPSKYVNFLYLASHYEKLKGSPEDNEQKQLFVEQHKHYLDEIIEQISEFSKRVILADANLDKVLSAYNKHRDKPIREQAENIIHLFTLTNLGAPAAFKYFDTTIDRKRYTSTKEVLDATLIHQSITGLYETRIDLSQLGGDGGGGGGSGGGGSGGGGSGGTLNIEDEYRLHETSKEPDVSLGSTWLSDFPQAWAETGGMGLAVRQAPLIIPLKATSTPVSIKQYPMSQEARLGIKPHIQRLLDQGILVPCQSPWNTPLLPVKKPGTNDYRPVQDLREVNKRVEDIHPTVPNPYNLLSGLPPSHQWYTVLDLKDAFFCLRLHPTSQPLFAFEWRDPEMGISGQLTWTRLPQGFKNSPTLFNEALHRDLAGFRIQHPDLILLQYVDDLLLAATSELDCQQGTRALLQTLGDLGYRASAKKAQICQKQVKYLGYLLKEGQRWLTEARKETVMGQPIPKTPRQLREFLGKAGFCRLFIPGFAEMAAPLYPLTKPGTLFNWGPDQQKAFQEIKQALLTAPALGLPDLTKPFELFVDEKQGYAKGVLTQKLGPWRRPVAYLSKKLDPVAAGWPPCLRMVAAIAVLTKDAGKLTMGQPLVILAPHAVEALVKQPPDRWLSNARMTHYQALLLDTDRVQFGPVVALNPATLLPLPEEGLQHDCLDILAEAHGTRSDLMDQPLPDADHTWYTDGSSFLQEGQRKAGAAVTTETEVIWARALPAGTSAQRAELIALTQALKMAEGKKLNVYTDSRYAFATAHIHGEIYRRRGWLTSEGKEIKNKDEILALLKALFLPKRLSIIHCPGHQKGNSAEARGNRMADQAAREVATRETPETSTLLAGKRTADGSEFEKRTADGSEFESPKKKAKVE

SEQ ID NO: 2334 - protein, 2096 aa, synthetic construct
  source 1..2096: note = Description of Artificial Sequence: Synthetic polypeptide
MPAAKRVKLDGGDKKYSIGLDIGTNSVGWAVITDEYKVPSKKFKVLGNTDRHSIKKNLIGALLFDSGETAEATRLKRTARRRYTRRKNRICYLQEIFSNEMAKVDDSFFHRLEESFLVEEDKKHERHPIFGNIVDEVAYHEKYPTIYHLRKKLVDSTDKADLRLIYLALAHMIKFRGHFLIEGDLNPDNSDVDKLFIQLVQTYNQLFEENPINASGVDAKAILSARLSKSRRLENLIAQLPGEKKNGLFGNLIALSLGLTPNFKSNFDLAEDAKLQLSKDTYDDDLDNLLAQIGDQYADLFLAAKNLSDAILLSDILRVNTEITKAPLSASMIKRYDEHHQDLTLLKALVRQQLPEKYKEIFFDQSKNGYAGYIDGGASQEEFYKFIKPILEKMDGTEELLVKLNREDLLRKQRTFDNGSIPHQIHLGELHAILRRQEDFYPFLKDNREKIEKILTFRIPYYVGPLARGNSRFAWMTRKSEETITPWNFEEVVDKGASAQSFIERMTNFDKNLPNEKVLPKHSLLYEYFTVYNELTKVKYVTEGMRKPAFLSGEQKKAIVDLLFKTNRKVTVKQLKEDYFKKIECFDSVEISGVEDRFNASLGTYHDLLKIIKDKDFLDNEENEDILEDIVLTLTLFEDREMIEERLKTYAHLFDDKVMKQLKRRRYTGWGRLSRKLINGIRDKQSGKTILDFLKSDGFANRNFMQLIHDDSLTFKEDIQKAQVSGQGDSLHEHIANLAGSPAIKKGILQTVKVVDELVKVMGRHKPENIVIEMARENQTTQKGQKNSRERMKRIEEGIKELGSQILKEHPVENTQLQNEKLYLYYLQNGRDMYVDQELDINRLSDYDVDHIVPQSFLKDDSIDNKVLTRSDKARGKSDNVPSEEVVKKMKNYWRQLLNAKLITQRKFDNLTKAERGGLSELDKAGFIKRQLVETRQITKHVAQILDSRMNTKYDENDKLIREVKVITLKSKLVSDFRKDFQFYKVREINNYHHAHDAYLNAVVGTALIKKYPKLESEFVYGDYKVYDVRKMIAKSEQEIGKATAKYFFYSNIMNFFKTEITLANGEIRKRPLIETNGETGEIVWDKGRDFATVRKVLSMPQVNIVKKTEVQTGGFSKESILPKRNSDKLIARKKDWDPKKYGGFDSPTVAYSVLVVAKVEKGKSKKLKSVKELLGITIMERSSFEKNPIDFLEAKGYKEVKKDLIIKLPKYSLFELENGRKRMLASAGELQKGNELALPSKYVNFLYLASHYEKLKGSPEDNEQKQLFVEQHKHYLDEIIEQISEFSKRVILADANLDKVLSAYNKHRDKPIREQAENIIHLFTLTNLGAPAAFKYFDTTIDRKRYTSTKEVLDATLIHQSITGLYETRIDLSQLGGDGGEAAAKGGSGGGGGTLNIEDEYRLHETSKEPDVSLGSTWLSDFPQAWAETGGMGLAVRQAPLIIPLKATSTPVSIKQYPMSQEARLGIKPHIQRLLDQGILVPCQSPWNTPLLPVKKPGTNDYRPVQDLREVNKRVEDIHPTVPNPYNLLSGLPPSHQWYTVLDLKDAFFCLRLHPTSQPLFAFEWRDPEMGISGQLTWTRLPQGFKNSPTLFNEALHRDLAGFRIQHPDLILLQYVDDLLLAATSELDCQQGTRALLQTLGDLGYRASAKKAQICQKQVKYLGYLLKEGQRWLTEARKETVMGQPIPKTPRQLREFLGKAGFCRLFIPGFAEMAAPLYPLTKPGTLFNWGPDQQKAFQEIKQALLTAPALGLPDLTKPFELFVDEKQGYAKGVLTQKLGPWRRPVAYLSKKLDPVAAGWPPCLRMVAAIAVLTKDAGKLTMGQPLVILAPHAVEALVKQPPDRWLSNARMTHYQALLLDTDRVQFGPVVALNPATLLPLPEEGLQHDCLDILAEAHGTRSDLMDQPLPDADHTWYTDGSSFLQEGQRKAGAAVTTETEVIWARALPAGTSAQRAELIALTQALKMAEGKKLNVYTDSRYAFATAHIHGEIYRRRGWLTSEGKEIKNKDEILALLKALFLPKRLSIIHCPGHQKGNSAEARGNRMADQAAREVATRETPETSTLLAGKRTADGSEFEKRTADGSEFESPKKKAKVE

SEQ ID NO: 2335 - protein, 2091 aa, synthetic construct
  source 1..2091: note = Description of Artificial Sequence: Synthetic polypeptide
MPAAKRVKLDGGDKKYSIGLDIGTNSVGWAVITDEYKVPSKKFKVLGNTDRHSIKKNLIGALLFDSGETAEATRLKRTARRRYTRRKNRICYLQEIFSNEMAKVDDSFFHRLEESFLVEEDKKHERHPIFGNIVDEVAYHEKYPTIYHLRKKLVDSTDKADLRLIYLALAHMIKFRGHFLIEGDLNPDNSDVDKLFIQLVQTYNQLFEENPINASGVDAKAILSARLSKSRRLENLIAQLPGEKKNGLFGNLIALSLGLTPNFKSNFDLAEDAKLQLSKDTYDDDLDNLLAQIGDQYADLFLAAKNLSDAILLSDILRVNTEITKAPLSASMIKRYDEHHQDLTLLKALVRQQLPEKYKEIFFDQSKNGYAGYIDGGASQEEFYKFIKPILEKMDGTEELLVKLNREDLLRKQRTFDNGSIPHQIHLGELHAILRRQEDFYPFLKDNREKIEKILTFRIPYYVGPLARGNSRFAWMTRKSEETITPWNFEEVVDKGASAQSFIERMTNFDKNLPNEKVLPKHSLLYEYFTVYNELTKVKYVTEGMRKPAFLSGEQKKAIVDLLFKTNRKVTVKQLKEDYFKKIECFDSVEISGVEDRFNASLGTYHDLLKIIKDKDFLDNEENEDILEDIVLTLTLFEDREMIEERLKTYAHLFDDKVMKQLKRRRYTGWGRLSRKLINGIRDKQSGKTILDFLKSDGFANRNFMQLIHDDSLTFKEDIQKAQVSGQGDSLHEHIANLAGSPAIKKGILQTVKVVDELVKVMGRHKPENIVIEMARENQTTQKGQKNSRERMKRIEEGIKELGSQILKEHPVENTQLQNEKLYLYYLQNGRDMYVDQELDINRLSDYDVDHIVPQSFLKDDSIDNKVLTRSDKARGKSDNVPSEEVVKKMKNYWRQLLNAKLITQRKFDNLTKAERGGLSELDKAGFIKRQLVETRQITKHVAQILDSRMNTKYDENDKLIREVKVITLKSKLVSDFRKDFQFYKVREINNYHHAHDAYLNAVVGTALIKKYPKLESEFVYGDYKVYDVRKMIAKSEQEIGKATAKYFFYSNIMNFFKTEITLANGEIRKRPLIETNGETGEIVWDKGRDFATVRKVLSMPQVNIVKKTEVQTGGFSKESILPKRNSDKLIARKKDWDPKKYGGFDSPTVAYSVLVVAKVEKGKSKKLKSVKELLGITIMERSSFEKNPIDFLEAKGYKEVKKDLIIKLPKYSLFELENGRKRMLASAGELQKGNELALPSKYVNFLYLASHYEKLKGSPEDNEQKQLFVEQHKHYLDEIIEQISEFSKRVILADANLDKVLSAYNKHRDKPIREQAENIIHLFTLTNLGAPAAFKYFDTTIDRKRYTSTKEVLDATLIHQSITGLYETRIDLSQLGGDGGGGSGGGGGTLNIEDEYRLHETSKEPDVSLGSTWLSDFPQAWAETGGMGLAVRQAPLIIPLKATSTPVSIKQYPMSQEARLGIKPHIQRLLDQGILVPCQSPWNTPLLPVKKPGTNDYRPVQDLREVNKRVEDIHPTVPNPYNLLSGLPPSHQWYTVLDLKDAFFCLRLHPTSQPLFAFEWRDPEMGISGQLTWTRLPQGFKNSPTLFNEALHRDLAGFRIQHPDLILLQYVDDLLLAATSELDCQQGTRALLQTLGDLGYRASAKKAQICQKQVKYLGYLLKEGQRWLTEARKETVMGQPIPKTPRQLREFLGKAGFCRLFIPGFAEMAAPLYPLTKPGTLFNWGPDQQKAFQEIKQALLTAPALGLPDLTKPFELFVDEKQGYAKGVLTQKLGPWRRPVAYLSKKLDPVAAGWPPCLRMVAAIAVLTKDAGKLTMGQPLVILAPHAVEALVKQPPDRWLSNARMTHYQALLLDTDRVQFGPVVALNPATLLPLPEEGLQHDCLDILAEAHGTRSDLMDQPLPDADHTWYTDGSSFLQEGQRKAGAAVTTETEVIWARALPAGTSAQRAELIALTQALKMAEGKKLNVYTDSRYAFATAHIHGEIYRRRGWLTSEGKEIKNKDEILALLKALFLPKRLSIIHCPGHQKGNSAEARGNRMADQAAREVATRETPETSTLLAGKRTADGSEFEKRTADGSEFESPKKKAKVE

SEQ ID NO: 2336 - protein, 2091 aa, synthetic construct
  source 1..2091: note = Description of Artificial Sequence: Synthetic polypeptide
MPAAKRVKLDGGDKKYSIGLDIGTNSVGWAVITDEYKVPSKKFKVLGNTDRHSIKKNLIGALLFDSGETAEATRLKRTARRRYTRRKNRICYLQEIFSNEMAKVDDSFFHRLEESFLVEEDKKHERHPIFGNIVDEVAYHEKYPTIYHLRKKLVDSTDKADLRLIYLALAHMIKFRGHFLIEGDLNPDNSDVDKLFIQLVQTYNQLFEENPINASGVDAKAILSARLSKSRRLENLIAQLPGEKKNGLFGNLIALSLGLTPNFKSNFDLAEDAKLQLSKDTYDDDLDNLLAQIGDQYADLFLAAKNLSDAILLSDILRVNTEITKAPLSASMIKRYDEHHQDLTLLKALVRQQLPEKYKEIFFDQSKNGYAGYIDGGASQEEFYKFIKPILEKMDGTEELLVKLNREDLLRKQRTFDNGSIPHQIHLGELHAILRRQEDFYPFLKDNREKIEKILTFRIPYYVGPLARGNSRFAWMTRKSEETITPWNFEEVVDKGASAQSFIERMTNFDKNLPNEKVLPKHSLLYEYFTVYNELTKVKYVTEGMRKPAFLSGEQKKAIVDLLFKTNRKVTVKQLKEDYFKKIECFDSVEISGVEDRFNASLGTYHDLLKIIKDKDFLDNEENEDILEDIVLTLTLFEDREMIEERLKTYAHLFDDKVMKQLKRRRYTGWGRLSRKLINGIRDKQSGKTILDFLKSDGFANRNFMQLIHDDSLTFKEDIQKAQVSGQGDSLHEHIANLAGSPAIKKGILQTVKVVDELVKVMGRHKPENIVIEMARENQTTQKGQKNSRERMKRIEEGIKELGSQILKEHPVENTQLQNEKLYLYYLQNGRDMYVDQELDINRLSDYDVDHIVPQSFLKDDSIDNKVLTRSDKARGKSDNVPSEEVVKKMKNYWRQLLNAKLITQRKFDNLTKAERGGLSELDKAGFIKRQLVETRQITKHVAQILDSRMNTKYDENDKLIREVKVITLKSKLVSDFRKDFQFYKVREINNYHHAHDAYLNAVVGTALIKKYPKLESEFVYGDYKVYDVRKMIAKSEQEIGKATAKYFFYSNIMNFFKTEITLANGEIRKRPLIETNGETGEIVWDKGRDFATVRKVLSMPQVNIVKKTEVQTGGFSKESILPKRNSDKLIARKKDWDPKKYGGFDSPTVAYSVLVVAKVEKGKSKKLKSVKELLGITIMERSSFEKNPIDFLEAKGYKEVKKDLIIKLPKYSLFELENGRKRMLASAGELQKGNELALPSKYVNFLYLASHYEKLKGSPEDNEQKQLFVEQHKHYLDEIIEQISEFSKRVILADANLDKVLSAYNKHRDKPIREQAENIIHLFTLTNLGAPAAFKYFDTTIDRKRYTSTKEVLDATLIHQSITGLYETRIDLSQLGGDGGPAPGSSGGTLNIEDEYRLHETSKEPDVSLGSTWLSDFPQAWAETGGMGLAVRQAPLIIPLKATSTPVSIKQYPMSQEARLGIKPHIQRLLDQGILVPCQSPWNTPLLPVKKPGTNDYRPVQDLREVNKRVEDIHPTVPNPYNLLSGLPPSHQWYTVLDLKDAFFCLRLHPTSQPLFAFEWRDPEMGISGQLTWTRLPQGFKNSPTLFNEALHRDLAGFRIQHPDLILLQYVDDLLLAATSELDCQQGTRALLQTLGDLGYRASAKKAQICQKQVKYLGYLLKEGQRWLTEARKETVMGQPIPKTPRQLREFLGKAGFCRLFIPGFAEMAAPLYPLTKPGTLFNWGPDQQKAFQEIKQALLTAPALGLPDLTKPFELFVDEKQGYAKGVLTQKLGPWRRPVAYLSKKLDPVAAGWPPCLRMVAAIAVLTKDAGKLTMGQPLVILAPHAVEALVKQPPDRWLSNARMTHYQALLLDTDRVQFGPVVALNPATLLPLPEEGLQHDCLDILAEAHGTRSDLMDQPLPDADHTWYTDGSSFLQEGQRKAGAAVTTETEVIWARALPAGTSAQRAELIALTQALKMAEGKKLNVYTDSRYAFATAHIHGEIYRRRGWLTSEGKEIKNKDEILALLKALFLPKRLSIIHCPGHQKGNSAEARGNRMADQAAREVATRETPETSTLLAGKRTADGSEFEKRTADGSEFESPKKKAKVE

SEQ ID NO: 2337 - protein, 2093 aa, synthetic construct
  source 1..2093: note = Description of Artificial Sequence: Synthetic polypeptide
MPAAKRVKLDGGDKKYSIGLDIGTNSVGWAVITDEYKVPSKKFKVLGNTDRHSIKKNLIGALLFDSGETAEATRLKRTARRRYTRRKNRICYLQEIFSNEMAKVDDSFFHRLEESFLVEEDKKHERHPIFGNIVDEVAYHEKYPTIYHLRKKLVDSTDKADLRLIYLALAHMIKFRGHFLIEGDLNPDNSDVDKLFIQLVQTYNQLFEENPINASGVDAKAILSARLSKSRRLENLIAQLPGEKKNGLFGNLIALSLGLTPNFKSNFDLAEDAKLQLSKDTYDDDLDNLLAQIGDQYADLFLAAKNLSDAILLSDILRVNTEITKAPLSASMIKRYDEHHQDLTLLKALVRQQLPEKYKEIFFDQSKNGYAGYIDGGASQEEFYKFIKPILEKMDGTEELLVKLNREDLLRKQRTFDNGSIPHQIHLGELHAILRRQEDFYPFLKDNREKIEKILTFRIPYYVGPLARGNSRFAWMTRKSEETITPWNFEEVVDKGASAQSFIERMTNFDKNLPNEKVLPKHSLLYEYFTVYNELTKVKYVTEGMRKPAFLSGEQKKAIVDLLFKTNRKVTVKQLKEDYFKKIECFDSVEISGVEDRFNASLGTYHDLLKIIKDKDFLDNEENEDILEDIVLTLTLFEDREMIEERLKTYAHLFDDKVMKQLKRRRYTGWGRLSRKLINGIRDKQSGKTILDFLKSDGFANRNFMQLIHDDSLTFKEDIQKAQVSGQGDSLHEHIANLAGSPAIKKGILQTVKVVDELVKVMGRHKPENIVIEMARENQTTQKGQKNSRERMKRIEEGIKELGSQILKEHPVENTQLQNEKLYLYYLQNGRDMYVDQELDINRLSDYDVDHIVPQSFLKDDSIDNKVLTRSDKARGKSDNVPSEEVVKKMKNYWRQLLNAKLITQRKFDNLTKAERGGLSELDKAGFIKRQLVETRQITKHVAQILDSRMNTKYDENDKLIREVKVITLKSKLVSDFRKDFQFYKVREINNYHHAHDAYLNAVVGTALIKKYPKLESEFVYGDYKVYDVRKMIAKSEQEIGKATAKYFFYSNIMNFFKTEITLANGEIRKRPLIETNGETGEIVWDKGRDFATVRKVLSMPQVNIVKKTEVQTGGFSKESILPKRNSDKLIARKKDWDPKKYGGFDSPTVAYSVLVVAKVEKGKSKKLKSVKELLGITIMERSSFEKNPIDFLEAKGYKEVKKDLIIKLPKYSLFELENGRKRMLASAGELQKGNELALPSKYVNFLYLASHYEKLKGSPEDNEQKQLFVEQHKHYLDEIIEQISEFSKRVILADANLDKVLSAYNKHRDKPIREQAENIIHLFTLTNLGAPAAFKYFDTTIDRKRYTSTKEVLDATLIHQSITGLYETRIDLSQLGGDGGEAAAKPAPGGTLNIEDEYRLHETSKEPDVSLGSTWLSDFPQAWAETGGMGLAVRQAPLIIPLKATSTPVSIKQYPMSQEARLGIKPHIQRLLDQGILVPCQSPWNTPLLPVKKPGTNDYRPVQDLREVNKRVEDIHPTVPNPYNLLSGLPPSHQWYTVLDLKDAFFCLRLHPTSQPLFAFEWRDPEMGISGQLTWTRLPQGFKNSPTLFNEALHRDLAGFRIQHPDLILLQYVDDLLLAATSELDCQQGTRALLQTLGDLGYRASAKKAQICQKQVKYLGYLLKEGQRWLTEARKETVMGQPIPKTPRQLREFLGKAGFCRLFIPGFAEMAAPLYPLTKPGTLFNWGPDQQKAFQEIKQALLTAPALGLPDLTKPFELFVDEKQGYAKGVLTQKLGPWRRPVAYLSKKLDPVAAGWPPCLRMVAAIAVLTKDAGKLTMGQPLVILAPHAVEALVKQPPDRWLSNARMTHYQALLLDTDRVQFGPVVALNPATLLPLPEEGLQHDCLDILAEAHGTRSDLMDQPLPDADHTWYTDGSSFLQEGQRKAGAAVTTETEVIWARALPAGTSAQRAELIALTQALKMAEGKKLNVYTDSRYAFATAHIHGEIYRRRGWLTSEGKEIKNKDEILALLKALFLPKRLSIIHCPGHQKGNSAEARGNRMADQAAREVATRETPETSTLLAGKRTADGSEFEKRTADGSEFESPKKKAKVE

SEQ ID NO: 2338 - protein, 2096 aa, synthetic construct
  source 1..2096: note = Description of Artificial Sequence: Synthetic polypeptide
MPAAKRVKLDGGDKKYSIGLDIGTNSVGWAVITDEYKVPSKKFKVLGNTDRHSIKKNLIGALLFDSGETAEATRLKRTARRRYTRRKNRICYLQEIFSNEMAKVDDSFFHRLEESFLVEEDKKHERHPIFGNIVDEVAYHEKYPTIYHLRKKLVDSTDKADLRLIYLALAHMIKFRGHFLIEGDLNPDNSDVDKLFIQLVQTYNQLFEENPINASGVDAKAILSARLSKSRRLENLIAQLPGEKKNGLFGNLIALSLGLTPNFKSNFDLAEDAKLQLSKDTYDDDLDNLLAQIGDQYADLFLAAKNLSDAILLSDILRVNTEITKAPLSASMIKRYDEHHQDLTLLKALVRQQLPEKYKEIFFDQSKNGYAGYIDGGASQEEFYKFIKPILEKMDGTEELLVKLNREDLLRKQRTFDNGSIPHQIHLGELHAILRRQEDFYPFLKDNREKIEKILTFRIPYYVGPLARGNSRFAWMTRKSEETITPWNFEEVVDKGASAQSFIERMTNFDKNLPNEKVLPKHSLLYEYFTVYNELTKVKYVTEGMRKPAFLSGEQKKAIVDLLFKTNRKVTVKQLKEDYFKKIECFDSVEISGVEDRFNASLGTYHDLLKIIKDKDFLDNEENEDILEDIVLTLTLFEDREMIEERLKTYAHLFDDKVMKQLKRRRYTGWGRLSRKLINGIRDKQSGKTILDFLKSDGFANRNFMQLIHDDSLTFKEDIQKAQVSGQGDSLHEHIANLAGSPAIKKGILQTVKVVDELVKVMGRHKPENIVIEMARENQTTQKGQKNSRERMKRIEEGIKELGSQILKEHPVENTQLQNEKLYLYYLQNGRDMYVDQELDINRLSDYDVDHIVPQSFLKDDSIDNKVLTRSDKARGKSDNVPSEEVVKKMKNYWRQLLNAKLITQRKFDNLTKAERGGLSELDKAGFIKRQLVETRQITKHVAQILDSRMNTKYDENDKLIREVKVITLKSKLVSDFRKDFQFYKVREINNYHHAHDAYLNAVVGTALIKKYPKLESEFVYGDYKVYDVRKMIAKSEQEIGKATAKYFFYSNIMNFFKTEITLANGEIRKRPLIETNGETGEIVWDKGRDFATVRKVLSMPQVNIVKKTEVQTGGFSKESILPKRNSDKLIARKKDWDPKKYGGFDSPTVAYSVLVVAKVEKGKSKKLKSVKELLGITIMERSSFEKNPIDFLEAKGYKEVKKDLIIKLPKYSLFELENGRKRMLASAGELQKGNELALPSKYVNFLYLASHYEKLKGSPEDNEQKQLFVEQHKHYLDEIIEQISEFSKRVILADANLDKVLSAYNKHRDKPIREQAENIIHLFTLTNLGAPAAFKYFDTTIDRKRYTSTKEVLDATLIHQSITGLYETRIDLSQLGGDGGGGSPAPEAAAKGGTLNIEDEYRLHETSKEPDVSLGSTWLSDFPQAWAETGGMGLAVRQAPLIIPLKATSTPVSIKQYPMSQEARLGIKPHIQRLLDQGILVPCQSPWNTPLLPVKKPGTNDYRPVQDLREVNKRVEDIHPTVPNPYNLLSGLPPSHQWYTVLDLKDAFFCLRLHPTSQPLFAFEWRDPEMGISGQLTWTRLPQGFKNSPTLFNEALHRDLAGFRIQHPDLILLQYVDDLLLAATSELDCQQGTRALLQTLGDLGYRASAKKAQICQKQVKYLGYLLKEGQRWLTEARKETVMGQPIPKTPRQLREFLGKAGFCRLFIPGFAEMAAPLYPLTKPGTLFNWGPDQQKAFQEIKQALLTAPALGLPDLTKPFELFVDEKQGYAKGVLTQKLGPWRRPVAYLSKKLDPVAAGWPPCLRMVAAIAVLTKDAGKLTMGQPLVILAPHAVEALVKQPPDRWLSNARMTHYQALLLDTDRVQFGPVVALNPATLLPLPEEGLQHDCLDILAEAHGTRSDLMDQPLPDADHTWYTDGSSFLQEGQRKAGAAVTTETEVIWARALPAGTSAQRAELIALTQALKMAEGKKLNVYTDSRYAFATAHIHGEIYRRRGWLTSEGKEIKNKDEILALLKALFLPKRLSIIHCPGHQKGNSAEARGNRMADQAAREVATRETPETSTLLAGKRTADGSEFEKRTADGSEFESPKKKAKVE

SEQ ID NO: 2339 - protein, 2094 aa, synthetic construct
  source 1..2094: note = Description of Artificial Sequence: Synthetic polypeptide
MPAAKRVKLDGGDKKYSIGLDIGTNSVGWAVITDEYKVPSKKFKVLGNTDRHSIKKNLIGALLFDSGETAEATRLKRTARRRYTRRKNRICYLQEIFSNEMAKVDDSFFHRLEESFLVEEDKKHERHPIFGNIVDEVAYHEKYPTIYHLRKKLVDSTDKADLRLIYLALAHMIKFRGHFLIEGDLNPDNSDVDKLFIQLVQTYNQLFEENPINASGVDAKAILSARLSKSRRLENLIAQLPGEKKNGLFGNLIALSLGLTPNFKSNFDLAEDAKLQLSKDTYDDDLDNLLAQIGDQYADLFLAAKNLSDAILLSDILRVNTEITKAPLSASMIKRYDEHHQDLTLLKALVRQQLPEKYKEIFFDQSKNGYAGYIDGGASQEEFYKFIKPILEKMDGTEELLVKLNREDLLRKQRTFDNGSIPHQIHLGELHAILRRQEDFYPFLKDNREKIEKILTFRIPYYVGPLARGNSRFAWMTRKSEETITPWNFEEVVDKGASAQSFIERMTNFDKNLPNEKVLPKHSLLYEYFTVYNELTKVKYVTEGMRKPAFLSGEQKKAIVDLLFKTNRKVTVKQLKEDYFKKIECFDSVEISGVEDRFNASLGTYHDLLKIIKDKDFLDNEENEDILEDIVLTLTLFEDREMIEERLKTYAHLFDDKVMKQLKRRRYTGWGRLSRKLINGIRDKQSGKTILDFLKSDGFANRNFMQLIHDDSLTFKEDIQKAQVSGQGDSLHEHIANLAGSPAIKKGILQTVKVVDELVKVMGRHKPENIVIEMARENQTTQKGQKNSRERMKRIEEGIKELGSQILKEHPVENTQLQNEKLYLYYLQNGRDMYVDQELDINRLSDYDVDHIVPQSFLKDDSIDNKVLTRSDKARGKSDNVPSEEVVKKMKNYWRQLLNAKLITQRKFDNLTKAERGGLSELDKAGFIKRQLVETRQITKHVAQILDSRMNTKYDENDKLIREVKVITLKSKLVSDFRKDFQFYKVREINNYHHAHDAYLNAVVGTALIKKYPKLESEFVYGDYKVYDVRKMIAKSEQEIGKATAKYFFYSNIMNFFKTEITLANGEIRKRPLIETNGETGEIVWDKGRDFATVRKVLSMPQVNIVKKTEVQTGGFSKESILPKRNSDKLIARKKDWDPKKYGGFDSPTVAYSVLVVAKVEKGKSKKLKSVKELLGITIMERSSFEKNPIDFLEAKGYKEVKKDLIIKLPKYSLFELENGRKRMLASAGELQKGNELALPSKYVNFLYLASHYEKLKGSPEDNEQKQLFVEQHKHYLDEIIEQISEFSKRVILADANLDKVLSAYNKHRDKPIREQAENIIHLFTLTNLGAPAAFKYFDTTIDRKRYTSTKEVLDATLIHQSITGLYETRIDLSQLGGDGGGGSGSSPAPGGTLNIEDEYRLHETSKEPDVSLGSTWLSDFPQAWAETGGMGLAVRQAPLIIPLKATSTPVSIKQYPMSQEARLGIKPHIQRLLDQGILVPCQSPWNTPLLPVKKPGTNDYRPVQDLREVNKRVEDIHPTVPNPYNLLSGLPPSHQWYTVLDLKDAFFCLRLHPTSQPLFAFEWRDPEMGISGQLTWTRLPQGFKNSPTLFNEALHRDLAGFRIQHPDLILLQYVDDLLLAATSELDCQQGTRALLQTLGDLGYRASAKKAQICQKQVKYLGYLLKEGQRWLTEARKETVMGQPIPKTPRQLREFLGKAGFCRLFIPGFAEMAAPLYPLTKPGTLFNWGPDQQKAFQEIKQALLTAPALGLPDLTKPFELFVDEKQGYAKGVLTQKLGPWRRPVAYLSKKLDPVAAGWPPCLRMVAAIAVLTKDAGKLTMGQPLVILAPHAVEALVKQPPDRWLSNARMTHYQALLLDTDRVQFGPVVALNPATLLPLPEEGLQHDCLDILAEAHGTRSDLMDQPLPDADHTWYTDGSSFLQEGQRKAGAAVTTETEVIWARALPAGTSAQRAELIALTQALKMAEGKKLNVYTDSRYAFATAHIHGEIYRRRGWLTSEGKEIKNKDEILALLKALFLPKRLSIIHCPGHQKGNSAEARGNRMADQAAREVATRETPETSTLLAGKRTADGSEFEKRTADGSEFESPKKKAKVE

SEQ ID NO: 2340 - protein, 2091 aa, synthetic construct
  source 1..2091: note = Description of Artificial Sequence: Synthetic polypeptide
MPAAKRVKLDGGDKKYSIGLDIGTNSVGWAVITDEYKVPSKKFKVLGNTDRHSIKKNLIGALLFDSGETAEATRLKRTARRRYTRRKNRICYLQEIFSNEMAKVDDSFFHRLEESFLVEEDKKHERHPIFGNIVDEVAYHEKYPTIYHLRKKLVDSTDKADLRLIYLALAHMIKFRGHFLIEGDLNPDNSDVDKLFIQLVQTYNQLFEENPINASGVDAKAILSARLSKSRRLENLIAQLPGEKKNGLFGNLIALSLGLTPNFKSNFDLAEDAKLQLSKDTYDDDLDNLLAQIGDQYADLFLAAKNLSDAILLSDILRVNTEITKAPLSASMIKRYDEHHQDLTLLKALVRQQLPEKYKEIFFDQSKNGYAGYIDGGASQEEFYKFIKPILEKMDGTEELLVKLNREDLLRKQRTFDNGSIPHQIHLGELHAILRRQEDFYPFLKDNREKIEKILTFRIPYYVGPLARGNSRFAWMTRKSEETITPWNFEEVVDKGASAQSFIERMTNFDKNLPNEKVLPKHSLLYEYFTVYNELTKVKYVTEGMRKPAFLSGEQKKAIVDLLFKTNRKVTVKQLKEDYFKKIECFDSVEISGVEDRFNASLGTYHDLLKIIKDKDFLDNEENEDILEDIVLTLTLFEDREMIEERLKTYAHLFDDKVMKQLKRRRYTGWGRLSRKLINGIRDKQSGKTILDFLKSDGFANRNFMQLIHDDSLTFKEDIQKAQVSGQGDSLHEHIANLAGSPAIKKGILQTVKVVDELVKVMGRHKPENIVIEMARENQTTQKGQKNSRERMKRIEEGIKELGSQILKEHPVENTQLQNEKLYLYYLQNGRDMYVDQELDINRLSDYDVDHIVPQSFLKDDSIDNKVLTRSDKARGKSDNVPSEEVVKKMKNYWRQLLNAKLITQRKFDNLTKAERGGLSELDKAGFIKRQLVETRQITKHVAQILDSRMNTKYDENDKLIREVKVITLKSKLVSDFRKDFQFYKVREINNYHHAHDAYLNAVVGTALIKKYPKLESEFVYGDYKVYDVRKMIAKSEQEIGKATAKYFFYSNIMNFFKTEITLANGEIRKRPLIETNGETGEIVWDKGRDFATVRKVLSMPQVNIVKKTEVQTGGFSKESILPKRNSDKLIARKKDWDPKKYGGFDSPTVAYSVLVVAKVEKGKSKKLKSVKELLGITIMERSSFEKNPIDFLEAKGYKEVKKDLIIKLPKYSLFELENGRKRMLASAGELQKGNELALPSKYVNFLYLASHYEKLKGSPEDNEQKQLFVEQHKHYLDEIIEQISEFSKRVILADANLDKVLSAYNKHRDKPIREQAENIIHLFTLTNLGAPAAFKYFDTTIDRKRYTSTKEVLDATLIHQSITGLYETRIDLSQLGGDGGPAPGGSGGTLNIEDEYRLHETSKEPDVSLGSTWLSDFPQAWAETGGMGLAVRQAPLIIPLKATSTPVSIKQYPMSQEARLGIKPHIQRLLDQGILVPCQSPWNTPLLPVKKPGTNDYRPVQDLREVNKRVEDIHPTVPNPYNLLSGLPPSHQWYTVLDLKDAFFCLRLHPTSQPLFAFEWRDPEMGISGQLTWTRLPQGFKNSPTLFNEALHRDLAGFRIQHPDLILLQYVDDLLLAATSELDCQQGTRALLQTLGDLGYRASAKKAQICQKQVKYLGYLLKEGQRWLTEARKETVMGQPIPKTPRQLREFLGKAGFCRLFIPGFAEMAAPLYPLTKPGTLFNWGPDQQKAFQEIKQALLTAPALGLPDLTKPFELFVDEKQGYAKGVLTQKLGPWRRPVAYLSKKLDPVAAGWPPCLRMVAAIAVLTKDAGKLTMGQPLVILAPHAVEALVKQPPDRWLSNARMTHYQALLLDTDRVQFGPVVALNPATLLPLPEEGLQHDCLDILAEAHGTRSDLMDQPLPDADHTWYTDGSSFLQEGQRKAGAAVTTETEVIWARALPAGTSAQRAELIALTQALKMAEGKKLNVYTDSRYAFATAHIHGEIYRRRGWLTSEGKEIKNKDEILALLKALFLPKRLSIIHCPGHQKGNSAEARGNRMADQAAREVATRETPETSTLLAGKRTADGSEFEKRTADGSEFESPKKKAKVE

SEQ ID NO: 2341 - protein, 2093 aa, synthetic construct
  source 1..2093: note = Description of Artificial Sequence: Synthetic polypeptide
MPAAKRVKLDGGDKKYSIGLDIGTNSVGWAVITDEYKVPSKKFKVLGNTDRHSIKKNLIGALLFDSGETAEATRLKRTARRRYTRRKNRICYLQEIFSNEMAKVDDSFFHRLEESFLVEEDKKHERHPIFGNIVDEVAYHEKYPTIYHLRKKLVDSTDKADLRLIYLALAHMIKFRGHFLIEGDLNPDNSDVDKLFIQLVQTYNQLFEENPINASGVDAKAILSARLSKSRRLENLIAQLPGEKKNGLFGNLIALSLGLTPNFKSNFDLAEDAKLQLSKDTYDDDLDNLLAQIGDQYADLFLAAKNLSDAILLSDILRVNTEITKAPLSASMIKRYDEHHQDLTLLKALVRQQLPEKYKEIFFDQSKNGYAGYIDGGASQEEFYKFIKPILEKMDGTEELLVKLNREDLLRKQRTFDNGSIPHQIHLGELHAILRRQEDFYPFLKDNREKIEKILTFRIPYYVGPLARGNSRFAWMTRKSEETITPWNFEEVVDKGASAQSFIERMTNFDKNLPNEKVLPKHSLLYEYFTVYNELTKVKYVTEGMRKPAFLSGEQKKAIVDLLFKTNRKVTVKQLKEDYFKKIECFDSVEISGVEDRFNASLGTYHDLLKIIKDKDFLDNEENEDILEDIVLTLTLFEDREMIEERLKTYAHLFDDKVMKQLKRRRYTGWGRLSRKLINGIRDKQSGKTILDFLKSDGFANRNFMQLIHDDSLTFKEDIQKAQVSGQGDSLHEHIANLAGSPAIKKGILQTVKVVDELVKVMGRHKPENIVIEMARENQTTQKGQKNSRERMKRIEEGIKELGSQILKEHPVENTQLQNEKLYLYYLQNGRDMYVDQELDINRLSDYDVDHIVPQSFLKDDSIDNKVLTRSDKARGKSDNVPSEEVVKKMKNYWRQLLNAKLITQRKFDNLTKAERGGLSELDKAGFIKRQLVETRQITKHVAQILDSRMNTKYDENDKLIREVKVITLKSKLVSDFRKDFQFYKVREINNYHHAHDAYLNAVVGTALIKKYPKLESEFVYGDYKVYDVRKMIAKSEQEIGKATAKYFFYSNIMNFFKTEITLANGEIRKRPLIETNGETGEIVWDKGRDFATVRKVLSMPQVNIVKKTEVQTGGFSKESILPKRNSDKLIARKKDWDPKKYGGFDSPTVAYSVLVVAKVEKGKSKKLKSVKELLGITIMERSSFEKNPIDFLEAKGYKEVKKDLIIKLPKYSLFELENGRKRMLASAGELQKGNELALPSKYVNFLYLASHYEKLKGSPEDNEQKQLFVEQHKHYLDEIIEQISEFSKRVILADANLDKVLSAYNKHRDKPIREQAENIIHLFTLTNLGAPAAFKYFDTTIDRKRYTSTKEVLDATLIHQSITGLYETRIDLSQLGGDGGEAAAKGGSGGTLNIEDEYRLHETSKEPDVSLGSTWLSDFPQAWAETGGMGLAVRQAPLIIPLKATSTPVSIKQYPMSQEARLGIKPHIQRLLDQGILVPCQSPWNTPLLPVKKPGTNDYRPVQDLREVNKRVEDIHPTVPNPYNLLSGLPPSHQWYTVLDLKDAFFCLRLHPTSQPLFAFEWRDPEMGISGQLTWTRLPQGFKNSPTLFNEALHRDLAGFRIQHPDLILLQYVDDLLLAATSELDCQQGTRALLQTLGDLGYRASAKKAQICQKQVKYLGYLLKEGQRWLTEARKETVMGQPIPKTPRQLREFLGKAGFCRLFIPGFAEMAAPLYPLTKPGTLFNWGPDQQKAFQEIKQALLTAPALGLPDLTKPFELFVDEKQGYAKGVLTQKLGPWRRPVAYLSKKLDPVAAGWPPCLRMVAAIAVLTKDAGKLTMGQPLVILAPHAVEALVKQPPDRWLSNARMTHYQALLLDTDRVQFGPVVALNPATLLPLPEEGLQHDCLDILAEAHGTRSDLMDQPLPDADHTWYTDGSSFLQEGQRKAGAAVTTETEVIWARALPAGTSAQRAELIALTQALKMAEGKKLNVYTDSRYAFATAHIHGEIYRRRGWLTSEGKEIKNKDEILALLKALFLPKRLSIIHCPGHQKGNSAEARGNRMADQAAREVATRETPETSTLLAGKRTADGSEFEKRTADGSEFESPKKKAKVE

SEQ ID NO: 2342 - protein, 2093 aa, synthetic construct
  source 1..2093: note = Description of Artificial Sequence: Synthetic polypeptide
MPAAKRVKLDGGDKKYSIGLDIGTNSVGWAVITDEYKVPSKKFKVLGNTDRHSIKKNLIGALLFDSGETAEATRLKRTARRRYTRRKNRICYLQEIFSNEMAKVDDSFFHRLEESFLVEEDKKHERHPIFGNIVDEVAYHEKYPTIYHLRKKLVDSTDKADLRLIYLALAHMIKFRGHFLIEGDLNPDNSDVDKLFIQLVQTYNQLFEENPINASGVDAKAILSARLSKSRRLENLIAQLPGEKKNGLFGNLIALSLGLTPNFKSNFDLAEDAKLQLSKDTYDDDLDNLLAQIGDQYADLFLAAKNLSDAILLSDILRVNTEITKAPLSASMIKRYDEHHQDLTLLKALVRQQLPEKYKEIFFDQSKNGYAGYIDGGASQEEFYKFIKPILEKMDGTEELLVKLNREDLLRKQRTFDNGSIPHQIHLGELHAILRRQEDFYPFLKDNREKIEKILTFRIPYYVGPLARGNSRFAWMTRKSEETITPWNFEEVVDKGASAQSFIERMTNFDKNLPNEKVLPKHSLLYEYFTVYNELTKVKYVTEGMRKPAFLSGEQKKAIVDLLFKTNRKVTVKQLKEDYFKKIECFDSVEISGVEDRFNASLGTYHDLLKIIKDKDFLDNEENEDILEDIVLTLTLFEDREMIEERLKTYAHLFDDKVMKQLKRRRYTGWGRLSRKLINGIRDKQSGKTILDFLKSDGFANRNFMQLIHDDSLTFKEDIQKAQVSGQGDSLHEHIANLAGSPAIKKGILQTVKVVDELVKVMGRHKPENIVIEMARENQTTQKGQKNSRERMKRIEEGIKELGSQILKEHPVENTQLQNEKLYLYYLQNGRDMYVDQELDINRLSDYDVDHIVPQSFLKDDSIDNKVLTRSDKARGKSDNVPSEEVVKKMKNYWRQLLNAKLITQRKFDNLTKAERGGLSELDKAGFIKRQLVETRQITKHVAQILDSRMNTKYDENDKLIREVKVITLKSKLVSDFRKDFQFYKVREINNYHHAHDAYLNAVVGTALIKKYPKLESEFVYGDYKVYDVRKMIAKSEQEIGKATAKYFFYSNIMNFFKTEITLANGEIRKRPLIETNGETGEIVWDKGRDFATVRKVLSMPQVNIVKKTEVQTGGFSKESILPKRNSDKLIARKKDWDPKKYGGFDSPTVAYSVLVVAKVEKGKSKKLKSVKELLGITIMERSSFEKNPIDFLEAKGYKEVKKDLIIKLPKYSLFELENGRKRMLASAGELQKGNELALPSKYVNFLYLASHYEKLKGSPEDNEQKQLFVEQHKHYLDEIIEQISEFSKRVILADANLDKVLSAYNKHRDKPIREQAENIIHLFTLTNLGAPAAFKYFDTTIDRKRYTSTKEVLDATLIHQSITGLYETRIDLSQLGGDGGGGGEAAAKGGTLNIEDEYRLHETSKEPDVSLGSTWLSDFPQAWAETGGMGLAVRQAPLIIPLKATSTPVSIKQYPMSQEARLGIKPHIQRLLDQGILVPCQSPWNTPLLPVKKPGTNDYRPVQDLREVNKRVEDIHPTVPNPYNLLSGLPPSHQWYTVLDLKDAFFCLRLHPTSQPLFAFEWRDPEMGISGQLTWTRLPQGFKNSPTLFNEALHRDLAGFRIQHPDLILLQYVDDLLLAATSELDCQQGTRALLQTLGDLGYRASAKKAQICQKQVKYLGYLLKEGQRWLTEARKETVMGQPIPKTPRQLREFLGKAGFCRLFIPGFAEMAAPLYPLTKPGTLFNWGPDQQKAFQEIKQALLTAPALGLPDLTKPFELFVDEKQGYAKGVLTQKLGPWRRPVAYLSKKLDPVAAGWPPCLRMVAAIAVLTKDAGKLTMGQPLVILAPHAVEALVKQPPDRWLSNARMTHYQALLLDTDRVQFGPVVALNPATLLPLPEEGLQHDCLDILAEAHGTRSDLMDQPLPDADHTWYTDGSSFLQEGQRKAGAAVTTETEVIWARALPAGTSAQRAELIALTQALKMAEGKKLNVYTDSRYAFATAHIHGEIYRRRGWLTSEGKEIKNKDEILALLKALFLPKRLSIIHCPGHQKGNSAEARGNRMADQAAREVATRETPETSTLLAGKRTADGSEFEKRTADGSEFESPKKKAKVE

SEQ ID NO: 2343 - protein, 2131 aa, synthetic construct
  source 1..2131: note = Description of Artificial Sequence: Synthetic polypeptide
MPAAKRVKLDGGDKKYSIGLDIGTNSVGWAVITDEYKVPSKKFKVLGNTDRHSIKKNLIGALLFDSGETAEATRLKRTARRRYTRRKNRICYLQEIFSNEMAKVDDSFFHRLEESFLVEEDKKHERHPIFGNIVDEVAYHEKYPTIYHLRKKLVDSTDKADLRLIYLALAHMIKFRGHFLIEGDLNPDNSDVDKLFIQLVQTYNQLFEENPINASGVDAKAILSARLSKSRRLENLIAQLPGEKKNGLFGNLIALSLGLTPNFKSNFDLAEDAKLQLSKDTYDDDLDNLLAQIGDQYADLFLAAKNLSDAILLSDILRVNTEITKAPLSASMIKRYDEHHQDLTLLKALVRQQLPEKYKEIFFDQSKNGYAGYIDGGASQEEFYKFIKPILEKMDGTEELLVKLNREDLLRKQRTFDNGSIPHQIHLGELHAILRRQEDFYPFLKDNREKIEKILTFRIPYYVGPLARGNSRFAWMTRKSEETITPWNFEEVVDKGASAQSFIERMTNFDKNLPNEKVLPKHSLLYEYFTVYNELTKVKYVTEGMRKPAFLSGEQKKAIVDLLFKTNRKVTVKQLKEDYFKKIECFDSVEISGVEDRFNASLGTYHDLLKIIKDKDFLDNEENEDILEDIVLTLTLFEDREMIEERLKTYAHLFDDKVMKQLKRRRYTGWGRLSRKLINGIRDKQSGKTILDFLKSDGFANRNFMQLIHDDSLTFKEDIQKAQVSGQGDSLHEHIANLAGSPAIKKGILQTVKVVDELVKVMGRHKPENIVIEMARENQTTQKGQKNSRERMKRIEEGIKELGSQILKEHPVENTQLQNEKLYLYYLQNGRDMYVDQELDINRLSDYDVDHIVPQSFLKDDSIDNKVLTRSDKARGKSDNVPSEEVVKKMKNYWRQLLNAKLITQRKFDNLTKAERGGLSELDKAGFIKRQLVETRQITKHVAQILDSRMNTKYDENDKLIREVKVITLKSKLVSDFRKDFQFYKVREINNYHHAHDAYLNAVVGTALIKKYPKLESEFVYGDYKVYDVRKMIAKSEQEIGKATAKYFFYSNIMNFFKTEITLANGEIRKRPLIETNGETGEIVWDKGRDFATVRKVLSMPQVNIVKKTEVQTGGFSKESILPKRNSDKLIARKKDWDPKKYGGFDSPTVAYSVLVVAKVEKGKSKKLKSVKELLGITIMERSSFEKNPIDFLEAKGYKEVKKDLIIKLPKYSLFELENGRKRMLASAGELQKGNELALPSKYVNFLYLASHYEKLKGSPEDNEQKQLFVEQHKHYLDEIIEQISEFSKRVILADANLDKVLSAYNKHRDKPIREQAENIIHLFTLTNLGAPAAFKYFDTTIDRKRYTSTKEVLDATLIHQSITGLYETRIDLSQLGGDGGAEAAAKEAAAKEAAAKEAAAKALEAEAAAKEAAAKEAAAKEAAAKAGGTLNIEDEYRLHETSKEPDVSLGSTWLSDFPQAWAETGGMGLAVRQAPLIIPLKATSTPVSIKQYPMSQEARLGIKPHIQRLLDQGILVPCQSPWNTPLLPVKKPGTNDYRPVQDLREVNKRVEDIHPTVPNPYNLLSGLPPSHQWYTVLDLKDAFFCLRLHPTSQPLFAFEWRDPEMGISGQLTWTRLPQGFKNSPTLFNEALHRDLAGFRIQHPDLILLQYVDDLLLAATSELDCQQGTRALLQTLGDLGYRASAKKAQICQKQVKYLGYLLKEGQRWLTEARKETVMGQPIPKTPRQLREFLGKAGFCRLFIPGFAEMAAPLYPLTKPGTLFNWGPDQQKAFQEIKQALLTAPALGLPDLTKPFELFVDEKQGYAKGVLTQKLGPWRRPVAYLSKKLDPVAAGWPPCLRMVAAIAVLTKDAGKLTMGQPLVILAPHAVEALVKQPPDRWLSNARMTHYQALLLDTDRVQFGPVVALNPATLLPLPEEGLQHDCLDILAEAHGTRSDLMDQPLPDADHTWYTDGSSFLQEGQRKAGAAVTTETEVIWARALPAGTSAQRAELIALTQALKMAEGKKLNVYTDSRYAFATAHIHGEIYRRRGWLTSEGKEIKNKDEILALLKALFLPKRLSIIHCPGHQKGNSAEARGNRMADQAAREVATRETPETSTLLAGKRTADGSEFEKRTADGSEFESPKKKAKVE

SEQ ID NO: 2344 - protein, 2096 aa, synthetic construct
  source 1..2096: note = Description of Artificial Sequence: Synthetic polypeptide
MPAAKRVKLDGGDKKYSIGLDIGTNSVGWAVITDEYKVPSKKFKVLGNTDRHSIKKNLIGALLFDSGETAEATRLKRTARRRYTRRKNRICYLQEIFSNEMAKVDDSFFHRLEESFLVEEDKKHERHPIFGNIVDEVAYHEKYPTIYHLRKKLVDSTDKADLRLIYLALAHMIKFRGHFLIEGDLNPDNSDVDKLFIQLVQTYNQLFEENPINASGVDAKAILSARLSKSRRLENLIAQLPGEKKNGLFGNLIALSLGLTPNFKSNFDLAEDAKLQLSKDTYDDDLDNLLAQIGDQYADLFLAAKNLSDAILLSDILRVNTEITKAPLSASMIKRYDEHHQDLTLLKALVRQQLPEKYKEIFFDQSKNGYAGYIDGGASQEEFYKFIKPILEKMDGTEELLVKLNREDLLRKQRTFDNGSIPHQIHLGELHAILRRQEDFYPFLKDNREKIEKILTFRIPYYVGPLARGNSRFAWMTRKSEETITPWNFEEVVDKGASAQSFIERMTNFDKNLPNEKVLPKHSLLYEYFTVYNELTKVKYVTEGMRKPAFLSGEQKKAIVDLLFKTNRKVTVKQLKEDYFKKIECFDSVEISGVEDRFNASLGTYHDLLKIIKDKDFLDNEENEDILEDIVLTLTLFEDREMIEERLKTYAHLFDDKVMKQLKRRRYTGWGRLSRKLINGIRDKQSGKTILDFLKSDGFANRNFMQLIHDDSLTFKEDIQKAQVSGQGDSLHEHIANLAGSPAIKKGILQTVKVVDELVKVMGRHKPENIVIEMARENQTTQKGQKNSRERMKRIEEGIKELGSQILKEHPVENTQLQNEKLYLYYLQNGRDMYVDQELDINRLSDYDVDHIVPQSFLKDDSIDNKVLTRSDKARGKSDNVPSEEVVKKMKNYWRQLLNAKLITQRKFDNLTKAERGGLSELDKAGFIKRQLVETRQITKHVAQILDSRMNTKYDENDKLIREVKVITLKSKLVSDFRKDFQFYKVREINNYHHAHDAYLNAVVGTALIKKYPKLESEFVYGDYKVYDVRKMIAKSEQEIGKATAKYFFYSNIMNFFKTEITLANGEIRKRPLIETNGETGEIVWDKGRDFATVRKVLSMPQVNIVKKTEVQTGGFSKESILPKRNSDKLIARKKDWDPKKYGGFDSPTVAYSVLVVAKVEKGKSKKLKSVKELLGITIMERSSFEKNPIDFLEAKGYKEVKKDLIIKLPKYSLFELENGRKRMLASAGELQKGNELALPSKYVNFLYLASHYEKLKGSPEDNEQKQLFVEQHKHYLDEIIEQISEFSKRVILADANLDKVLSAYNKHRDKPIREQAENIIHLFTLTNLGAPAAFKYFDTTIDRKRYTSTKEVLDATLIHQSITGLYETRIDLSQLGGDGGEAAAKGGGGGSGGTLNIEDEYRLHETSKEPDVSLGSTWLSDFPQAWAETGGMGLAVRQAPLIIPLKATSTPVSIKQYPMSQEARLGIKPHIQRLLDQGILVPCQSPWNTPLLPVKKPGTNDYRPVQDLREVNKRVEDIHPTVPNPYNLLSGLPPSHQWYTVLDLKDAFFCLRLHPTSQPLFAFEWRDPEMGISGQLTWTRLPQGFKNSPTLFNEALHRDLAGFRIQHPDLILLQYVDDLLLAATSELDCQQGTRALLQTLGDLGYRASAKKAQICQKQVKYLGYLLKEGQRWLTEARKETVMGQPIPKTPRQLREFLGKAGFCRLFIPGFAEMAAPLYPLTKPGTLFNWGPDQQKAFQEIKQALLTAPALGLPDLTKPFELFVDEKQGYAKGVLTQKLGPWRRPVAYLSKKLDPVAAGWPPCLRMVAAIAVLTKDAGKLTMGQPLVILAPHAVEALVKQPPDRWLSNARMTHYQALLLDTDRVQFGPVVALNPATLLPLPEEGLQHDCLDILAEAHGTRSDLMDQPLPDADHTWYTDGSSFLQEGQRKAGAAVTTETEVIWARALPAGTSAQRAELIALTQALKMAEGKKLNVYTDSRYAFATAHIHGEIYRRRGWLTSEGKEIKNKDEILALLKALFLPKRLSIIHCPGHQKGNSAEARGNRMADQAAREVATRETPETSTLLAGKRTADGSEFEKRTADGSEFESPKKKAKVE

SEQ ID NO: 2345 - protein, 2096 aa, synthetic construct
  source 1..2096: note = Description of Artificial Sequence: Synthetic polypeptide
MPAAKRVKLDGGDKKYSIGLDIGTNSVGWAVITDEYKVPSKKFKVLGNTDRHSIKKNLIGALLFDSGETAEATRLKRTARRRYTRRKNRICYLQEIFSNEMAKVDDSFFHRLEESFLVEEDKKHERHPIFGNIVDEVAYHEKYPTIYHLRKKLVDSTDKADLRLIYLALAHMIKFRGHFLIEGDLNPDNSDVDKLFIQLVQTYNQLFEENPINASGVDAKAILSARLSKSRRLENLIAQLPGEKKNGLFGNLIALSLGLTPNFKSNFDLAEDAKLQLSKDTYDDDLDNLLAQIGDQYADLFLAAKNLSDAILLSDILRVNTEITKAPLSASMIKRYDEHHQDLTLLKALVRQQLPEKYKEIFFDQSKNGYAGYIDGGASQEEFYKFIKPILEKMDGTEELLVKLNREDLLRKQRTFDNGSIPHQIHLGELHAILRRQEDFYPFLKDNREKIEKILTFRIPYYVGPLARGNSRFAWMTRKSEETITPWNFEEVVDKGASAQSFIERMTNFDKNLPNEKVLPKHSLLYEYFTVYNELTKVKYVTEGMRKPAFLSGEQKKAIVDLLFKTNRKVTVKQLKEDYFKKIECFDSVEISGVEDRFNASLGTYHDLLKIIKDKDFLDNEENEDILEDIVLTLTLFEDREMIEERLKTYAHLFDDKVMKQLKRRRYTGWGRLSRKLINGIRDKQSGKTILDFLKSDGFANRNFMQLIHDDSLTFKEDIQKAQVSGQGDSLHEHIANLAGSPAIKKGILQTVKVVDELVKVMGRHKPENIVIEMARENQTTQKGQKNSRERMKRIEEGIKELGSQILKEHPVENTQLQNEKLYLYYLQNGRDMYVDQELDINRLSDYDVDHIVPQSFLKDDSIDNKVLTRSDKARGKSDNVPSEEVVKKMKNYWRQLLNAKLITQRKFDNLTKAERGGLSELDKAGFIKRQLVETRQITKHVAQILDSRMNTKYDENDKLIREVKVITLKSKLVSDFRKDFQFYKVREINNYHHAHDAYLNAVVGTALIKKYPKLESEFVYGDYKVYDVRKMIAKSEQEIGKATAKYFFYSNIMNFFKTEITLANGEIRKRPLIETNGETGEIVWDKGRDFATVRKVLSMPQVNIVKKTEVQTGGFSKESILPKRNSDKLIARKKDWDPKKYGGFDSPTVAYSVLVVAKVEKGKSKKLKSVKELLGITIMERSSFEKNPIDFLEAKGYKEVKKDLIIKLPKYSLFELENGRKRMLASAGELQKGNELALPSKYVNFLYLASHYEKLKGSPEDNEQKQLFVEQHKHYLDEIIEQISEFSKRVILADANLDKVLSAYNKHRDKPIREQAENIIHLFTLTNLGAPAAFKYFDTTIDRKRYTSTKEVLDATLIHQSITGLYETRIDLSQLGGDGGGSSPAPEAAAKGGTLNIEDEYRLHETSKEPDVSLGSTWLSDFPQAWAETGGMGLAVRQAPLIIPLKATSTPVSIKQYPMSQEARLGIKPHIQRLLDQGILVPCQSPWNTPLLPVKKPGTNDYRPVQDLREVNKRVEDIHPTVPNPYNLLSGLPPSHQWYTVLDLKDAFFCLRLHPTSQPLFAFEWRDPEMGISGQLTWTRLPQGFKNSPTLFNEALHRDLAGFRIQHPDLILLQYVDDLLLAATSELDCQQGTRALLQTLGDLGYRASAKKAQICQKQVKYLGYLLKEGQRWLTEARKETVMGQPIPKTPRQLREFLGKAGFCRLFIPGFAEMAAPLYPLTKPGTLFNWGPDQQKAFQEIKQALLTAPALGLPDLTKPFELFVDEKQGYAKGVLTQKLGPWRRPVAYLSKKLDPVAAGWPPCLRMVAAIAVLTKDAGKLTMGQPLVILAPHAVEALVKQPPDRWLSNARMTHYQALLLDTDRVQFGPVVALNPATLLPLPEEGLQHDCLDILAEAHGTRSDLMDQPLPDADHTWYTDGSSFLQEGQRKAGAAVTTETEVIWARALPAGTSAQRAELIALTQALKMAEGKKLNVYTDSRYAFATAHIHGEIYRRRGWLTSEGKEIKNKDEILALLKALFLPKRLSIIHCPGHQKGNSAEARGNRMADQAAREVATRETPETSTLLAGKRTADGSEFEKRTADGSEFESPKKKAKVE

SEQ ID NO: 2346 - protein, 2094 aa, synthetic construct
  source 1..2094: note = Description of Artificial Sequence: Synthetic polypeptide
MPAAKRVKLDGGDKKYSIGLDIGTNSVGWAVITDEYKVPSKKFKVLGNTDRHSIKKNLIGALLFDSGETAEATRLKRTARRRYTRRKNRICYLQEIFSNEMAKVDDSFFHRLEESFLVEEDKKHERHPIFGNIVDEVAYHEKYPTIYHLRKKLVDSTDKADLRLIYLALAHMIKFRGHFLIEGDLNPDNSDVDKLFIQLVQTYNQLFEENPINASGVDAKAILSARLSKSRRLENLIAQLPGEKKNGLFGNLIALSLGLTPNFKSNFDLAEDAKLQLSKDTYDDDLDNLLAQIGDQYADLFLAAKNLSDAILLSDILRVNTEITKAPLSASMIKRYDEHHQDLTLLKALVRQQLPEKYKEIFFDQSKNGYAGYIDGGASQEEFYKFIKPILEKMDGTEELLVKLNREDLLRKQRTFDNGSIPHQIHLGELHAILRRQEDFYPFLKDNREKIEKILTFRIPYYVGPLARGNSRFAWMTRKSEETITPWNFEEVVDKGASAQSFIERMTNFDKNLPNEKVLPKHSLLYEYFTVYNELTKVKYVTEGMRKPAFLSGEQKKAIVDLLFKTNRKVTVKQLKEDYFKKIECFDSVEISGVEDRFNASLGTYHDLLKIIKDKDFLDNEENEDILEDIVLTLTLFEDREMIEERLKTYAHLFDDKVMKQLKRRRYTGWGRLSRKLINGIRDKQSGKTILDFLKSDGFANRNFMQLIHDDSLTFKEDIQKAQVSGQGDSLHEHIANLAGSPAIKKGILQTVKVVDELVKVMGRHKPENIVIEMARENQTTQKGQKNSRERMKRIEEGIKELGSQILKEHPVENTQLQNEKLYLYYLQNGRDMYVDQELDINRLSDYDVDHIVPQSFLKDDSIDNKVLTRSDKARGKSDNVPSEEVVKKMKNYWRQLLNAKLITQRKFDNLTKAERGGLSELDKAGFIKRQLVETRQITKHVAQILDSRMNTKYDENDKLIREVKVITLKSKLVSDFRKDFQFYKVREINNYHHAHDAYLNAVVGTALIKKYPKLESEFVYGDYKVYDVRKMIAKSEQEIGKATAKYFFYSNIMNFFKTEITLANGEIRKRPLIETNGETGEIVWDKGRDFATVRKVLSMPQVNIVKKTEVQTGGFSKESILPKRNSDKLIARKKDWDPKKYGGFDSPTVAYSVLVVAKVEKGKSKKLKSVKELLGITIMERSSFEKNPIDFLEAKGYKEVKKDLIIKLPKYSLFELENGRKRMLASAGELQKGNELALPSKYVNFLYLASHYEKLKGSPEDNEQKQLFVEQHKHYLDEIIEQISEFSKRVILADANLDKVLSAYNKHRDKPIREQAENIIHLFTLTNLGAPAAFKYFDTTIDRKRYTSTKEVLDATLIHQSITGLYETRIDLSQLGGDGGGGGGSSPAPGGTLNIEDEYRLHETSKEPDVSLGSTWLSDFPQAWAETGGMGLAVRQAPLIIPLKATSTPVSIKQYPMSQEARLGIKPHIQRLLDQGILVPCQSPWNTPLLPVKKPGTNDYRPVQDLREVNKRVEDIHPTVPNPYNLLSGLPPSHQWYTVLDLKDAFFCLRLHPTSQPLFAFEWRDPEMGISGQLTWTRLPQGFKNSPTLFNEALHRDLAGFRIQHPDLILLQYVDDLLLAATSELDCQQGTRALLQTLGDLGYRASAKKAQICQKQVKYLGYLLKEGQRWLTEARKETVMGQPIPKTPRQLREFLGKAGFCRLFIPGFAEMAAPLYPLTKPGTLFNWGPDQQKAFQEIKQALLTAPALGLPDLTKPFELFVDEKQGYAKGVLTQKLGPWRRPVAYLSKKLDPVAAGWPPCLRMVAAIAVLTKDAGKLTMGQPLVILAPHAVEALVKQPPDRWLSNARMTHYQALLLDTDRVQFGPVVALNPATLLPLPEEGLQHDCLDILAEAHGTRSDLMDQPLPDADHTWYTDGSSFLQEGQRKAGAAVTTETEVIWARALPAGTSAQRAELIALTQALKMAEGKKLNVYTDSRYAFATAHIHGEIYRRRGWLTSEGKEIKNKDEILALLKALFLPKRLSIIHCPGHQKGNSAEARGNRMADQAAREVATRETPETSTLLAGKRTADGSEFEKRTADGSEFESPKKKAKVE

SEQ ID NO: 2347 - protein, 2096 aa, synthetic construct
  source 1..2096: note = Description of Artificial Sequence: Synthetic polypeptide
MPAAKRVKLDGGDKKYSIGLDIGTNSVGWAVITDEYKVPSKKFKVLGNTDRHSIKKNLIGALLFDSGETAEATRLKRTARRRYTRRKNRICYLQEIFSNEMAKVDDSFFHRLEESFLVEEDKKHERHPIFGNIVDEVAYHEKYPTIYHLRKKLVDSTDKADLRLIYLALAHMIKFRGHFLIEGDLNPDNSDVDKLFIQLVQTYNQLFEENPINASGVDAKAILSARLSKSRRLENLIAQLPGEKKNGLFGNLIALSLGLTPNFKSNFDLAEDAKLQLSKDTYDDDLDNLLAQIGDQYADLFLAAKNLSDAILLSDILRVNTEITKAPLSASMIKRYDEHHQDLTLLKALVRQQLPEKYKEIFFDQSKNGYAGYIDGGASQEEFYKFIKPILEKMDGTEELLVKLNREDLLRKQRTFDNGSIPHQIHLGELHAILRRQEDFYPFLKDNREKIEKILTFRIPYYVGPLARGNSRFAWMTRKSEETITPWNFEEVVDKGASAQSFIERMTNFDKNLPNEKVLPKHSLLYEYFTVYNELTKVKYVTEGMRKPAFLSGEQKKAIVDLLFKTNRKVTVKQLKEDYFKKIECFDSVEISGVEDRFNASLGTYHDLLKIIKDKDFLDNEENEDILEDIVLTLTLFEDREMIEERLKTYAHLFDDKVMKQLKRRRYTGWGRLSRKLINGIRDKQSGKTILDFLKSDGFANRNFMQLIHDDSLTFKEDIQKAQVSGQGDSLHEHIANLAGSPAIKKGILQTVKVVDELVKVMGRHKPENIVIEMARENQTTQKGQKNSRERMKRIEEGIKELGSQILKEHPVENTQLQNEKLYLYYLQNGRDMYVDQELDINRLSDYDVDHIVPQSFLKDDSIDNKVLTRSDKARGKSDNVPSEEVVKKMKNYWRQLLNAKLITQRKFDNLTKAERGGLSELDKAGFIKRQLVETRQITKHVAQILDSRMNTKYDENDKLIREVKVITLKSKLVSDFRKDFQFYKVREINNYHHAHDAYLNAVVGTALIKKYPKLESEFVYGDYKVYDVRKMIAKSEQEIGKATAKYFFYSNIMNFFKTEITLANGEIRKRPLIETNGETGEIVWDKGRDFATVRKVLSMPQVNIVKKTEVQTGGFSKESILPKRNSDKLIARKKDWDPKKYGGFDSPTVAYSVLVVAKVEKGKSKKLKSVKELLGITIMERSSFEKNPIDFLEAKGYKEVKKDLIIKLPKYSLFELENGRKRMLASAGELQKGNELALPSKYVNFLYLASHYEKLKGSPEDNEQKQLFVEQHKHYLDEIIEQISEFSKRVILADANLDKVLSAYNKHRDKPIREQAENIIHLFTLTNLGAPAAFKYFDTTIDRKRYTSTKEVLDATLIHQSITGLYETRIDLSQLGGDGGPAPEAAAKGSSGGTLNIEDEYRLHETSKEPDVSLGSTWLSDFPQAWAETGGMGLAVRQAPLIIPLKATSTPVSIKQYPMSQEARLGIKPHIQRLLDQGILVPCQSPWNTPLLPVKKPGTNDYRPVQDLREVNKRVEDIHPTVPNPYNLLSGLPPSHQWYTVLDLKDAFFCLRLHPTSQPLFAFEWRDPEMGISGQLTWTRLPQGFKNSPTLFNEALHRDLAGFRIQHPDLILLQYVDDLLLAATSELDCQQGTRALLQTLGDLGYRASAKKAQICQKQVKYLGYLLKEGQRWLTEARKETVMGQPIPKTPRQLREFLGKAGFCRLFIPGFAEMAAPLYPLTKPGTLFNWGPDQQKAFQEIKQALLTAPALGLPDLTKPFELFVDEKQGYAKGVLTQKLGPWRRPVAYLSKKLDPVAAGWPPCLRMVAAIAVLTKDAGKLTMGQPLVILAPHAVEALVKQPPDRWLSNARMTHYQALLLDTDRVQFGPVVALNPATLLPLPEEGLQHDCLDILAEAHGTRSDLMDQPLPDADHTWYTDGSSFLQEGQRKAGAAVTTETEVIWARALPAGTSAQRAELIALTQALKMAEGKKLNVYTDSRYAFATAHIHGEIYRRRGWLTSEGKEIKNKDEILALLKALFLPKRLSIIHCPGHQKGNSAEARGNRMADQAAREVATRETPETSTLLAGKRTADGSEFEKRTADGSEFESPKKKAKVE

SEQ ID NO: 2348 - protein, 2093 aa, synthetic construct
  source 1..2093: note = Description of Artificial Sequence: Synthetic polypeptide
MPAAKRVKLDGGDKKYSIGLDIGTNSVGWAVITDEYKVPSKKFKVLGNTDRHSIKKNLIGALLFDSGETAEATRLKRTARRRYTRRKNRICYLQEIFSNEMAKVDDSFFHRLEESFLVEEDKKHERHPIFGNIVDEVAYHEKYPTIYHLRKKLVDSTDKADLRLIYLALAHMIKFRGHFLIEGDLNPDNSDVDKLFIQLVQTYNQLFEENPINASGVDAKAILSARLSKSRRLENLIAQLPGEKKNGLFGNLIALSLGLTPNFKSNFDLAEDAKLQLSKDTYDDDLDNLLAQIGDQYADLFLAAKNLSDAILLSDILRVNTEITKAPLSASMIKRYDEHHQDLTLLKALVRQQLPEKYKEIFFDQSKNGYAGYIDGGASQEEFYKFIKPILEKMDGTEELLVKLNREDLLRKQRTFDNGSIPHQIHLGELHAILRRQEDFYPFLKDNREKIEKILTFRIPYYVGPLARGNSRFAWMTRKSEETITPWNFEEVVDKGASAQSFIERMTNFDKNLPNEKVLPKHSLLYEYFTVYNELTKVKYVTEGMRKPAFLSGEQKKAIVDLLFKTNRKVTVKQLKEDYFKKIECFDSVEISGVEDRFNASLGTYHDLLKIIKDKDFLDNEENEDILEDIVLTLTLFEDREMIEERLKTYAHLFDDKVMKQLKRRRYTGWGRLSRKLINGIRDKQSGKTILDFLKSDGFANRNFMQLIHDDSLTFKEDIQKAQVSGQGDSLHEHIANLAGSPAIKKGILQTVKVVDELVKVMGRHKPENIVIEMARENQTTQKGQKNSRERMKRIEEGIKELGSQILKEHPVENTQLQNEKLYLYYLQNGRDMYVDQELDINRLSDYDVDHIVPQSFLKDDSIDNKVLTRSDKARGKSDNVPSEEVVKKMKNYWRQLLNAKLITQRKFDNLTKAERGGLSELDKAGFIKRQLVETRQITKHVAQILDSRMNTKYDENDKLIREVKVITLKSKLVSDFRKDFQFYKVREINNYHHAHDAYLNAVVGTALIKKYPKLESEFVYGDYKVYDVRKMIAKSEQEIGKATAKYFFYSNIMNFFKTEITLANGEIRKRPLIETNGETGEIVWDKGRDFATVRKVLSMPQVNIVKKTEVQTGGFSKESILPKRNSDKLIARKKDWDPKKYGGFDSPTVAYSVLVVAKVEKGKSKKLKSVKELLGITIMERSSFEKNPIDFLEAKGYKEVKKDLIIKLPKYSLFELENGRKRMLASAGELQKGNELALPSKYVNFLYLASHYEKLKGSPEDNEQKQLFVEQHKHYLDEIIEQISEFSKRVILADANLDKVLSAYNKHRDKPIREQAENIIHLFTLTNLGAPAAFKYFDTTIDRKRYTSTKEVLDATLIHQSITGLYETRIDLSQLGGDGGEAAAKGGGGGTLNIEDEYRLHETSKEPDVSLGSTWLSDFPQAWAETGGMGLAVRQAPLIIPLKATSTPVSIKQYPMSQEARLGIKPHIQRLLDQGILVPCQSPWNTPLLPVKKPGTNDYRPVQDLREVNKRVEDIHPTVPNPYNLLSGLPPSHQWYTVLDLKDAFFCLRLHPTSQPLFAFEWRDPEMGISGQLTWTRLPQGFKNSPTLFNEALHRDLAGFRIQHPDLILLQYVDDLLLAATSELDCQQGTRALLQTLGDLGYRASAKKAQICQKQVKYLGYLLKEGQRWLTEARKETVMGQPIPKTPRQLREFLGKAGFCRLFIPGFAEMAAPLYPLTKPGTLFNWGPDQQKAFQEIKQALLTAPALGLPDLTKPFELFVDEKQGYAKGVLTQKLGPWRRPVAYLSKKLDPVAAGWPPCLRMVAAIAVLTKDAGKLTMGQPLVILAPHAVEALVKQPPDRWLSNARMTHYQALLLDTDRVQFGPVVALNPATLLPLPEEGLQHDCLDILAEAHGTRSDLMDQPLPDADHTWYTDGSSFLQEGQRKAGAAVTTETEVIWARALPAGTSAQRAELIALTQALKMAEGKKLNVYTDSRYAFATAHIHGEIYRRRGWLTSEGKEIKNKDEILALLKALFLPKRLSIIHCPGHQKGNSAEARGNRMADQAAREVATRETPETSTLLAGKRTADGSEFEKRTADGSEFESPKKKAKVE

SEQ ID NO: 2349 - protein, 2093 aa, synthetic construct
  source 1..2093: note = Description of Artificial Sequence: Synthetic polypeptide
MPAAKRVKLDGGDKKYSIGLDIGTNSVGWAVITDEYKVPSKKFKVLGNTDRHSIKKNLIGALLFDSGETAEATRLKRTARRRYTRRKNRICYLQEIFSNEMAKVDDSFFHRLEESFLVEEDKKHERHPIFGNIVDEVAYHEKYPTIYHLRKKLVDSTDKADLRLIYLALAHMIKFRGHFLIEGDLNPDNSDVDKLFIQLVQTYNQLFEENPINASGVDAKAILSARLSKSRRLENLIAQLPGEKKNGLFGNLIALSLGLTPNFKSNFDLAEDAKLQLSKDTYDDDLDNLLAQIGDQYADLFLAAKNLSDAILLSDILRVNTEITKAPLSASMIKRYDEHHQDLTLLKALVRQQLPEKYKEIFFDQSKNGYAGYIDGGASQEEFYKFIKPILEKMDGTEELLVKLNREDLLRKQRTFDNGSIPHQIHLGELHAILRRQEDFYPFLKDNREKIEKILTFRIPYYVGPLARGNSRFAWMTRKSEETITPWNFEEVVDKGASAQSFIERMTNFDKNLPNEKVLPKHSLLYEYFTVYNELTKVKYVTEGMRKPAFLSGEQKKAIVDLLFKTNRKVTVKQLKEDYFKKIECFDSVEISGVEDRFNASLGTYHDLLKIIKDKDFLDNEENEDILEDIVLTLTLFEDREMIEERLKTYAHLFDDKVMKQLKRRRYTGWGRLSRKLINGIRDKQSGKTILDFLKSDGFANRNFMQLIHDDSLTFKEDIQKAQVSGQGDSLHEHIANLAGSPAIKKGILQTVKVVDELVKVMGRHKPENIVIEMARENQTTQKGQKNSRERMKRIEEGIKELGSQILKEHPVENTQLQNEKLYLYYLQNGRDMYVDQELDINRLSDYDVDHIVPQSFLKDDSIDNKVLTRSDKARGKSDNVPSEEVVKKMKNYWRQLLNAKLITQRKFDNLTKAERGGLSELDKAGFIKRQLVETRQITKHVAQILDSRMNTKYDENDKLIREVKVITLKSKLVSDFRKDFQFYKVREINNYHHAHDAYLNAVVGTALIKKYPKLESEFVYGDYKVYDVRKMIAKSEQEIGKATAKYFFYSNIMNFFKTEITLANGEIRKRPLIETNGETGEIVWDKGRDFATVRKVLSMPQVNIVKKTEVQTGGFSKESILPKRNSDKLIARKKDWDPKKYGGFDSPTVAYSVLVVAKVEKGKSKKLKSVKELLGITIMERSSFEKNPIDFLEAKGYKEVKKDLIIKLPKYSLFELENGRKRMLASAGELQKGNELALPSKYVNFLYLASHYEKLKGSPEDNEQKQLFVEQHKHYLDEIIEQISEFSKRVILADANLDKVLSAYNKHRDKPIREQAENIIHLFTLTNLGAPAAFKYFDTTIDRKRYTSTKEVLDATLIHQSITGLYETRIDLSQLGGDGGGGGGGGGGGGTLNIEDEYRLHETSKEPDVSLGSTWLSDFPQAWAETGGMGLAVRQAPLIIPLKATSTPVSIKQYPMSQEARLGIKPHIQRLLDQGILVPCQSPWNTPLLPVKKPGTNDYRPVQDLREVNKRVEDIHPTVPNPYNLLSGLPPSHQWYTVLDLKDAFFCLRLHPTSQPLFAFEWRDPEMGISGQLTWTRLPQGFKNSPTLFNEALHRDLAGFRIQHPDLILLQYVDDLLLAATSELDCQQGTRALLQTLGDLGYRASAKKAQICQKQVKYLGYLLKEGQRWLTEARKETVMGQPIPKTPRQLREFLGKAGFCRLFIPGFAEMAAPLYPLTKPGTLFNWGPDQQKAFQEIKQALLTAPALGLPDLTKPFELFVDEKQGYAKGVLTQKLGPWRRPVAYLSKKLDPVAAGWPPCLRMVAAIAVLTKDAGKLTMGQPLVILAPHAVEALVKQPPDRWLSNARMTHYQALLLDTDRVQFGPVVALNPATLLPLPEEGLQHDCLDILAEAHGTRSDLMDQPLPDADHTWYTDGSSFLQEGQRKAGAAVTTETEVIWARALPAGTSAQRAELIALTQALKMAEGKKLNVYTDSRYAFATAHIHGEIYRRRGWLTSEGKEIKNKDEILALLKALFLPKRLSIIHCPGHQKGNSAEARGNRMADQAAREVATRETPETSTLLAGKRTADGSEFEKRTADGSEFESPKKKAKVE

SEQ ID NO: 2350 - protein, 2093 aa, synthetic construct
  source 1..2093: note = Description of Artificial Sequence: Synthetic polypeptide
MPAAKRVKLDGGDKKYSIGLDIGTNSVGWAVITDEYKVPSKKFKVLGNTDRHSIKKNLIGALLFDSGETAEATRLKRTARRRYTRRKNRICYLQEIFSNEMAKVDDSFFHRLEESFLVEEDKKHERHPIFGNIVDEVAYHEKYPTIYHLRKKLVDSTDKADLRLIYLALAHMIKFRGHFLIEGDLNPDNSDVDKLFIQLVQTYNQLFEENPINASGVDAKAILSARLSKSRRLENLIAQLPGEKKNGLFGNLIALSLGLTPNFKSNFDLAEDAKLQLSKDTYDDDLDNLLAQIGDQYADLFLAAKNLSDAILLSDILRVNTEITKAPLSASMIKRYDEHHQDLTLLKALVRQQLPEKYKEIFFDQSKNGYAGYIDGGASQEEFYKFIKPILEKMDGTEELLVKLNREDLLRKQRTFDNGSIPHQIHLGELHAILRRQEDFYPFLKDNREKIEKILTFRIPYYVGPLARGNSRFAWMTRKSEETITPWNFEEVVDKGASAQSFIERMTNFDKNLPNEKVLPKHSLLYEYFTVYNELTKVKYVTEGMRKPAFLSGEQKKAIVDLLFKTNRKVTVKQLKEDYFKKIECFDSVEISGVEDRFNASLGTYHDLLKIIKDKDFLDNEENEDILEDIVLTLTLFEDREMIEERLKTYAHLFDDKVMKQLKRRRYTGWGRLSRKLINGIRDKQSGKTILDFLKSDGFANRNFMQLIHDDSLTFKEDIQKAQVSGQGDSLHEHIANLAGSPAIKKGILQTVKVVDELVKVMGRHKPENIVIEMARENQTTQKGQKNSRERMKRIEEGIKELGSQILKEHPVENTQLQNEKLYLYYLQNGRDMYVDQELDINRLSDYDVDHIVPQSFLKDDSIDNKVLTRSDKARGKSDNVPSEEVVKKMKNYWRQLLNAKLITQRKFDNLTKAERGGLSELDKAGFIKRQLVETRQITKHVAQILDSRMNTKYDENDKLIREVKVITLKSKLVSDFRKDFQFYKVREINNYHHAHDAYLNAVVGTALIKKYPKLESEFVYGDYKVYDVRKMIAKSEQEIGKATAKYFFYSNIMNFFKTEITLANGEIRKRPLIETNGETGEIVWDKGRDFATVRKVLSMPQVNIVKKTEVQTGGFSKESILPKRNSDKLIARKKDWDPKKYGGFDSPTVAYSVLVVAKVEKGKSKKLKSVKELLGITIMERSSFEKNPIDFLEAKGYKEVKKDLIIKLPKYSLFELENGRKRMLASAGELQKGNELALPSKYVNFLYLASHYEKLKGSPEDNEQKQLFVEQHKHYLDEIIEQISEFSKRVILADANLDKVLSAYNKHRDKPIREQAENIIHLFTLTNLGAPAAFKYFDTTIDRKRYTSTKEVLDATLIHQSITGLYETRIDLSQLGGDGGEAAAKGSSGGTLNIEDEYRLHETSKEPDVSLGSTWLSDFPQAWAETGGMGLAVRQAPLIIPLKATSTPVSIKQYPMSQEARLGIKPHIQRLLDQGILVPCQSPWNTPLLPVKKPGTNDYRPVQDLREVNKRVEDIHPTVPNPYNLLSGLPPSHQWYTVLDLKDAFFCLRLHPTSQPLFAFEWRDPEMGISGQLTWTRLPQGFKNSPTLFNEALHRDLAGFRIQHPDLILLQYVDDLLLAATSELDCQQGTRALLQTLGDLGYRASAKKAQICQKQVKYLGYLLKEGQRWLTEARKETVMGQPIPKTPRQLREFLGKAGFCRLFIPGFAEMAAPLYPLTKPGTLFNWGPDQQKAFQEIKQALLTAPALGLPDLTKPFELFVDEKQGYAKGVLTQKLGPWRRPVAYLSKKLDPVAAGWPPCLRMVAAIAVLTKDAGKLTMGQPLVILAPHAVEALVKQPPDRWLSNARMTHYQALLLDTDRVQFGPVVALNPATLLPLPEEGLQHDCLDILAEAHGTRSDLMDQPLPDADHTWYTDGSSFLQEGQRKAGAAVTTETEVIWARALPAGTSAQRAELIALTQALKMAEGKKLNVYTDSRYAFATAHIHGEIYRRRGWLTSEGKEIKNKDEILALLKALFLPKRLSIIHCPGHQKGNSAEARGNRMADQAAREVATRETPETSTLLAGKRTADGSEFEKRTADGSEFESPKKKAKVE

SEQ ID NO: 2351 - protein, 2096 aa, synthetic construct
  source 1..2096: note = Description of Artificial Sequence: Synthetic polypeptide
MPAAKRVKLDGGDKKYSIGLDIGTNSVGWAVITDEYKVPSKKFKVLGNTDRHSIKKNLIGALLFDSGETAEATRLKRTARRRYTRRKNRICYLQEIFSNEMAKVDDSFFHRLEESFLVEEDKKHERHPIFGNIVDEVAYHEKYPTIYHLRKKLVDSTDKADLRLIYLALAHMIKFRGHFLIEGDLNPDNSDVDKLFIQLVQTYNQLFEENPINASGVDAKAILSARLSKSRRLENLIAQLPGEKKNGLFGNLIALSLGLTPNFKSNFDLAEDAKLQLSKDTYDDDLDNLLAQIGDQYADLFLAAKNLSDAILLSDILRVNTEITKAPLSASMIKRYDEHHQDLTLLKALVRQQLPEKYKEIFFDQSKNGYAGYIDGGASQEEFYKFIKPILEKMDGTEELLVKLNREDLLRKQRTFDNGSIPHQIHLGELHAILRRQEDFYPFLKDNREKIEKILTFRIPYYVGPLARGNSRFAWMTRKSEETITPWNFEEVVDKGASAQSFIERMTNFDKNLPNEKVLPKHSLLYEYFTVYNELTKVKYVTEGMRKPAFLSGEQKKAIVDLLFKTNRKVTVKQLKEDYFKKIECFDSVEISGVEDRFNASLGTYHDLLKIIKDKDFLDNEENEDILEDIVLTLTLFEDREMIEERLKTYAHLFDDKVMKQLKRRRYTGWGRLSRKLINGIRDKQSGKTILDFLKSDGFANRNFMQLIHDDSLTFKEDIQKAQVSGQGDSLHEHIANLAGSPAIKKGILQTVKVVDELVKVMGRHKPENIVIEMARENQTTQKGQKNSRERMKRIEEGIKELGSQILKEHPVENTQLQNEKLYLYYLQNGRDMYVDQELDINRLSDYDVDHIVPQSFLKDDSIDNKVLTRSDKARGKSDNVPSEEVVKKMKNYWRQLLNAKLITQRKFDNLTKAERGGLSELDKAGFIKRQLVETRQITKHVAQILDSRMNTKYDENDKLIREVKVITLKSKLVSDFRKDFQFYKVREINNYHHAHDAYLNAVVGTALIKKYPKLESEFVYGDYKVYDVRKMIAKSEQEIGKATAKYFFYSNIMNFFKTEITLANGEIRKRPLIETNGETGEIVWDKGRDFATVRKVLSMPQVNIVKKTEVQTGGFSKESILPKRNSDKLIARKKDWDPKKYGGFDSPTVAYSVLVVAKVEKGKSKKLKSVKELLGITIMERSSFEKNPIDFLEAKGYKEVKKDLIIKLPKYSLFELENGRKRMLASAGELQKGNELALPSKYVNFLYLASHYEKLKGSPEDNEQKQLFVEQHKHYLDEIIEQISEFSKRVILADANLDKVLSAYNKHRDKPIREQAENIIHLFTLTNLGAPAAFKYFDTTIDRKRYTSTKEVLDATLIHQSITGLYETRIDLSQLGGDGGGGGGGSEAAAKGGTLNIEDEYRLHETSKEPDVSLGSTWLSDFPQAWAETGGMGLAVRQAPLIIPLKATSTPVSIKQYPMSQEARLGIKPHIQRLLDQGILVPCQSPWNTPLLPVKKPGTNDYRPVQDLREVNKRVEDIHPTVPNPYNLLSGLPPSHQWYTVLDLKDAFFCLRLHPTSQPLFAFEWRDPEMGISGQLTWTRLPQGFKNSPTLFNEALHRDLAGFRIQHPDLILLQYVDDLLLAATSELDCQQGTRALLQTLGDLGYRASAKKAQICQKQVKYLGYLLKEGQRWLTEARKETVMGQPIPKTPRQLREFLGKAGFCRLFIPGFAEMAAPLYPLTKPGTLFNWGPDQQKAFQEIKQALLTAPALGLPDLTKPFELFVDEKQGYAKGVLTQKLGPWRRPVAYLSKKLDPVAAGWPPCLRMVAAIAVLTKDAGKLTMGQPLVILAPHAVEALVKQPPDRWLSNARMTHYQALLLDTDRVQFGPVVALNPATLLPLPEEGLQHDCLDILAEAHGTRSDLMDQPLPDADHTWYTDGSSFLQEGQRKAGAAVTTETEVIWARALPAGTSAQRAELIALTQALKMAEGKKLNVYTDSRYAFATAHIHGEIYRRRGWLTSEGKEIKNKDEILALLKALFLPKRLSIIHCPGHQKGNSAEARGNRMADQAAREVATRETPETSTLLAGKRTADGSEFEKRTADGSEFESPKKKAKVE

SEQ ID NO: 2352 - protein, 2096 aa, synthetic construct
  source 1..2096: note = Description of Artificial Sequence: Synthetic polypeptide
MPAAKRVKLDGGDKKYSIGLDIGTNSVGWAVITDEYKVPSKKFKVLGNTDRHSIKKNLIGALLFDSGETAEATRLKRTARRRYTRRKNRICYLQEIFSNEMAKVDDSFFHRLEESFLVEEDKKHERHPIFGNIVDEVAYHEKYPTIYHLRKKLVDSTDKADLRLIYLALAHMIKFRGHFLIEGDLNPDNSDVDKLFIQLVQTYNQLFEENPINASGVDAKAILSARLSKSRRLENLIAQLPGEKKNGLFGNLIALSLGLTPNFKSNFDLAEDAKLQLSKDTYDDDLDNLLAQIGDQYADLFLAAKNLSDAILLSDILRVNTEITKAPLSASMIKRYDEHHQDLTLLKALVRQQLPEKYKEIFFDQSKNGYAGYIDGGASQEEFYKFIKPILEKMDGTEELLVKLNREDLLRKQRTFDNGSIPHQIHLGELHAILRRQEDFYPFLKDNREKIEKILTFRIPYYVGPLARGNSRFAWMTRKSEETITPWNFEEVVDKGASAQSFIERMTNFDKNLPNEKVLPKHSLLYEYFTVYNELTKVKYVTEGMRKPAFLSGEQKKAIVDLLFKTNRKVTVKQLKEDYFKKIECFDSVEISGVEDRFNASLGTYHDLLKIIKDKDFLDNEENEDILEDIVLTLTLFEDREMIEERLKTYAHLFDDKVMKQLKRRRYTGWGRLSRKLINGIRDKQSGKTILDFLKSDGFANRNFMQLIHDDSLTFKEDIQKAQVSGQGDSLHEHIANLAGSPAIKKGILQTVKVVDELVKVMGRHKPENIVIEMARENQTTQKGQKNSRERMKRIEEGIKELGSQILKEHPVENTQLQNEKLYLYYLQNGRDMYVDQELDINRLSDYDVDHIVPQSFLKDDSIDNKVLTRSDKARGKSDNVPSEEVVKKMKNYWRQLLNAKLITQRKFDNLTKAERGGLSELDKAGFIKRQLVETRQITKHVAQILDSRMNTKYDENDKLIREVKVITLKSKLVSDFRKDFQFYKVREINNYHHAHDAYLNAVVGTALIKKYPKLESEFVYGDYKVYDVRKMIAKSEQEIGKATAKYFFYSNIMNFFKTEITLANGEIRKRPLIETNGETGEIVWDKGRDFATVRKVLSMPQVNIVKKTEVQTGGFSKESILPKRNSDKLIARKKDWDPKKYGGFDSPTVAYSVLVVAKVEKGKSKKLKSVKELLGITIMERSSFEKNPIDFLEAKGYKEVKKDLIIKLPKYSLFELENGRKRMLASAGELQKGNELALPSKYVNFLYLASHYEKLKGSPEDNEQKQLFVEQHKHYLDEIIEQISEFSKRVILADANLDKVLSAYNKHRDKPIREQAENIIHLFTLTNLGAPAAFKYFDTTIDRKRYTSTKEVLDATLIHQSITGLYETRIDLSQLGGDGGGSSEAAAKGGSGGTLNIEDEYRLHETSKEPDVSLGSTWLSDFPQAWAETGGMGLAVRQAPLIIPLKATSTPVSIKQYPMSQEARLGIKPHIQRLLDQGILVPCQSPWNTPLLPVKKPGTNDYRPVQDLREVNKRVEDIHPTVPNPYNLLSGLPPSHQWYTVLDLKDAFFCLRLHPTSQPLFAFEWRDPEMGISGQLTWTRLPQGFKNSPTLFNEALHRDLAGFRIQHPDLILLQYVDDLLLAATSELDCQQGTRALLQTLGDLGYRASAKKAQICQKQVKYLGYLLKEGQRWLTEARKETVMGQPIPKTPRQLREFLGKAGFCRLFIPGFAEMAAPLYPLTKPGTLFNWGPDQQKAFQEIKQALLTAPALGLPDLTKPFELFVDEKQGYAKGVLTQKLGPWRRPVAYLSKKLDPVAAGWPPCLRMVAAIAVLTKDAGKLTMGQPLVILAPHAVEALVKQPPDRWLSNARMTHYQALLLDTDRVQFGPVVALNPATLLPLPEEGLQHDCLDILAEAHGTRSDLMDQPLPDADHTWYTDGSSFLQEGQRKAGAAVTTETEVIWARALPAGTSAQRAELIALTQALKMAEGKKLNVYTDSRYAFATAHIHGEIYRRRGWLTSEGKEIKNKDEILALLKALFLPKRLSIIHCPGHQKGNSAEARGNRMADQAAREVATRETPETSTLLAGKRTADGSEFEKRTADGSEFESPKKKAKVE

SEQ ID NO: 2353 - protein, 2091 aa, synthetic construct
  source 1..2091: note = Description of Artificial Sequence: Synthetic polypeptide
MPAAKRVKLDGGDKKYSIGLDIGTNSVGWAVITDEYKVPSKKFKVLGNTDRHSIKKNLIGALLFDSGETAEATRLKRTARRRYTRRKNRICYLQEIFSNEMAKVDDSFFHRLEESFLVEEDKKHERHPIFGNIVDEVAYHEKYPTIYHLRKKLVDSTDKADLRLIYLALAHMIKFRGHFLIEGDLNPDNSDVDKLFIQLVQTYNQLFEENPINASGVDAKAILSARLSKSRRLENLIAQLPGEKKNGLFGNLIALSLGLTPNFKSNFDLAEDAKLQLSKDTYDDDLDNLLAQIGDQYADLFLAAKNLSDAILLSDILRVNTEITKAPLSASMIKRYDEHHQDLTLLKALVRQQLPEKYKEIFFDQSKNGYAGYIDGGASQEEFYKFIKPILEKMDGTEELLVKLNREDLLRKQRTFDNGSIPHQIHLGELHAILRRQEDFYPFLKDNREKIEKILTFRIPYYVGPLARGNSRFAWMTRKSEETITPWNFEEVVDKGASAQSFIERMTNFDKNLPNEKVLPKHSLLYEYFTVYNELTKVKYVTEGMRKPAFLSGEQKKAIVDLLFKTNRKVTVKQLKEDYFKKIECFDSVEISGVEDRFNASLGTYHDLLKIIKDKDFLDNEENEDILEDIVLTLTLFEDREMIEERLKTYAHLFDDKVMKQLKRRRYTGWGRLSRKLINGIRDKQSGKTILDFLKSDGFANRNFMQLIHDDSLTFKEDIQKAQVSGQGDSLHEHIANLAGSPAIKKGILQTVKVVDELVKVMGRHKPENIVIEMARENQTTQKGQKNSRERMKRIEEGIKELGSQILKEHPVENTQLQNEKLYLYYLQNGRDMYVDQELDINRLSDYDVDHIVPQSFLKDDSIDNKVLTRSDKARGKSDNVPSEEVVKKMKNYWRQLLNAKLITQRKFDNLTKAERGGLSELDKAGFIKRQLVETRQITKHVAQILDSRMNTKYDENDKLIREVKVITLKSKLVSDFRKDFQFYKVREINNYHHAHDAYLNAVVGTALIKKYPKLESEFVYGDYKVYDVRKMIAKSEQEIGKATAKYFFYSNIMNFFKTEITLANGEIRKRPLIETNGETGEIVWDKGRDFATVRKVLSMPQVNIVKKTEVQTGGFSKESILPKRNSDKLIARKKDWDPKKYGGFDSPTVAYSVLVVAKVEKGKSKKLKSVKELLGITIMERSSFEKNPIDFLEAKGYKEVKKDLIIKLPKYSLFELENGRKRMLASAGELQKGNELALPSKYVNFLYLASHYEKLKGSPEDNEQKQLFVEQHKHYLDEIIEQISEFSKRVILADANLDKVLSAYNKHRDKPIREQAENIIHLFTLTNLGAPAAFKYFDTTIDRKRYTSTKEVLDATLIHQSITGLYETRIDLSQLGGDGGGGSGSSGGTLNIEDEYRLHETSKEPDVSLGSTWLSDFPQAWAETGGMGLAVRQAPLIIPLKATSTPVSIKQYPMSQEARLGIKPHIQRLLDQGILVPCQSPWNTPLLPVKKPGTNDYRPVQDLREVNKRVEDIHPTVPNPYNLLSGLPPSHQWYTVLDLKDAFFCLRLHPTSQPLFAFEWRDPEMGISGQLTWTRLPQGFKNSPTLFNEALHRDLAGFRIQHPDLILLQYVDDLLLAATSELDCQQGTRALLQTLGDLGYRASAKKAQICQKQVKYLGYLLKEGQRWLTEARKETVMGQPIPKTPRQLREFLGKAGFCRLFIPGFAEMAAPLYPLTKPGTLFNWGPDQQKAFQEIKQALLTAPALGLPDLTKPFELFVDEKQGYAKGVLTQKLGPWRRPVAYLSKKLDPVAAGWPPCLRMVAAIAVLTKDAGKLTMGQPLVILAPHAVEALVKQPPDRWLSNARMTHYQALLLDTDRVQFGPVVALNPATLLPLPEEGLQHDCLDILAEAHGTRSDLMDQPLPDADHTWYTDGSSFLQEGQRKAGAAVTTETEVIWARALPAGTSAQRAELIALTQALKMAEGKKLNVYTDSRYAFATAHIHGEIYRRRGWLTSEGKEIKNKDEILALLKALFLPKRLSIIHCPGHQKGNSAEARGNRMADQAAREVATRETPETSTLLAGKRTADGSEFEKRTADGSEFESPKKKAKVE

SEQ ID NO: 2354 - protein, 2091 aa, synthetic construct
  source 1..2091: note = Description of Artificial Sequence: Synthetic polypeptide
MPAAKRVKLDGGDKKYSIGLDIGTNSVGWAVITDEYKVPSKKFKVLGNTDRHSIKKNLIGALLFDSGETAEATRLKRTARRRYTRRKNRICYLQEIFSNEMAKVDDSFFHRLEESFLVEEDKKHERHPIFGNIVDEVAYHEKYPTIYHLRKKLVDSTDKADLRLIYLALAHMIKFRGHFLIEGDLNPDNSDVDKLFIQLVQTYNQLFEENPINASGVDAKAILSARLSKSRRLENLIAQLPGEKKNGLFGNLIALSLGLTPNFKSNFDLAEDAKLQLSKDTYDDDLDNLLAQIGDQYADLFLAAKNLSDAILLSDILRVNTEITKAPLSASMIKRYDEHHQDLTLLKALVRQQLPEKYKEIFFDQSKNGYAGYIDGGASQEEFYKFIKPILEKMDGTEELLVKLNREDLLRKQRTFDNGSIPHQIHLGELHAILRRQEDFYPFLKDNREKIEKILTFRIPYYVGPLARGNSRFAWMTRKSEETITPWNFEEVVDKGASAQSFIERMTNFDKNLPNEKVLPKHSLLYEYFTVYNELTKVKYVTEGMRKPAFLSGEQKKAIVDLLFKTNRKVTVKQLKEDYFKKIECFDSVEISGVEDRFNASLGTYHDLLKIIKDKDFLDNEENEDILEDIVLTLTLFEDREMIEERLKTYAHLFDDKVMKQLKRRRYTGWGRLSRKLINGIRDKQSGKTILDFLKSDGFANRNFMQLIHDDSLTFKEDIQKAQVSGQGDSLHEHIANLAGSPAIKKGILQTVKVVDELVKVMGRHKPENIVIEMARENQTTQKGQKNSRERMKRIEEGIKELGSQILKEHPVENTQLQNEKLYLYYLQNGRDMYVDQELDINRLSDYDVDHIVPQSFLKDDSIDNKVLTRSDKARGKSDNVPSEEVVKKMKNYWRQLLNAKLITQRKFDNLTKAERGGLSELDKAGFIKRQLVETRQITKHVAQILDSRMNTKYDENDKLIREVKVITLKSKLVSDFRKDFQFYKVREINNYHHAHDAYLNAVVGTALIKKYPKLESEFVYGDYKVYDVRKMIAKSEQEIGKATAKYFFYSNIMNFFKTEITLANGEIRKRPLIETNGETGEIVWDKGRDFATVRKVLSMPQVNIVKKTEVQTGGFSKESILPKRNSDKLIARKKDWDPKKYGGFDSPTVAYSVLVVAKVEKGKSKKLKSVKELLGITIMERSSFEKNPIDFLEAKGYKEVKKDLIIKLPKYSLFELENGRKRMLASAGELQKGNELALPSKYVNFLYLASHYEKLKGSPEDNEQKQLFVEQHKHYLDEIIEQISEFSKRVILADANLDKVLSAYNKHRDKPIREQAENIIHLFTLTNLGAPAAFKYFDTTIDRKRYTSTKEVLDATLIHQSITGLYETRIDLSQLGGDGGGGGGGGGGTLNIEDEYRLHETSKEPDVSLGSTWLSDFPQAWAETGGMGLAVRQAPLIIPLKATSTPVSIKQYPMSQEARLGIKPHIQRLLDQGILVPCQSPWNTPLLPVKKPGTNDYRPVQDLREVNKRVEDIHPTVPNPYNLLSGLPPSHQWYTVLDLKDAFFCLRLHPTSQPLFAFEWRDPEMGISGQLTWTRLPQGFKNSPTLFNEALHRDLAGFRIQHPDLILLQYVDDLLLAATSELDCQQGTRALLQTLGDLGYRASAKKAQICQKQVKYLGYLLKEGQRWLTEARKETVMGQPIPKTPRQLREFLGKAGFCRLFIPGFAEMAAPLYPLTKPGTLFNWGPDQQKAFQEIKQALLTAPALGLPDLTKPFELFVDEKQGYAKGVLTQKLGPWRRPVAYLSKKLDPVAAGWPPCLRMVAAIAVLTKDAGKLTMGQPLVILAPHAVEALVKQPPDRWLSNARMTHYQALLLDTDRVQFGPVVALNPATLLPLPEEGLQHDCLDILAEAHGTRSDLMDQPLPDADHTWYTDGSSFLQEGQRKAGAAVTTETEVIWARALPAGTSAQRAELIALTQALKMAEGKKLNVYTDSRYAFATAHIHGEIYRRRGWLTSEGKEIKNKDEILALLKALFLPKRLSIIHCPGHQKGNSAEARGNRMADQAAREVATRETPETSTLLAGKRTADGSEFEKRTADGSEFESPKKKAKVE

SEQ ID NO: 2355 - protein, 2096 aa, synthetic construct
  source 1..2096: note = Description of Artificial Sequence: Synthetic polypeptide
MPAAKRVKLDGGDKKYSIGLDIGTNSVGWAVITDEYKVPSKKFKVLGNTDRHSIKKNLIGALLFDSGETAEATRLKRTARRRYTRRKNRICYLQEIFSNEMAKVDDSFFHRLEESFLVEEDKKHERHPIFGNIVDEVAYHEKYPTIYHLRKKLVDSTDKADLRLIYLALAHMIKFRGHFLIEGDLNPDNSDVDKLFIQLVQTYNQLFEENPINASGVDAKAILSARLSKSRRLENLIAQLPGEKKNGLFGNLIALSLGLTPNFKSNFDLAEDAKLQLSKDTYDDDLDNLLAQIGDQYADLFLAAKNLSDAILLSDILRVNTEITKAPLSASMIKRYDEHHQDLTLLKALVRQQLPEKYKEIFFDQSKNGYAGYIDGGASQEEFYKFIKPILEKMDGTEELLVKLNREDLLRKQRTFDNGSIPHQIHLGELHAILRRQEDFYPFLKDNREKIEKILTFRIPYYVGPLARGNSRFAWMTRKSEETITPWNFEEVVDKGASAQSFIERMTNFDKNLPNEKVLPKHSLLYEYFTVYNELTKVKYVTEGMRKPAFLSGEQKKAIVDLLFKTNRKVTVKQLKEDYFKKIECFDSVEISGVEDRFNASLGTYHDLLKIIKDKDFLDNEENEDILEDIVLTLTLFEDREMIEERLKTYAHLFDDKVMKQLKRRRYTGWGRLSRKLINGIRDKQSGKTILDFLKSDGFANRNFMQLIHDDSLTFKEDIQKAQVSGQGDSLHEHIANLAGSPAIKKGILQTVKVVDELVKVMGRHKPENIVIEMARENQTTQKGQKNSRERMKRIEEGIKELGSQILKEHPVENTQLQNEKLYLYYLQNGRDMYVDQELDINRLSDYDVDHIVPQSFLKDDSIDNKVLTRSDKARGKSDNVPSEEVVKKMKNYWRQLLNAKLITQRKFDNLTKAERGGLSELDKAGFIKRQLVETRQITKHVAQILDSRMNTKYDENDKLIREVKVITLKSKLVSDFRKDFQFYKVREINNYHHAHDAYLNAVVGTALIKKYPKLESEFVYGDYKVYDVRKMIAKSEQEIGKATAKYFFYSNIMNFFKTEITLANGEIRKRPLIETNGETGEIVWDKGRDFATVRKVLSMPQVNIVKKTEVQTGGFSKESILPKRNSDKLIARKKDWDPKKYGGFDSPTVAYSVLVVAKVEKGKSKKLKSVKELLGITIMERSSFEKNPIDFLEAKGYKEVKKDLIIKLPKYSLFELENGRKRMLASAGELQKGNELALPSKYVNFLYLASHYEKLKGSPEDNEQKQLFVEQHKHYLDEIIEQISEFSKRVILADANLDKVLSAYNKHRDKPIREQAENIIHLFTLTNLGAPAAFKYFDTTIDRKRYTSTKEVLDATLIHQSITGLYETRIDLSQLGGDGGPAPGSSEAAAKGGTLNIEDEYRLHETSKEPDVSLGSTWLSDFPQAWAETGGMGLAVRQAPLIIPLKATSTPVSIKQYPMSQEARLGIKPHIQRLLDQGILVPCQSPWNTPLLPVKKPGTNDYRPVQDLREVNKRVEDIHPTVPNPYNLLSGLPPSHQWYTVLDLKDAFFCLRLHPTSQPLFAFEWRDPEMGISGQLTWTRLPQGFKNSPTLFNEALHRDLAGFRIQHPDLILLQYVDDLLLAATSELDCQQGTRALLQTLGDLGYRASAKKAQICQKQVKYLGYLLKEGQRWLTEARKETVMGQPIPKTPRQLREFLGKAGFCRLFIPGFAEMAAPLYPLTKPGTLFNWGPDQQKAFQEIKQALLTAPALGLPDLTKPFELFVDEKQGYAKGVLTQKLGPWRRPVAYLSKKLDPVAAGWPPCLRMVAAIAVLTKDAGKLTMGQPLVILAPHAVEALVKQPPDRWLSNARMTHYQALLLDTDRVQFGPVVALNPATLLPLPEEGLQHDCLDILAEAHGTRSDLMDQPLPDADHTWYTDGSSFLQEGQRKAGAAVTTETEVIWARALPAGTSAQRAELIALTQALKMAEGKKLNVYTDSRYAFATAHIHGEIYRRRGWLTSEGKEIKNKDEILALLKALFLPKRLSIIHCPGHQKGNSAEARGNRMADQAAREVATRETPETSTLLAGKRTADGSEFEKRTADGSEFESPKKKAKVE

SEQ ID NO: 2356 - protein, 2093 aa, synthetic construct
  source 1..2093: note = Description of Artificial Sequence: Synthetic polypeptide
MPAAKRVKLDGGDKKYSIGLDIGTNSVGWAVITDEYKVPSKKFKVLGNTDRHSIKKNLIGALLFDSGETAEATRLKRTARRRYTRRKNRICYLQEIFSNEMAKVDDSFFHRLEESFLVEEDKKHERHPIFGNIVDEVAYHEKYPTIYHLRKKLVDSTDKADLRLIYLALAHMIKFRGHFLIEGDLNPDNSDVDKLFIQLVQTYNQLFEENPINASGVDAKAILSARLSKSRRLENLIAQLPGEKKNGLFGNLIALSLGLTPNFKSNFDLAEDAKLQLSKDTYDDDLDNLLAQIGDQYADLFLAAKNLSDAILLSDILRVNTEITKAPLSASMIKRYDEHHQDLTLLKALVRQQLPEKYKEIFFDQSKNGYAGYIDGGASQEEFYKFIKPILEKMDGTEELLVKLNREDLLRKQRTFDNGSIPHQIHLGELHAILRRQEDFYPFLKDNREKIEKILTFRIPYYVGPLARGNSRFAWMTRKSEETITPWNFEEVVDKGASAQSFIERMTNFDKNLPNEKVLPKHSLLYEYFTVYNELTKVKYVTEGMRKPAFLSGEQKKAIVDLLFKTNRKVTVKQLKEDYFKKIECFDSVEISGVEDRFNASLGTYHDLLKIIKDKDFLDNEENEDILEDIVLTLTLFEDREMIEERLKTYAHLFDDKVMKQLKRRRYTGWGRLSRKLINGIRDKQSGKTILDFLKSDGFANRNFMQLIHDDSLTFKEDIQKAQVSGQGDSLHEHIANLAGSPAIKKGILQTVKVVDELVKVMGRHKPENIVIEMARENQTTQKGQKNSRERMKRIEEGIKELGSQILKEHPVENTQLQNEKLYLYYLQNGRDMYVDQELDINRLSDYDVDHIVPQSFLKDDSIDNKVLTRSDKARGKSDNVPSEEVVKKMKNYWRQLLNAKLITQRKFDNLTKAERGGLSELDKAGFIKRQLVETRQITKHVAQILDSRMNTKYDENDKLIREVKVITLKSKLVSDFRKDFQFYKVREINNYHHAHDAYLNAVVGTALIKKYPKLESEFVYGDYKVYDVRKMIAKSEQEIGKATAKYFFYSNIMNFFKTEITLANGEIRKRPLIETNGETGEIVWDKGRDFATVRKVLSMPQVNIVKKTEVQTGGFSKESILPKRNSDKLIARKKDWDPKKYGGFDSPTVAYSVLVVAKVEKGKSKKLKSVKELLGITIMERSSFEKNPIDFLEAKGYKEVKKDLIIKLPKYSLFELENGRKRMLASAGELQKGNELALPSKYVNFLYLASHYEKLKGSPEDNEQKQLFVEQHKHYLDEIIEQISEFSKRVILADANLDKVLSAYNKHRDKPIREQAENIIHLFTLTNLGAPAAFKYFDTTIDRKRYTSTKEVLDATLIHQSITGLYETRIDLSQLGGDGGPAPEAAAKGGTLNIEDEYRLHETSKEPDVSLGSTWLSDFPQAWAETGGMGLAVRQAPLIIPLKATSTPVSIKQYPMSQEARLGIKPHIQRLLDQGILVPCQSPWNTPLLPVKKPGTNDYRPVQDLREVNKRVEDIHPTVPNPYNLLSGLPPSHQWYTVLDLKDAFFCLRLHPTSQPLFAFEWRDPEMGISGQLTWTRLPQGFKNSPTLFNEALHRDLAGFRIQHPDLILLQYVDDLLLAATSELDCQQGTRALLQTLGDLGYRASAKKAQICQKQVKYLGYLLKEGQRWLTEARKETVMGQPIPKTPRQLREFLGKAGFCRLFIPGFAEMAAPLYPLTKPGTLFNWGPDQQKAFQEIKQALLTAPALGLPDLTKPFELFVDEKQGYAKGVLTQKLGPWRRPVAYLSKKLDPVAAGWPPCLRMVAAIAVLTKDAGKLTMGQPLVILAPHAVEALVKQPPDRWLSNARMTHYQALLLDTDRVQFGPVVALNPATLLPLPEEGLQHDCLDILAEAHGTRSDLMDQPLPDADHTWYTDGSSFLQEGQRKAGAAVTTETEVIWARALPAGTSAQRAELIALTQALKMAEGKKLNVYTDSRYAFATAHIHGEIYRRRGWLTSEGKEIKNKDEILALLKALFLPKRLSIIHCPGHQKGNSAEARGNRMADQAAREVATRETPETSTLLAGKRTADGSEFEKRTADGSEFESPKKKAKVE

SEQ ID NO: 2357 - protein, 2096 aa, synthetic construct
  source 1..2096: note = Description of Artificial Sequence: Synthetic polypeptide
MPAAKRVKLDGGDKKYSIGLDIGTNSVGWAVITDEYKVPSKKFKVLGNTDRHSIKKNLIGALLFDSGETAEATRLKRTARRRYTRRKNRICYLQEIFSNEMAKVDDSFFHRLEESFLVEEDKKHERHPIFGNIVDEVAYHEKYPTIYHLRKKLVDSTDKADLRLIYLALAHMIKFRGHFLIEGDLNPDNSDVDKLFIQLVQTYNQLFEENPINASGVDAKAILSARLSKSRRLENLIAQLPGEKKNGLFGNLIALSLGLTPNFKSNFDLAEDAKLQLSKDTYDDDLDNLLAQIGDQYADLFLAAKNLSDAILLSDILRVNTEITKAPLSASMIKRYDEHHQDLTLLKALVRQQLPEKYKEIFFDQSKNGYAGYIDGGASQEEFYKFIKPILEKMDGTEELLVKLNREDLLRKQRTFDNGSIPHQIHLGELHAILRRQEDFYPFLKDNREKIEKILTFRIPYYVGPLARGNSRFAWMTRKSEETITPWNFEEVVDKGASAQSFIERMTNFDKNLPNEKVLPKHSLLYEYFTVYNELTKVKYVTEGMRKPAFLSGEQKKAIVDLLFKTNRKVTVKQLKEDYFKKIECFDSVEISGVEDRFNASLGTYHDLLKIIKDKDFLDNEENEDILEDIVLTLTLFEDREMIEERLKTYAHLFDDKVMKQLKRRRYTGWGRLSRKLINGIRDKQSGKTILDFLKSDGFANRNFMQLIHDDSLTFKEDIQKAQVSGQGDSLHEHIANLAGSPAIKKGILQTVKVVDELVKVMGRHKPENIVIEMARENQTTQKGQKNSRERMKRIEEGIKELGSQILKEHPVENTQLQNEKLYLYYLQNGRDMYVDQELDINRLSDYDVDHIVPQSFLKDDSIDNKVLTRSDKARGKSDNVPSEEVVKKMKNYWRQLLNAKLITQRKFDNLTKAERGGLSELDKAGFIKRQLVETRQITKHVAQILDSRMNTKYDENDKLIREVKVITLKSKLVSDFRKDFQFYKVREINNYHHAHDAYLNAVVGTALIKKYPKLESEFVYGDYKVYDVRKMIAKSEQEIGKATAKYFFYSNIMNFFKTEITLANGEIRKRPLIETNGETGEIVWDKGRDFATVRKVLSMPQVNIVKKTEVQTGGFSKESILPKRNSDKLIARKKDWDPKKYGGFDSPTVAYSVLVVAKVEKGKSKKLKSVKELLGITIMERSSFEKNPIDFLEAKGYKEVKKDLIIKLPKYSLFELENGRKRMLASAGELQKGNELALPSKYVNFLYLASHYEKLKGSPEDNEQKQLFVEQHKHYLDEIIEQISEFSKRVILADANLDKVLSAYNKHRDKPIREQAENIIHLFTLTNLGAPAAFKYFDTTIDRKRYTSTKEVLDATLIHQSITGLYETRIDLSQLGGDGGEAAAKPAPGSSGGTLNIEDEYRLHETSKEPDVSLGSTWLSDFPQAWAETGGMGLAVRQAPLIIPLKATSTPVSIKQYPMSQEARLGIKPHIQRLLDQGILVPCQSPWNTPLLPVKKPGTNDYRPVQDLREVNKRVEDIHPTVPNPYNLLSGLPPSHQWYTVLDLKDAFFCLRLHPTSQPLFAFEWRDPEMGISGQLTWTRLPQGFKNSPTLFNEALHRDLAGFRIQHPDLILLQYVDDLLLAATSELDCQQGTRALLQTLGDLGYRASAKKAQICQKQVKYLGYLLKEGQRWLTEARKETVMGQPIPKTPRQLREFLGKAGFCRLFIPGFAEMAAPLYPLTKPGTLFNWGPDQQKAFQEIKQALLTAPALGLPDLTKPFELFVDEKQGYAKGVLTQKLGPWRRPVAYLSKKLDPVAAGWPPCLRMVAAIAVLTKDAGKLTMGQPLVILAPHAVEALVKQPPDRWLSNARMTHYQALLLDTDRVQFGPVVALNPATLLPLPEEGLQHDCLDILAEAHGTRSDLMDQPLPDADHTWYTDGSSFLQEGQRKAGAAVTTETEVIWARALPAGTSAQRAELIALTQALKMAEGKKLNVYTDSRYAFATAHIHGEIYRRRGWLTSEGKEIKNKDEILALLKALFLPKRLSIIHCPGHQKGNSAEARGNRMADQAAREVATRETPETSTLLAGKRTADGSEFEKRTADGSEFESPKKKAKVE

SEQ ID NO: 2358 - protein, 2096 aa, synthetic construct
  source 1..2096: note = Description of Artificial Sequence: Synthetic polypeptide
MPAAKRVKLDGGDKKYSIGLDIGTNSVGWAVITDEYKVPSKKFKVLGNTDRHSIKKNLIGALLFDSGETAEATRLKRTARRRYTRRKNRICYLQEIFSNEMAKVDDSFFHRLEESFLVEEDKKHERHPIFGNIVDEVAYHEKYPTIYHLRKKLVDSTDKADLRLIYLALAHMIKFRGHFLIEGDLNPDNSDVDKLFIQLVQTYNQLFEENPINASGVDAKAILSARLSKSRRLENLIAQLPGEKKNGLFGNLIALSLGLTPNFKSNFDLAEDAKLQLSKDTYDDDLDNLLAQIGDQYADLFLAAKNLSDAILLSDILRVNTEITKAPLSASMIKRYDEHHQDLTLLKALVRQQLPEKYKEIFFDQSKNGYAGYIDGGASQEEFYKFIKPILEKMDGTEELLVKLNREDLLRKQRTFDNGSIPHQIHLGELHAILRRQEDFYPFLKDNREKIEKILTFRIPYYVGPLARGNSRFAWMTRKSEETITPWNFEEVVDKGASAQSFIERMTNFDKNLPNEKVLPKHSLLYEYFTVYNELTKVKYVTEGMRKPAFLSGEQKKAIVDLLFKTNRKVTVKQLKEDYFKKIECFDSVEISGVEDRFNASLGTYHDLLKIIKDKDFLDNEENEDILEDIVLTLTLFEDREMIEERLKTYAHLFDDKVMKQLKRRRYTGWGRLSRKLINGIRDKQSGKTILDFLKSDGFANRNFMQLIHDDSLTFKEDIQKAQVSGQGDSLHEHIANLAGSPAIKKGILQTVKVVDELVKVMGRHKPENIVIEMARENQTTQKGQKNSRERMKRIEEGIKELGSQILKEHPVENTQLQNEKLYLYYLQNGRDMYVDQELDINRLSDYDVDHIVPQSFLKDDSIDNKVLTRSDKARGKSDNVPSEEVVKKMKNYWRQLLNAKLITQRKFDNLTKAERGGLSELDKAGFIKRQLVETRQITKHVAQILDSRMNTKYDENDKLIREVKVITLKSKLVSDFRKDFQFYKVREINNYHHAHDAYLNAVVGTALIKKYPKLESEFVYGDYKVYDVRKMIAKSEQEIGKATAKYFFYSNIMNFFKTEITLANGEIRKRPLIETNGETGEIVWDKGRDFATVRKVLSMPQVNIVKKTEVQTGGFSKESILPKRNSDKLIARKKDWDPKKYGGFDSPTVAYSVLVVAKVEKGKSKKLKSVKELLGITIMERSSFEKNPIDFLEAKGYKEVKKDLIIKLPKYSLFELENGRKRMLASAGELQKGNELALPSKYVNFLYLASHYEKLKGSPEDNEQKQLFVEQHKHYLDEIIEQISEFSKRVILADANLDKVLSAYNKHRDKPIREQAENIIHLFTLTNLGAPAAFKYFDTTIDRKRYTSTKEVLDATLIHQSITGLYETRIDLSQLGGDGGGGSEAAAKGGGGGTLNIEDEYRLHETSKEPDVSLGSTWLSDFPQAWAETGGMGLAVRQAPLIIPLKATSTPVSIKQYPMSQEARLGIKPHIQRLLDQGILVPCQSPWNTPLLPVKKPGTNDYRPVQDLREVNKRVEDIHPTVPNPYNLLSGLPPSHQWYTVLDLKDAFFCLRLHPTSQPLFAFEWRDPEMGISGQLTWTRLPQGFKNSPTLFNEALHRDLAGFRIQHPDLILLQYVDDLLLAATSELDCQQGTRALLQTLGDLGYRASAKKAQICQKQVKYLGYLLKEGQRWLTEARKETVMGQPIPKTPRQLREFLGKAGFCRLFIPGFAEMAAPLYPLTKPGTLFNWGPDQQKAFQEIKQALLTAPALGLPDLTKPFELFVDEKQGYAKGVLTQKLGPWRRPVAYLSKKLDPVAAGWPPCLRMVAAIAVLTKDAGKLTMGQPLVILAPHAVEALVKQPPDRWLSNARMTHYQALLLDTDRVQFGPVVALNPATLLPLPEEGLQHDCLDILAEAHGTRSDLMDQPLPDADHTWYTDGSSFLQEGQRKAGAAVTTETEVIWARALPAGTSAQRAELIALTQALKMAEGKKLNVYTDSRYAFATAHIHGEIYRRRGWLTSEGKEIKNKDEILALLKALFLPKRLSIIHCPGHQKGNSAEARGNRMADQAAREVATRETPETSTLLAGKRTADGSEFEKRTADGSEFESPKKKAKVE

SEQ ID NO: 2359 - protein, 2096 aa, synthetic construct
  source 1..2096: note = Description of Artificial Sequence: Synthetic polypeptide
MPAAKRVKLDGGDKKYSIGLDIGTNSVGWAVITDEYKVPSKKFKVLGNTDRHSIKKNLIGALLFDSGETAEATRLKRTARRRYTRRKNRICYLQEIFSNEMAKVDDSFFHRLEESFLVEEDKKHERHPIFGNIVDEVAYHEKYPTIYHLRKKLVDSTDKADLRLIYLALAHMIKFRGHFLIEGDLNPDNSDVDKLFIQLVQTYNQLFEENPINASGVDAKAILSARLSKSRRLENLIAQLPGEKKNGLFGNLIALSLGLTPNFKSNFDLAEDAKLQLSKDTYDDDLDNLLAQIGDQYADLFLAAKNLSDAILLSDILRVNTEITKAPLSASMIKRYDEHHQDLTLLKALVRQQLPEKYKEIFFDQSKNGYAGYIDGGASQEEFYKFIKPILEKMDGTEELLVKLNREDLLRKQRTFDNGSIPHQIHLGELHAILRRQEDFYPFLKDNREKIEKILTFRIPYYVGPLARGNSRFAWMTRKSEETITPWNFEEVVDKGASAQSFIERMTNFDKNLPNEKVLPKHSLLYEYFTVYNELTKVKYVTEGMRKPAFLSGEQKKAIVDLLFKTNRKVTVKQLKEDYFKKIECFDSVEISGVEDRFNASLGTYHDLLKIIKDKDFLDNEENEDILEDIVLTLTLFEDREMIEERLKTYAHLFDDKVMKQLKRRRYTGWGRLSRKLINGIRDKQSGKTILDFLKSDGFANRNFMQLIHDDSLTFKEDIQKAQVSGQGDSLHEHIANLAGSPAIKKGILQTVKVVDELVKVMGRHKPENIVIEMARENQTTQKGQKNSRERMKRIEEGIKELGSQILKEHPVENTQLQNEKLYLYYLQNGRDMYVDQELDINRLSDYDVDHIVPQSFLKDDSIDNKVLTRSDKARGKSDNVPSEEVVKKMKNYWRQLLNAKLITQRKFDNLTKAERGGLSELDKAGFIKRQLVETRQITKHVAQILDSRMNTKYDENDKLIREVKVITLKSKLVSDFRKDFQFYKVREINNYHHAHDAYLNAVVGTALIKKYPKLESEFVYGDYKVYDVRKMIAKSEQEIGKATAKYFFYSNIMNFFKTEITLANGEIRKRPLIETNGETGEIVWDKGRDFATVRKVLSMPQVNIVKKTEVQTGGFSKESILPKRNSDKLIARKKDWDPKKYGGFDSPTVAYSVLVVAKVEKGKSKKLKSVKELLGITIMERSSFEKNPIDFLEAKGYKEVKKDLIIKLPKYSLFELENGRKRMLASAGELQKGNELALPSKYVNFLYLASHYEKLKGSPEDNEQKQLFVEQHKHYLDEIIEQISEFSKRVILADANLDKVLSAYNKHRDKPIREQAENIIHLFTLTNLGAPAAFKYFDTTIDRKRYTSTKEVLDATLIHQSITGLYETRIDLSQLGGDGGGSSEAAAKPAPGGTLNIEDEYRLHETSKEPDVSLGSTWLSDFPQAWAETGGMGLAVRQAPLIIPLKATSTPVSIKQYPMSQEARLGIKPHIQRLLDQGILVPCQSPWNTPLLPVKKPGTNDYRPVQDLREVNKRVEDIHPTVPNPYNLLSGLPPSHQWYTVLDLKDAFFCLRLHPTSQPLFAFEWRDPEMGISGQLTWTRLPQGFKNSPTLFNEALHRDLAGFRIQHPDLILLQYVDDLLLAATSELDCQQGTRALLQTLGDLGYRASAKKAQICQKQVKYLGYLLKEGQRWLTEARKETVMGQPIPKTPRQLREFLGKAGFCRLFIPGFAEMAAPLYPLTKPGTLFNWGPDQQKAFQEIKQALLTAPALGLPDLTKPFELFVDEKQGYAKGVLTQKLGPWRRPVAYLSKKLDPVAAGWPPCLRMVAAIAVLTKDAGKLTMGQPLVILAPHAVEALVKQPPDRWLSNARMTHYQALLLDTDRVQFGPVVALNPATLLPLPEEGLQHDCLDILAEAHGTRSDLMDQPLPDADHTWYTDGSSFLQEGQRKAGAAVTTETEVIWARALPAGTSAQRAELIALTQALKMAEGKKLNVYTDSRYAFATAHIHGEIYRRRGWLTSEGKEIKNKDEILALLKALFLPKRLSIIHCPGHQKGNSAEARGNRMADQAAREVATRETPETSTLLAGKRTADGSEFEKRTADGSEFESPKKKAKVE

SEQ ID NO: 2360 - protein, 2094 aa, synthetic construct
  source 1..2094: note = Description of Artificial Sequence: Synthetic polypeptide
MPAAKRVKLDGGDKKYSIGLDIGTNSVGWAVITDEYKVPSKKFKVLGNTDRHSIKKNLIGALLFDSGETAEATRLKRTARRRYTRRKNRICYLQEIFSNEMAKVDDSFFHRLEESFLVEEDKKHERHPIFGNIVDEVAYHEKYPTIYHLRKKLVDSTDKADLRLIYLALAHMIKFRGHFLIEGDLNPDNSDVDKLFIQLVQTYNQLFEENPINASGVDAKAILSARLSKSRRLENLIAQLPGEKKNGLFGNLIALSLGLTPNFKSNFDLAEDAKLQLSKDTYDDDLDNLLAQIGDQYADLFLAAKNLSDAILLSDILRVNTEITKAPLSASMIKRYDEHHQDLTLLKALVRQQLPEKYKEIFFDQSKNGYAGYIDGGASQEEFYKFIKPILEKMDGTEELLVKLNREDLLRKQRTFDNGSIPHQIHLGELHAILRRQEDFYPFLKDNREKIEKILTFRIPYYVGPLARGNSRFAWMTRKSEETITPWNFEEVVDKGASAQSFIERMTNFDKNLPNEKVLPKHSLLYEYFTVYNELTKVKYVTEGMRKPAFLSGEQKKAIVDLLFKTNRKVTVKQLKEDYFKKIECFDSVEISGVEDRFNASLGTYHDLLKIIKDKDFLDNEENEDILEDIVLTLTLFEDREMIEERLKTYAHLFDDKVMKQLKRRRYTGWGRLSRKLINGIRDKQSGKTILDFLKSDGFANRNFMQLIHDDSLTFKEDIQKAQVSGQGDSLHEHIANLAGSPAIKKGILQTVKVVDELVKVMGRHKPENIVIEMARENQTTQKGQKNSRERMKRIEEGIKELGSQILKEHPVENTQLQNEKLYLYYLQNGRDMYVDQELDINRLSDYDVDHIVPQSFLKDDSIDNKVLTRSDKARGKSDNVPSEEVVKKMKNYWRQLLNAKLITQRKFDNLTKAERGGLSELDKAGFIKRQLVETRQITKHVAQILDSRMNTKYDENDKLIREVKVITLKSKLVSDFRKDFQFYKVREINNYHHAHDAYLNAVVGTALIKKYPKLESEFVYGDYKVYDVRKMIAKSEQEIGKATAKYFFYSNIMNFFKTEITLANGEIRKRPLIETNGETGEIVWDKGRDFATVRKVLSMPQVNIVKKTEVQTGGFSKESILPKRNSDKLIARKKDWDPKKYGGFDSPTVAYSVLVVAKVEKGKSKKLKSVKELLGITIMERSSFEKNPIDFLEAKGYKEVKKDLIIKLPKYSLFELENGRKRMLASAGELQKGNELALPSKYVNFLYLASHYEKLKGSPEDNEQKQLFVEQHKHYLDEIIEQISEFSKRVILADANLDKVLSAYNKHRDKPIREQAENIIHLFTLTNLGAPAAFKYFDTTIDRKRYTSTKEVLDATLIHQSITGLYETRIDLSQLGGDGGGGSGGSGGSGGTLNIEDEYRLHETSKEPDVSLGSTWLSDFPQAWAETGGMGLAVRQAPLIIPLKATSTPVSIKQYPMSQEARLGIKPHIQRLLDQGILVPCQSPWNTPLLPVKKPGTNDYRPVQDLREVNKRVEDIHPTVPNPYNLLSGLPPSHQWYTVLDLKDAFFCLRLHPTSQPLFAFEWRDPEMGISGQLTWTRLPQGFKNSPTLFNEALHRDLAGFRIQHPDLILLQYVDDLLLAATSELDCQQGTRALLQTLGDLGYRASAKKAQICQKQVKYLGYLLKEGQRWLTEARKETVMGQPIPKTPRQLREFLGKAGFCRLFIPGFAEMAAPLYPLTKPGTLFNWGPDQQKAFQEIKQALLTAPALGLPDLTKPFELFVDEKQGYAKGVLTQKLGPWRRPVAYLSKKLDPVAAGWPPCLRMVAAIAVLTKDAGKLTMGQPLVILAPHAVEALVKQPPDRWLSNARMTHYQALLLDTDRVQFGPVVALNPATLLPLPEEGLQHDCLDILAEAHGTRSDLMDQPLPDADHTWYTDGSSFLQEGQRKAGAAVTTETEVIWARALPAGTSAQRAELIALTQALKMAEGKKLNVYTDSRYAFATAHIHGEIYRRRGWLTSEGKEIKNKDEILALLKALFLPKRLSIIHCPGHQKGNSAEARGNRMADQAAREVATRETPETSTLLAGKRTADGSEFEKRTADGSEFESPKKKAKVE

SEQ ID NO: 2361 - protein, 2095 aa, synthetic construct
  source 1..2095: note = Description of Artificial Sequence: Synthetic polypeptide
MPAAKRVKLDGGDKKYSIGLDIGTNSVGWAVITDEYKVPSKKFKVLGNTDRHSIKKNLIGALLFDSGETAEATRLKRTARRRYTRRKNRICYLQEIFSNEMAKVDDSFFHRLEESFLVEEDKKHERHPIFGNIVDEVAYHEKYPTIYHLRKKLVDSTDKADLRLIYLALAHMIKFRGHFLIEGDLNPDNSDVDKLFIQLVQTYNQLFEENPINASGVDAKAILSARLSKSRRLENLIAQLPGEKKNGLFGNLIALSLGLTPNFKSNFDLAEDAKLQLSKDTYDDDLDNLLAQIGDQYADLFLAAKNLSDAILLSDILRVNTEITKAPLSASMIKRYDEHHQDLTLLKALVRQQLPEKYKEIFFDQSKNGYAGYIDGGASQEEFYKFIKPILEKMDGTEELLVKLNREDLLRKQRTFDNGSIPHQIHLGELHAILRRQEDFYPFLKDNREKIEKILTFRIPYYVGPLARGNSRFAWMTRKSEETITPWNFEEVVDKGASAQSFIERMTNFDKNLPNEKVLPKHSLLYEYFTVYNELTKVKYVTEGMRKPAFLSGEQKKAIVDLLFKTNRKVTVKQLKEDYFKKIECFDSVEISGVEDRFNASLGTYHDLLKIIKDKDFLDNEENEDILEDIVLTLTLFEDREMIEERLKTYAHLFDDKVMKQLKRRRYTGWGRLSRKLINGIRDKQSGKTILDFLKSDGFANRNFMQLIHDDSLTFKEDIQKAQVSGQGDSLHEHIANLAGSPAIKKGILQTVKVVDELVKVMGRHKPENIVIEMARENQTTQKGQKNSRERMKRIEEGIKELGSQILKEHPVENTQLQNEKLYLYYLQNGRDMYVDQELDINRLSDYDVDHIVPQSFLKDDSIDNKVLTRSDKARGKSDNVPSEEVVKKMKNYWRQLLNAKLITQRKFDNLTKAERGGLSELDKAGFIKRQLVETRQITKHVAQILDSRMNTKYDENDKLIREVKVITLKSKLVSDFRKDFQFYKVREINNYHHAHDAYLNAVVGTALIKKYPKLESEFVYGDYKVYDVRKMIAKSEQEIGKATAKYFFYSNIMNFFKTEITLANGEIRKRPLIETNGETGEIVWDKGRDFATVRKVLSMPQVNIVKKTEVQTGGFSKESILPKRNSDKLIARKKDWDPKKYGGFDSPTVAYSVLVVAKVEKGKSKKLKSVKELLGITIMERSSFEKNPIDFLEAKGYKEVKKDLIIKLPKYSLFELENGRKRMLASAGELQKGNELALPSKYVNFLYLASHYEKLKGSPEDNEQKQLFVEQHKHYLDEIIEQISEFSKRVILADANLDKVLSAYNKHRDKPIREQAENIIHLFTLTNLGAPAAFKYFDTTIDRKRYTSTKEVLDATLIHQSITGLYETRIDLSQLGGDGGEAAAKEAAAKGGTLNIEDEYRLHETSKEPDVSLGSTWLSDFPQAWAETGGMGLAVRQAPLIIPLKATSTPVSIKQYPMSQEARLGIKPHIQRLLDQGILVPCQSPWNTPLLPVKKPGTNDYRPVQDLREVNKRVEDIHPTVPNPYNLLSGLPPSHQWYTVLDLKDAFFCLRLHPTSQPLFAFEWRDPEMGISGQLTWTRLPQGFKNSPTLFNEALHRDLAGFRIQHPDLILLQYVDDLLLAATSELDCQQGTRALLQTLGDLGYRASAKKAQICQKQVKYLGYLLKEGQRWLTEARKETVMGQPIPKTPRQLREFLGKAGFCRLFIPGFAEMAAPLYPLTKPGTLFNWGPDQQKAFQEIKQALLTAPALGLPDLTKPFELFVDEKQGYAKGVLTQKLGPWRRPVAYLSKKLDPVAAGWPPCLRMVAAIAVLTKDAGKLTMGQPLVILAPHAVEALVKQPPDRWLSNARMTHYQALLLDTDRVQFGPVVALNPATLLPLPEEGLQHDCLDILAEAHGTRSDLMDQPLPDADHTWYTDGSSFLQEGQRKAGAAVTTETEVIWARALPAGTSAQRAELIALTQALKMAEGKKLNVYTDSRYAFATAHIHGEIYRRRGWLTSEGKEIKNKDEILALLKALFLPKRLSIIHCPGHQKGNSAEARGNRMADQAAREVATRETPETSTLLAGKRTADGSEFEKRTADGSEFESPKKKAKVE

SEQ ID NO: 2362 - protein, 2091 aa, synthetic construct
  source 1..2091: note = Description of Artificial Sequence: Synthetic polypeptide
MPAAKRVKLDGGDKKYSIGLDIGTNSVGWAVITDEYKVPSKKFKVLGNTDRHSIKKNLIGALLFDSGETAEATRLKRTARRRYTRRKNRICYLQEIFSNEMAKVDDSFFHRLEESFLVEEDKKHERHPIFGNIVDEVAYHEKYPTIYHLRKKLVDSTDKADLRLIYLALAHMIKFRGHFLIEGDLNPDNSDVDKLFIQLVQTYNQLFEENPINASGVDAKAILSARLSKSRRLENLIAQLPGEKKNGLFGNLIALSLGLTPNFKSNFDLAEDAKLQLSKDTYDDDLDNLLAQIGDQYADLFLAAKNLSDAILLSDILRVNTEITKAPLSASMIKRYDEHHQDLTLLKALVRQQLPEKYKEIFFDQSKNGYAGYIDGGASQEEFYKFIKPILEKMDGTEELLVKLNREDLLRKQRTFDNGSIPHQIHLGELHAILRRQEDFYPFLKDNREKIEKILTFRIPYYVGPLARGNSRFAWMTRKSEETITPWNFEEVVDKGASAQSFIERMTNFDKNLPNEKVLPKHSLLYEYFTVYNELTKVKYVTEGMRKPAFLSGEQKKAIVDLLFKTNRKVTVKQLKEDYFKKIECFDSVEISGVEDRFNASLGTYHDLLKIIKDKDFLDNEENEDILEDIVLTLTLFEDREMIEERLKTYAHLFDDKVMKQLKRRRYTGWGRLSRKLINGIRDKQSGKTILDFLKSDGFANRNFMQLIHDDSLTFKEDIQKAQVSGQGDSLHEHIANLAGSPAIKKGILQTVKVVDELVKVMGRHKPENIVIEMARENQTTQKGQKNSRERMKRIEEGIKELGSQILKEHPVENTQLQNEKLYLYYLQNGRDMYVDQELDINRLSDYDVDHIVPQSFLKDDSIDNKVLTRSDKARGKSDNVPSEEVVKKMKNYWRQLLNAKLITQRKFDNLTKAERGGLSELDKAGFIKRQLVETRQITKHVAQILDSRMNTKYDENDKLIREVKVITLKSKLVSDFRKDFQFYKVREINNYHHAHDAYLNAVVGTALIKKYPKLESEFVYGDYKVYDVRKMIAKSEQEIGKATAKYFFYSNIMNFFKTEITLANGEIRKRPLIETNGETGEIVWDKGRDFATVRKVLSMPQVNIVKKTEVQTGGFSKESILPKRNSDKLIARKKDWDPKKYGGFDSPTVAYSVLVVAKVEKGKSKKLKSVKELLGITIMERSSFEKNPIDFLEAKGYKEVKKDLIIKLPKYSLFELENGRKRMLASAGELQKGNELALPSKYVNFLYLASHYEKLKGSPEDNEQKQLFVEQHKHYLDEIIEQISEFSKRVILADANLDKVLSAYNKHRDKPIREQAENIIHLFTLTNLGAPAAFKYFDTTIDRKRYTSTKEVLDATLIHQSITGLYETRIDLSQLGGDGGGSSGGGGGTLNIEDEYRLHETSKEPDVSLGSTWLSDFPQAWAETGGMGLAVRQAPLIIPLKATSTPVSIKQYPMSQEARLGIKPHIQRLLDQGILVPCQSPWNTPLLPVKKPGTNDYRPVQDLREVNKRVEDIHPTVPNPYNLLSGLPPSHQWYTVLDLKDAFFCLRLHPTSQPLFAFEWRDPEMGISGQLTWTRLPQGFKNSPTLFNEALHRDLAGFRIQHPDLILLQYVDDLLLAATSELDCQQGTRALLQTLGDLGYRASAKKAQICQKQVKYLGYLLKEGQRWLTEARKETVMGQPIPKTPRQLREFLGKAGFCRLFIPGFAEMAAPLYPLTKPGTLFNWGPDQQKAFQEIKQALLTAPALGLPDLTKPFELFVDEKQGYAKGVLTQKLGPWRRPVAYLSKKLDPVAAGWPPCLRMVAAIAVLTKDAGKLTMGQPLVILAPHAVEALVKQPPDRWLSNARMTHYQALLLDTDRVQFGPVVALNPATLLPLPEEGLQHDCLDILAEAHGTRSDLMDQPLPDADHTWYTDGSSFLQEGQRKAGAAVTTETEVIWARALPAGTSAQRAELIALTQALKMAEGKKLNVYTDSRYAFATAHIHGEIYRRRGWLTSEGKEIKNKDEILALLKALFLPKRLSIIHCPGHQKGNSAEARGNRMADQAAREVATRETPETSTLLAGKRTADGSEFEKRTADGSEFESPKKKAKVE

SEQ ID NO: 2363 - protein, 2093 aa, synthetic construct
  source 1..2093: note = Description of Artificial Sequence: Synthetic polypeptide
MPAAKRVKLDGGDKKYSIGLDIGTNSVGWAVITDEYKVPSKKFKVLGNTDRHSIKKNLIGALLFDSGETAEATRLKRTARRRYTRRKNRICYLQEIFSNEMAKVDDSFFHRLEESFLVEEDKKHERHPIFGNIVDEVAYHEKYPTIYHLRKKLVDSTDKADLRLIYLALAHMIKFRGHFLIEGDLNPDNSDVDKLFIQLVQTYNQLFEENPINASGVDAKAILSARLSKSRRLENLIAQLPGEKKNGLFGNLIALSLGLTPNFKSNFDLAEDAKLQLSKDTYDDDLDNLLAQIGDQYADLFLAAKNLSDAILLSDILRVNTEITKAPLSASMIKRYDEHHQDLTLLKALVRQQLPEKYKEIFFDQSKNGYAGYIDGGASQEEFYKFIKPILEKMDGTEELLVKLNREDLLRKQRTFDNGSIPHQIHLGELHAILRRQEDFYPFLKDNREKIEKILTFRIPYYVGPLARGNSRFAWMTRKSEETITPWNFEEVVDKGASAQSFIERMTNFDKNLPNEKVLPKHSLLYEYFTVYNELTKVKYVTEGMRKPAFLSGEQKKAIVDLLFKTNRKVTVKQLKEDYFKKIECFDSVEISGVEDRFNASLGTYHDLLKIIKDKDFLDNEENEDILEDIVLTLTLFEDREMIEERLKTYAHLFDDKVMKQLKRRRYTGWGRLSRKLINGIRDKQSGKTILDFLKSDGFANRNFMQLIHDDSLTFKEDIQKAQVSGQGDSLHEHIANLAGSPAIKKGILQTVKVVDELVKVMGRHKPENIVIEMARENQTTQKGQKNSRERMKRIEEGIKELGSQILKEHPVENTQLQNEKLYLYYLQNGRDMYVDQELDINRLSDYDVDHIVPQSFLKDDSIDNKVLTRSDKARGKSDNVPSEEVVKKMKNYWRQLLNAKLITQRKFDNLTKAERGGLSELDKAGFIKRQLVETRQITKHVAQILDSRMNTKYDENDKLIREVKVITLKSKLVSDFRKDFQFYKVREINNYHHAHDAYLNAVVGTALIKKYPKLESEFVYGDYKVYDVRKMIAKSEQEIGKATAKYFFYSNIMNFFKTEITLANGEIRKRPLIETNGETGEIVWDKGRDFATVRKVLSMPQVNIVKKTEVQTGGFSKESILPKRNSDKLIARKKDWDPKKYGGFDSPTVAYSVLVVAKVEKGKSKKLKSVKELLGITIMERSSFEKNPIDFLEAKGYKEVKKDLIIKLPKYSLFELENGRKRMLASAGELQKGNELALPSKYVNFLYLASHYEKLKGSPEDNEQKQLFVEQHKHYLDEIIEQISEFSKRVILADANLDKVLSAYNKHRDKPIREQAENIIHLFTLTNLGAPAAFKYFDTTIDRKRYTSTKEVLDATLIHQSITGLYETRIDLSQLGGDGGGGSEAAAKGGTLNIEDEYRLHETSKEPDVSLGSTWLSDFPQAWAETGGMGLAVRQAPLIIPLKATSTPVSIKQYPMSQEARLGIKPHIQRLLDQGILVPCQSPWNTPLLPVKKPGTNDYRPVQDLREVNKRVEDIHPTVPNPYNLLSGLPPSHQWYTVLDLKDAFFCLRLHPTSQPLFAFEWRDPEMGISGQLTWTRLPQGFKNSPTLFNEALHRDLAGFRIQHPDLILLQYVDDLLLAATSELDCQQGTRALLQTLGDLGYRASAKKAQICQKQVKYLGYLLKEGQRWLTEARKETVMGQPIPKTPRQLREFLGKAGFCRLFIPGFAEMAAPLYPLTKPGTLFNWGPDQQKAFQEIKQALLTAPALGLPDLTKPFELFVDEKQGYAKGVLTQKLGPWRRPVAYLSKKLDPVAAGWPPCLRMVAAIAVLTKDAGKLTMGQPLVILAPHAVEALVKQPPDRWLSNARMTHYQALLLDTDRVQFGPVVALNPATLLPLPEEGLQHDCLDILAEAHGTRSDLMDQPLPDADHTWYTDGSSFLQEGQRKAGAAVTTETEVIWARALPAGTSAQRAELIALTQALKMAEGKKLNVYTDSRYAFATAHIHGEIYRRRGWLTSEGKEIKNKDEILALLKALFLPKRLSIIHCPGHQKGNSAEARGNRMADQAAREVATRETPETSTLLAGKRTADGSEFEKRTADGSEFESPKKKAKVE

SEQ ID NO: 2364 - protein, 2090 aa, synthetic construct
  source 1..2090: note = Description of Artificial Sequence: Synthetic polypeptide
MPAAKRVKLDGGDKKYSIGLDIGTNSVGWAVITDEYKVPSKKFKVLGNTDRHSIKKNLIGALLFDSGETAEATRLKRTARRRYTRRKNRICYLQEIFSNEMAKVDDSFFHRLEESFLVEEDKKHERHPIFGNIVDEVAYHEKYPTIYHLRKKLVDSTDKADLRLIYLALAHMIKFRGHFLIEGDLNPDNSDVDKLFIQLVQTYNQLFEENPINASGVDAKAILSARLSKSRRLENLIAQLPGEKKNGLFGNLIALSLGLTPNFKSNFDLAEDAKLQLSKDTYDDDLDNLLAQIGDQYADLFLAAKNLSDAILLSDILRVNTEITKAPLSASMIKRYDEHHQDLTLLKALVRQQLPEKYKEIFFDQSKNGYAGYIDGGASQEEFYKFIKPILEKMDGTEELLVKLNREDLLRKQRTFDNGSIPHQIHLGELHAILRRQEDFYPFLKDNREKIEKILTFRIPYYVGPLARGNSRFAWMTRKSEETITPWNFEEVVDKGASAQSFIERMTNFDKNLPNEKVLPKHSLLYEYFTVYNELTKVKYVTEGMRKPAFLSGEQKKAIVDLLFKTNRKVTVKQLKEDYFKKIECFDSVEISGVEDRFNASLGTYHDLLKIIKDKDFLDNEENEDILEDIVLTLTLFEDREMIEERLKTYAHLFDDKVMKQLKRRRYTGWGRLSRKLINGIRDKQSGKTILDFLKSDGFANRNFMQLIHDDSLTFKEDIQKAQVSGQGDSLHEHIANLAGSPAIKKGILQTVKVVDELVKVMGRHKPENIVIEMARENQTTQKGQKNSRERMKRIEEGIKELGSQILKEHPVENTQLQNEKLYLYYLQNGRDMYVDQELDINRLSDYDVDHIVPQSFLKDDSIDNKVLTRSDKARGKSDNVPSEEVVKKMKNYWRQLLNAKLITQRKFDNLTKAERGGLSELDKAGFIKRQLVETRQITKHVAQILDSRMNTKYDENDKLIREVKVITLKSKLVSDFRKDFQFYKVREINNYHHAHDAYLNAVVGTALIKKYPKLESEFVYGDYKVYDVRKMIAKSEQEIGKATAKYFFYSNIMNFFKTEITLANGEIRKRPLIETNGETGEIVWDKGRDFATVRKVLSMPQVNIVKKTEVQTGGFSKESILPKRNSDKLIARKKDWDPKKYGGFDSPTVAYSVLVVAKVEKGKSKKLKSVKELLGITIMERSSFEKNPIDFLEAKGYKEVKKDLIIKLPKYSLFELENGRKRMLASAGELQKGNELALPSKYVNFLYLASHYEKLKGSPEDNEQKQLFVEQHKHYLDEIIEQISEFSKRVILADANLDKVLSAYNKHRDKPIREQAENIIHLFTLTNLGAPAAFKYFDTTIDRKRYTSTKEVLDATLIHQSITGLYETRIDLSQLGGDGGPAPAPGGTLNIEDEYRLHETSKEPDVSLGSTWLSDFPQAWAETGGMGLAVRQAPLIIPLKATSTPVSIKQYPMSQEARLGIKPHIQRLLDQGILVPCQSPWNTPLLPVKKPGTNDYRPVQDLREVNKRVEDIHPTVPNPYNLLSGLPPSHQWYTVLDLKDAFFCLRLHPTSQPLFAFEWRDPEMGISGQLTWTRLPQGFKNSPTLFNEALHRDLAGFRIQHPDLILLQYVDDLLLAATSELDCQQGTRALLQTLGDLGYRASAKKAQICQKQVKYLGYLLKEGQRWLTEARKETVMGQPIPKTPRQLREFLGKAGFCRLFIPGFAEMAAPLYPLTKPGTLFNWGPDQQKAFQEIKQALLTAPALGLPDLTKPFELFVDEKQGYAKGVLTQKLGPWRRPVAYLSKKLDPVAAGWPPCLRMVAAIAVLTKDAGKLTMGQPLVILAPHAVEALVKQPPDRWLSNARMTHYQALLLDTDRVQFGPVVALNPATLLPLPEEGLQHDCLDILAEAHGTRSDLMDQPLPDADHTWYTDGSSFLQEGQRKAGAAVTTETEVIWARALPAGTSAQRAELIALTQALKMAEGKKLNVYTDSRYAFATAHIHGEIYRRRGWLTSEGKEIKNKDEILALLKALFLPKRLSIIHCPGHQKGNSAEARGNRMADQAAREVATRETPETSTLLAGKRTADGSEFEKRTADGSEFESPKKKAKVE

SEQ ID NO: 2365 - protein, 2094 aa, synthetic construct
  source 1..2094: note = Description of Artificial Sequence: Synthetic polypeptide
MPAAKRVKLDGGDKKYSIGLDIGTNSVGWAVITDEYKVPSKKFKVLGNTDRHSIKKNLIGALLFDSGETAEATRLKRTARRRYTRRKNRICYLQEIFSNEMAKVDDSFFHRLEESFLVEEDKKHERHPIFGNIVDEVAYHEKYPTIYHLRKKLVDSTDKADLRLIYLALAHMIKFRGHFLIEGDLNPDNSDVDKLFIQLVQTYNQLFEENPINASGVDAKAILSARLSKSRRLENLIAQLPGEKKNGLFGNLIALSLGLTPNFKSNFDLAEDAKLQLSKDTYDDDLDNLLAQIGDQYADLFLAAKNLSDAILLSDILRVNTEITKAPLSASMIKRYDEHHQDLTLLKALVRQQLPEKYKEIFFDQSKNGYAGYIDGGASQEEFYKFIKPILEKMDGTEELLVKLNREDLLRKQRTFDNGSIPHQIHLGELHAILRRQEDFYPFLKDNREKIEKILTFRIPYYVGPLARGNSRFAWMTRKSEETITPWNFEEVVDKGASAQSFIERMTNFDKNLPNEKVLPKHSLLYEYFTVYNELTKVKYVTEGMRKPAFLSGEQKKAIVDLLFKTNRKVTVKQLKEDYFKKIECFDSVEISGVEDRFNASLGTYHDLLKIIKDKDFLDNEENEDILEDIVLTLTLFEDREMIEERLKTYAHLFDDKVMKQLKRRRYTGWGRLSRKLINGIRDKQSGKTILDFLKSDGFANRNFMQLIHDDSLTFKEDIQKAQVSGQGDSLHEHIANLAGSPAIKKGILQTVKVVDELVKVMGRHKPENIVIEMARENQTTQKGQKNSRERMKRIEEGIKELGSQILKEHPVENTQLQNEKLYLYYLQNGRDMYVDQELDINRLSDYDVDHIVPQSFLKDDSIDNKVLTRSDKARGKSDNVPSEEVVKKMKNYWRQLLNAKLITQRKFDNLTKAERGGLSELDKAGFIKRQLVETRQITKHVAQILDSRMNTKYDENDKLIREVKVITLKSKLVSDFRKDFQFYKVREINNYHHAHDAYLNAVVGTALIKKYPKLESEFVYGDYKVYDVRKMIAKSEQEIGKATAKYFFYSNIMNFFKTEITLANGEIRKRPLIETNGETGEIVWDKGRDFATVRKVLSMPQVNIVKKTEVQTGGFSKESILPKRNSDKLIARKKDWDPKKYGGFDSPTVAYSVLVVAKVEKGKSKKLKSVKELLGITIMERSSFEKNPIDFLEAKGYKEVKKDLIIKLPKYSLFELENGRKRMLASAGELQKGNELALPSKYVNFLYLASHYEKLKGSPEDNEQKQLFVEQHKHYLDEIIEQISEFSKRVILADANLDKVLSAYNKHRDKPIREQAENIIHLFTLTNLGAPAAFKYFDTTIDRKRYTSTKEVLDATLIHQSITGLYETRIDLSQLGGDGGGGSPAPGGGGGTLNIEDEYRLHETSKEPDVSLGSTWLSDFPQAWAETGGMGLAVRQAPLIIPLKATSTPVSIKQYPMSQEARLGIKPHIQRLLDQGILVPCQSPWNTPLLPVKKPGTNDYRPVQDLREVNKRVEDIHPTVPNPYNLLSGLPPSHQWYTVLDLKDAFFCLRLHPTSQPLFAFEWRDPEMGISGQLTWTRLPQGFKNSPTLFNEALHRDLAGFRIQHPDLILLQYVDDLLLAATSELDCQQGTRALLQTLGDLGYRASAKKAQICQKQVKYLGYLLKEGQRWLTEARKETVMGQPIPKTPRQLREFLGKAGFCRLFIPGFAEMAAPLYPLTKPGTLFNWGPDQQKAFQEIKQALLTAPALGLPDLTKPFELFVDEKQGYAKGVLTQKLGPWRRPVAYLSKKLDPVAAGWPPCLRMVAAIAVLTKDAGKLTMGQPLVILAPHAVEALVKQPPDRWLSNARMTHYQALLLDTDRVQFGPVVALNPATLLPLPEEGLQHDCLDILAEAHGTRSDLMDQPLPDADHTWYTDGSSFLQEGQRKAGAAVTTETEVIWARALPAGTSAQRAELIALTQALKMAEGKKLNVYTDSRYAFATAHIHGEIYRRRGWLTSEGKEIKNKDEILALLKALFLPKRLSIIHCPGHQKGNSAEARGNRMADQAAREVATRETPETSTLLAGKRTADGSEFEKRTADGSEFESPKKKAKVE

SEQ ID NO: 2366 - protein, 2091 aa, synthetic construct
  source 1..2091: note = Description of Artificial Sequence: Synthetic polypeptide
MPAAKRVKLDGGDKKYSIGLDIGTNSVGWAVITDEYKVPSKKFKVLGNTDRHSIKKNLIGALLFDSGETAEATRLKRTARRRYTRRKNRICYLQEIFSNEMAKVDDSFFHRLEESFLVEEDKKHERHPIFGNIVDEVAYHEKYPTIYHLRKKLVDSTDKADLRLIYLALAHMIKFRGHFLIEGDLNPDNSDVDKLFIQLVQTYNQLFEENPINASGVDAKAILSARLSKSRRLENLIAQLPGEKKNGLFGNLIALSLGLTPNFKSNFDLAEDAKLQLSKDTYDDDLDNLLAQIGDQYADLFLAAKNLSDAILLSDILRVNTEITKAPLSASMIKRYDEHHQDLTLLKALVRQQLPEKYKEIFFDQSKNGYAGYIDGGASQEEFYKFIKPILEKMDGTEELLVKLNREDLLRKQRTFDNGSIPHQIHLGELHAILRRQEDFYPFLKDNREKIEKILTFRIPYYVGPLARGNSRFAWMTRKSEETITPWNFEEVVDKGASAQSFIERMTNFDKNLPNEKVLPKHSLLYEYFTVYNELTKVKYVTEGMRKPAFLSGEQKKAIVDLLFKTNRKVTVKQLKEDYFKKIECFDSVEISGVEDRFNASLGTYHDLLKIIKDKDFLDNEENEDILEDIVLTLTLFEDREMIEERLKTYAHLFDDKVMKQLKRRRYTGWGRLSRKLINGIRDKQSGKTILDFLKSDGFANRNFMQLIHDDSLTFKEDIQKAQVSGQGDSLHEHIANLAGSPAIKKGILQTVKVVDELVKVMGRHKPENIVIEMARENQTTQKGQKNSRERMKRIEEGIKELGSQILKEHPVENTQLQNEKLYLYYLQNGRDMYVDQELDINRLSDYDVDHIVPQSFLKDDSIDNKVLTRSDKARGKSDNVPSEEVVKKMKNYWRQLLNAKLITQRKFDNLTKAERGGLSELDKAGFIKRQLVETRQITKHVAQILDSRMNTKYDENDKLIREVKVITLKSKLVSDFRKDFQFYKVREINNYHHAHDAYLNAVVGTALIKKYPKLESEFVYGDYKVYDVRKMIAKSEQEIGKATAKYFFYSNIMNFFKTEITLANGEIRKRPLIETNGETGEIVWDKGRDFATVRKVLSMPQVNIVKKTEVQTGGFSKESILPKRNSDKLIARKKDWDPKKYGGFDSPTVAYSVLVVAKVEKGKSKKLKSVKELLGITIMERSSFEKNPIDFLEAKGYKEVKKDLIIKLPKYSLFELENGRKRMLASAGELQKGNELALPSKYVNFLYLASHYEKLKGSPEDNEQKQLFVEQHKHYLDEIIEQISEFSKRVILADANLDKVLSAYNKHRDKPIREQAENIIHLFTLTNLGAPAAFKYFDTTIDRKRYTSTKEVLDATLIHQSITGLYETRIDLSQLGGDGGGSSPAPGGTLNIEDEYRLHETSKEPDVSLGSTWLSDFPQAWAETGGMGLAVRQAPLIIPLKATSTPVSIKQYPMSQEARLGIKPHIQRLLDQGILVPCQSPWNTPLLPVKKPGTNDYRPVQDLREVNKRVEDIHPTVPNPYNLLSGLPPSHQWYTVLDLKDAFFCLRLHPTSQPLFAFEWRDPEMGISGQLTWTRLPQGFKNSPTLFNEALHRDLAGFRIQHPDLILLQYVDDLLLAATSELDCQQGTRALLQTLGDLGYRASAKKAQICQKQVKYLGYLLKEGQRWLTEARKETVMGQPIPKTPRQLREFLGKAGFCRLFIPGFAEMAAPLYPLTKPGTLFNWGPDQQKAFQEIKQALLTAPALGLPDLTKPFELFVDEKQGYAKGVLTQKLGPWRRPVAYLSKKLDPVAAGWPPCLRMVAAIAVLTKDAGKLTMGQPLVILAPHAVEALVKQPPDRWLSNARMTHYQALLLDTDRVQFGPVVALNPATLLPLPEEGLQHDCLDILAEAHGTRSDLMDQPLPDADHTWYTDGSSFLQEGQRKAGAAVTTETEVIWARALPAGTSAQRAELIALTQALKMAEGKKLNVYTDSRYAFATAHIHGEIYRRRGWLTSEGKEIKNKDEILALLKALFLPKRLSIIHCPGHQKGNSAEARGNRMADQAAREVATRETPETSTLLAGKRTADGSEFEKRTADGSEFESPKKKAKVE

SEQ ID NO: 2367 - protein, 2096 aa, synthetic construct
  source 1..2096: note = Description of Artificial Sequence: Synthetic polypeptide
MPAAKRVKLDGGDKKYSIGLDIGTNSVGWAVITDEYKVPSKKFKVLGNTDRHSIKKNLIGALLFDSGETAEATRLKRTARRRYTRRKNRICYLQEIFSNEMAKVDDSFFHRLEESFLVEEDKKHERHPIFGNIVDEVAYHEKYPTIYHLRKKLVDSTDKADLRLIYLALAHMIKFRGHFLIEGDLNPDNSDVDKLFIQLVQTYNQLFEENPINASGVDAKAILSARLSKSRRLENLIAQLPGEKKNGLFGNLIALSLGLTPNFKSNFDLAEDAKLQLSKDTYDDDLDNLLAQIGDQYADLFLAAKNLSDAILLSDILRVNTEITKAPLSASMIKRYDEHHQDLTLLKALVRQQLPEKYKEIFFDQSKNGYAGYIDGGASQEEFYKFIKPILEKMDGTEELLVKLNREDLLRKQRTFDNGSIPHQIHLGELHAILRRQEDFYPFLKDNREKIEKILTFRIPYYVGPLARGNSRFAWMTRKSEETITPWNFEEVVDKGASAQSFIERMTNFDKNLPNEKVLPKHSLLYEYFTVYNELTKVKYVTEGMRKPAFLSGEQKKAIVDLLFKTNRKVTVKQLKEDYFKKIECFDSVEISGVEDRFNASLGTYHDLLKIIKDKDFLDNEENEDILEDIVLTLTLFEDREMIEERLKTYAHLFDDKVMKQLKRRRYTGWGRLSRKLINGIRDKQSGKTILDFLKSDGFANRNFMQLIHDDSLTFKEDIQKAQVSGQGDSLHEHIANLAGSPAIKKGILQTVKVVDELVKVMGRHKPENIVIEMARENQTTQKGQKNSRERMKRIEEGIKELGSQILKEHPVENTQLQNEKLYLYYLQNGRDMYVDQELDINRLSDYDVDHIVPQSFLKDDSIDNKVLTRSDKARGKSDNVPSEEVVKKMKNYWRQLLNAKLITQRKFDNLTKAERGGLSELDKAGFIKRQLVETRQITKHVAQILDSRMNTKYDENDKLIREVKVITLKSKLVSDFRKDFQFYKVREINNYHHAHDAYLNAVVGTALIKKYPKLESEFVYGDYKVYDVRKMIAKSEQEIGKATAKYFFYSNIMNFFKTEITLANGEIRKRPLIETNGETGEIVWDKGRDFATVRKVLSMPQVNIVKKTEVQTGGFSKESILPKRNSDKLIARKKDWDPKKYGGFDSPTVAYSVLVVAKVEKGKSKKLKSVKELLGITIMERSSFEKNPIDFLEAKGYKEVKKDLIIKLPKYSLFELENGRKRMLASAGELQKGNELALPSKYVNFLYLASHYEKLKGSPEDNEQKQLFVEQHKHYLDEIIEQISEFSKRVILADANLDKVLSAYNKHRDKPIREQAENIIHLFTLTNLGAPAAFKYFDTTIDRKRYTSTKEVLDATLIHQSITGLYETRIDLSQLGGDGGEAAAKGSSGGGGGTLNIEDEYRLHETSKEPDVSLGSTWLSDFPQAWAETGGMGLAVRQAPLIIPLKATSTPVSIKQYPMSQEARLGIKPHIQRLLDQGILVPCQSPWNTPLLPVKKPGTNDYRPVQDLREVNKRVEDIHPTVPNPYNLLSGLPPSHQWYTVLDLKDAFFCLRLHPTSQPLFAFEWRDPEMGISGQLTWTRLPQGFKNSPTLFNEALHRDLAGFRIQHPDLILLQYVDDLLLAATSELDCQQGTRALLQTLGDLGYRASAKKAQICQKQVKYLGYLLKEGQRWLTEARKETVMGQPIPKTPRQLREFLGKAGFCRLFIPGFAEMAAPLYPLTKPGTLFNWGPDQQKAFQEIKQALLTAPALGLPDLTKPFELFVDEKQGYAKGVLTQKLGPWRRPVAYLSKKLDPVAAGWPPCLRMVAAIAVLTKDAGKLTMGQPLVILAPHAVEALVKQPPDRWLSNARMTHYQALLLDTDRVQFGPVVALNPATLLPLPEEGLQHDCLDILAEAHGTRSDLMDQPLPDADHTWYTDGSSFLQEGQRKAGAAVTTETEVIWARALPAGTSAQRAELIALTQALKMAEGKKLNVYTDSRYAFATAHIHGEIYRRRGWLTSEGKEIKNKDEILALLKALFLPKRLSIIHCPGHQKGNSAEARGNRMADQAAREVATRETPETSTLLAGKRTADGSEFEKRTADGSEFESPKKKAKVE

SEQ ID NO: 2368 - protein, 2096 aa, synthetic construct
  source 1..2096: note = Description of Artificial Sequence: Synthetic polypeptide
MPAAKRVKLDGGDKKYSIGLDIGTNSVGWAVITDEYKVPSKKFKVLGNTDRHSIKKNLIGALLFDSGETAEATRLKRTARRRYTRRKNRICYLQEIFSNEMAKVDDSFFHRLEESFLVEEDKKHERHPIFGNIVDEVAYHEKYPTIYHLRKKLVDSTDKADLRLIYLALAHMIKFRGHFLIEGDLNPDNSDVDKLFIQLVQTYNQLFEENPINASGVDAKAILSARLSKSRRLENLIAQLPGEKKNGLFGNLIALSLGLTPNFKSNFDLAEDAKLQLSKDTYDDDLDNLLAQIGDQYADLFLAAKNLSDAILLSDILRVNTEITKAPLSASMIKRYDEHHQDLTLLKALVRQQLPEKYKEIFFDQSKNGYAGYIDGGASQEEFYKFIKPILEKMDGTEELLVKLNREDLLRKQRTFDNGSIPHQIHLGELHAILRRQEDFYPFLKDNREKIEKILTFRIPYYVGPLARGNSRFAWMTRKSEETITPWNFEEVVDKGASAQSFIERMTNFDKNLPNEKVLPKHSLLYEYFTVYNELTKVKYVTEGMRKPAFLSGEQKKAIVDLLFKTNRKVTVKQLKEDYFKKIECFDSVEISGVEDRFNASLGTYHDLLKIIKDKDFLDNEENEDILEDIVLTLTLFEDREMIEERLKTYAHLFDDKVMKQLKRRRYTGWGRLSRKLINGIRDKQSGKTILDFLKSDGFANRNFMQLIHDDSLTFKEDIQKAQVSGQGDSLHEHIANLAGSPAIKKGILQTVKVVDELVKVMGRHKPENIVIEMARENQTTQKGQKNSRERMKRIEEGIKELGSQILKEHPVENTQLQNEKLYLYYLQNGRDMYVDQELDINRLSDYDVDHIVPQSFLKDDSIDNKVLTRSDKARGKSDNVPSEEVVKKMKNYWRQLLNAKLITQRKFDNLTKAERGGLSELDKAGFIKRQLVETRQITKHVAQILDSRMNTKYDENDKLIREVKVITLKSKLVSDFRKDFQFYKVREINNYHHAHDAYLNAVVGTALIKKYPKLESEFVYGDYKVYDVRKMIAKSEQEIGKATAKYFFYSNIMNFFKTEITLANGEIRKRPLIETNGETGEIVWDKGRDFATVRKVLSMPQVNIVKKTEVQTGGFSKESILPKRNSDKLIARKKDWDPKKYGGFDSPTVAYSVLVVAKVEKGKSKKLKSVKELLGITIMERSSFEKNPIDFLEAKGYKEVKKDLIIKLPKYSLFELENGRKRMLASAGELQKGNELALPSKYVNFLYLASHYEKLKGSPEDNEQKQLFVEQHKHYLDEIIEQISEFSKRVILADANLDKVLSAYNKHRDKPIREQAENIIHLFTLTNLGAPAAFKYFDTTIDRKRYTSTKEVLDATLIHQSITGLYETRIDLSQLGGDGGEAAAKGSSGGSGGTLNIEDEYRLHETSKEPDVSLGSTWLSDFPQAWAETGGMGLAVRQAPLIIPLKATSTPVSIKQYPMSQEARLGIKPHIQRLLDQGILVPCQSPWNTPLLPVKKPGTNDYRPVQDLREVNKRVEDIHPTVPNPYNLLSGLPPSHQWYTVLDLKDAFFCLRLHPTSQPLFAFEWRDPEMGISGQLTWTRLPQGFKNSPTLFNEALHRDLAGFRIQHPDLILLQYVDDLLLAATSELDCQQGTRALLQTLGDLGYRASAKKAQICQKQVKYLGYLLKEGQRWLTEARKETVMGQPIPKTPRQLREFLGKAGFCRLFIPGFAEMAAPLYPLTKPGTLFNWGPDQQKAFQEIKQALLTAPALGLPDLTKPFELFVDEKQGYAKGVLTQKLGPWRRPVAYLSKKLDPVAAGWPPCLRMVAAIAVLTKDAGKLTMGQPLVILAPHAVEALVKQPPDRWLSNARMTHYQALLLDTDRVQFGPVVALNPATLLPLPEEGLQHDCLDILAEAHGTRSDLMDQPLPDADHTWYTDGSSFLQEGQRKAGAAVTTETEVIWARALPAGTSAQRAELIALTQALKMAEGKKLNVYTDSRYAFATAHIHGEIYRRRGWLTSEGKEIKNKDEILALLKALFLPKRLSIIHCPGHQKGNSAEARGNRMADQAAREVATRETPETSTLLAGKRTADGSEFEKRTADGSEFESPKKKAKVE

SEQ ID NO: 2369 - protein, 2095 aa, synthetic construct
  source 1..2095: note = Description of Artificial Sequence: Synthetic polypeptide
MPAAKRVKLDGGDKKYSIGLDIGTNSVGWAVITDEYKVPSKKFKVLGNTDRHSIKKNLIGALLFDSGETAEATRLKRTARRRYTRRKNRICYLQEIFSNEMAKVDDSFFHRLEESFLVEEDKKHERHPIFGNIVDEVAYHEKYPTIYHLRKKLVDSTDKADLRLIYLALAHMIKFRGHFLIEGDLNPDNSDVDKLFIQLVQTYNQLFEENPINASGVDAKAILSARLSKSRRLENLIAQLPGEKKNGLFGNLIALSLGLTPNFKSNFDLAEDAKLQLSKDTYDDDLDNLLAQIGDQYADLFLAAKNLSDAILLSDILRVNTEITKAPLSASMIKRYDEHHQDLTLLKALVRQQLPEKYKEIFFDQSKNGYAGYIDGGASQEEFYKFIKPILEKMDGTEELLVKLNREDLLRKQRTFDNGSIPHQIHLGELHAILRRQEDFYPFLKDNREKIEKILTFRIPYYVGPLARGNSRFAWMTRKSEETITPWNFEEVVDKGASAQSFIERMTNFDKNLPNEKVLPKHSLLYEYFTVYNELTKVKYVTEGMRKPAFLSGEQKKAIVDLLFKTNRKVTVKQLKEDYFKKIECFDSVEISGVEDRFNASLGTYHDLLKIIKDKDFLDNEENEDILEDIVLTLTLFEDREMIEERLKTYAHLFDDKVMKQLKRRRYTGWGRLSRKLINGIRDKQSGKTILDFLKSDGFANRNFMQLIHDDSLTFKEDIQKAQVSGQGDSLHEHIANLAGSPAIKKGILQTVKVVDELVKVMGRHKPENIVIEMARENQTTQKGQKNSRERMKRIEEGIKELGSQILKEHPVENTQLQNEKLYLYYLQNGRDMYVDQELDINRLSDYDVDHIVPQSFLKDDSIDNKVLTRSDKARGKSDNVPSEEVVKKMKNYWRQLLNAKLITQRKFDNLTKAERGGLSELDKAGFIKRQLVETRQITKHVAQILDSRMNTKYDENDKLIREVKVITLKSKLVSDFRKDFQFYKVREINNYHHAHDAYLNAVVGTALIKKYPKLESEFVYGDYKVYDVRKMIAKSEQEIGKATAKYFFYSNIMNFFKTEITLANGEIRKRPLIETNGETGEIVWDKGRDFATVRKVLSMPQVNIVKKTEVQTGGFSKESILPKRNSDKLIARKKDWDPKKYGGFDSPTVAYSVLVVAKVEKGKSKKLKSVKELLGITIMERSSFEKNPIDFLEAKGYKEVKKDLIIKLPKYSLFELENGRKRMLASAGELQKGNELALPSKYVNFLYLASHYEKLKGSPEDNEQKQLFVEQHKHYLDEIIEQISEFSKRVILADANLDKVLSAYNKHRDKPIREQAENIIHLFTLTNLGAPAAFKYFDTTIDRKRYTSTKEVLDATLIHQSITGLYETRIDLSQLGGDGGGGGGSGGGGSGGTLNIEDEYRLHETSKEPDVSLGSTWLSDFPQAWAETGGMGLAVRQAPLIIPLKATSTPVSIKQYPMSQEARLGIKPHIQRLLDQGILVPCQSPWNTPLLPVKKPGTNDYRPVQDLREVNKRVEDIHPTVPNPYNLLSGLPPSHQWYTVLDLKDAFFCLRLHPTSQPLFAFEWRDPEMGISGQLTWTRLPQGFKNSPTLFNEALHRDLAGFRIQHPDLILLQYVDDLLLAATSELDCQQGTRALLQTLGDLGYRASAKKAQICQKQVKYLGYLLKEGQRWLTEARKETVMGQPIPKTPRQLREFLGKAGFCRLFIPGFAEMAAPLYPLTKPGTLFNWGPDQQKAFQEIKQALLTAPALGLPDLTKPFELFVDEKQGYAKGVLTQKLGPWRRPVAYLSKKLDPVAAGWPPCLRMVAAIAVLTKDAGKLTMGQPLVILAPHAVEALVKQPPDRWLSNARMTHYQALLLDTDRVQFGPVVALNPATLLPLPEEGLQHDCLDILAEAHGTRSDLMDQPLPDADHTWYTDGSSFLQEGQRKAGAAVTTETEVIWARALPAGTSAQRAELIALTQALKMAEGKKLNVYTDSRYAFATAHIHGEIYRRRGWLTSEGKEIKNKDEILALLKALFLPKRLSIIHCPGHQKGNSAEARGNRMADQAAREVATRETPETSTLLAGKRTADGSEFEKRTADGSEFESPKKKAKVE

SEQ ID NO: 2370 - protein, 2096 aa, synthetic construct
  source 1..2096: note = Description of Artificial Sequence: Synthetic polypeptide
MPAAKRVKLDGGDKKYSIGLDIGTNSVGWAVITDEYKVPSKKFKVLGNTDRHSIKKNLIGALLFDSGETAEATRLKRTARRRYTRRKNRICYLQEIFSNEMAKVDDSFFHRLEESFLVEEDKKHERHPIFGNIVDEVAYHEKYPTIYHLRKKLVDSTDKADLRLIYLALAHMIKFRGHFLIEGDLNPDNSDVDKLFIQLVQTYNQLFEENPINASGVDAKAILSARLSKSRRLENLIAQLPGEKKNGLFGNLIALSLGLTPNFKSNFDLAEDAKLQLSKDTYDDDLDNLLAQIGDQYADLFLAAKNLSDAILLSDILRVNTEITKAPLSASMIKRYDEHHQDLTLLKALVRQQLPEKYKEIFFDQSKNGYAGYIDGGASQEEFYKFIKPILEKMDGTEELLVKLNREDLLRKQRTFDNGSIPHQIHLGELHAILRRQEDFYPFLKDNREKIEKILTFRIPYYVGPLARGNSRFAWMTRKSEETITPWNFEEVVDKGASAQSFIERMTNFDKNLPNEKVLPKHSLLYEYFTVYNELTKVKYVTEGMRKPAFLSGEQKKAIVDLLFKTNRKVTVKQLKEDYFKKIECFDSVEISGVEDRFNASLGTYHDLLKIIKDKDFLDNEENEDILEDIVLTLTLFEDREMIEERLKTYAHLFDDKVMKQLKRRRYTGWGRLSRKLINGIRDKQSGKTILDFLKSDGFANRNFMQLIHDDSLTFKEDIQKAQVSGQGDSLHEHIANLAGSPAIKKGILQTVKVVDELVKVMGRHKPENIVIEMARENQTTQKGQKNSRERMKRIEEGIKELGSQILKEHPVENTQLQNEKLYLYYLQNGRDMYVDQELDINRLSDYDVDHIVPQSFLKDDSIDNKVLTRSDKARGKSDNVPSEEVVKKMKNYWRQLLNAKLITQRKFDNLTKAERGGLSELDKAGFIKRQLVETRQITKHVAQILDSRMNTKYDENDKLIREVKVITLKSKLVSDFRKDFQFYKVREINNYHHAHDAYLNAVVGTALIKKYPKLESEFVYGDYKVYDVRKMIAKSEQEIGKATAKYFFYSNIMNFFKTEITLANGEIRKRPLIETNGETGEIVWDKGRDFATVRKVLSMPQVNIVKKTEVQTGGFSKESILPKRNSDKLIARKKDWDPKKYGGFDSPTVAYSVLVVAKVEKGKSKKLKSVKELLGITIMERSSFEKNPIDFLEAKGYKEVKKDLIIKLPKYSLFELENGRKRMLASAGELQKGNELALPSKYVNFLYLASHYEKLKGSPEDNEQKQLFVEQHKHYLDEIIEQISEFSKRVILADANLDKVLSAYNKHRDKPIREQAENIIHLFTLTNLGAPAAFKYFDTTIDRKRYTSTKEVLDATLIHQSITGLYETRIDLSQLGGDGGEAAAKGGSGSSGGTLNIEDEYRLHETSKEPDVSLGSTWLSDFPQAWAETGGMGLAVRQAPLIIPLKATSTPVSIKQYPMSQEARLGIKPHIQRLLDQGILVPCQSPWNTPLLPVKKPGTNDYRPVQDLREVNKRVEDIHPTVPNPYNLLSGLPPSHQWYTVLDLKDAFFCLRLHPTSQPLFAFEWRDPEMGISGQLTWTRLPQGFKNSPTLFNEALHRDLAGFRIQHPDLILLQYVDDLLLAATSELDCQQGTRALLQTLGDLGYRASAKKAQICQKQVKYLGYLLKEGQRWLTEARKETVMGQPIPKTPRQLREFLGKAGFCRLFIPGFAEMAAPLYPLTKPGTLFNWGPDQQKAFQEIKQALLTAPALGLPDLTKPFELFVDEKQGYAKGVLTQKLGPWRRPVAYLSKKLDPVAAGWPPCLRMVAAIAVLTKDAGKLTMGQPLVILAPHAVEALVKQPPDRWLSNARMTHYQALLLDTDRVQFGPVVALNPATLLPLPEEGLQHDCLDILAEAHGTRSDLMDQPLPDADHTWYTDGSSFLQEGQRKAGAAVTTETEVIWARALPAGTSAQRAELIALTQALKMAEGKKLNVYTDSRYAFATAHIHGEIYRRRGWLTSEGKEIKNKDEILALLKALFLPKRLSIIHCPGHQKGNSAEARGNRMADQAAREVATRETPETSTLLAGKRTADGSEFEKRTADGSEFESPKKKAKVE

SEQ ID NO: 2371 - protein, 2094 aa, synthetic construct
  source 1..2094: note = Description of Artificial Sequence: Synthetic polypeptide
MPAAKRVKLDGGDKKYSIGLDIGTNSVGWAVITDEYKVPSKKFKVLGNTDRHSIKKNLIGALLFDSGETAEATRLKRTARRRYTRRKNRICYLQEIFSNEMAKVDDSFFHRLEESFLVEEDKKHERHPIFGNIVDEVAYHEKYPTIYHLRKKLVDSTDKADLRLIYLALAHMIKFRGHFLIEGDLNPDNSDVDKLFIQLVQTYNQLFEENPINASGVDAKAILSARLSKSRRLENLIAQLPGEKKNGLFGNLIALSLGLTPNFKSNFDLAEDAKLQLSKDTYDDDLDNLLAQIGDQYADLFLAAKNLSDAILLSDILRVNTEITKAPLSASMIKRYDEHHQDLTLLKALVRQQLPEKYKEIFFDQSKNGYAGYIDGGASQEEFYKFIKPILEKMDGTEELLVKLNREDLLRKQRTFDNGSIPHQIHLGELHAILRRQEDFYPFLKDNREKIEKILTFRIPYYVGPLARGNSRFAWMTRKSEETITPWNFEEVVDKGASAQSFIERMTNFDKNLPNEKVLPKHSLLYEYFTVYNELTKVKYVTEGMRKPAFLSGEQKKAIVDLLFKTNRKVTVKQLKEDYFKKIECFDSVEISGVEDRFNASLGTYHDLLKIIKDKDFLDNEENEDILEDIVLTLTLFEDREMIEERLKTYAHLFDDKVMKQLKRRRYTGWGRLSRKLINGIRDKQSGKTILDFLKSDGFANRNFMQLIHDDSLTFKEDIQKAQVSGQGDSLHEHIANLAGSPAIKKGILQTVKVVDELVKVMGRHKPENIVIEMARENQTTQKGQKNSRERMKRIEEGIKELGSQILKEHPVENTQLQNEKLYLYYLQNGRDMYVDQELDINRLSDYDVDHIVPQSFLKDDSIDNKVLTRSDKARGKSDNVPSEEVVKKMKNYWRQLLNAKLITQRKFDNLTKAERGGLSELDKAGFIKRQLVETRQITKHVAQILDSRMNTKYDENDKLIREVKVITLKSKLVSDFRKDFQFYKVREINNYHHAHDAYLNAVVGTALIKKYPKLESEFVYGDYKVYDVRKMIAKSEQEIGKATAKYFFYSNIMNFFKTEITLANGEIRKRPLIETNGETGEIVWDKGRDFATVRKVLSMPQVNIVKKTEVQTGGFSKESILPKRNSDKLIARKKDWDPKKYGGFDSPTVAYSVLVVAKVEKGKSKKLKSVKELLGITIMERSSFEKNPIDFLEAKGYKEVKKDLIIKLPKYSLFELENGRKRMLASAGELQKGNELALPSKYVNFLYLASHYEKLKGSPEDNEQKQLFVEQHKHYLDEIIEQISEFSKRVILADANLDKVLSAYNKHRDKPIREQAENIIHLFTLTNLGAPAAFKYFDTTIDRKRYTSTKEVLDATLIHQSITGLYETRIDLSQLGGDGGGGSGGGGSSGGTLNIEDEYRLHETSKEPDVSLGSTWLSDFPQAWAETGGMGLAVRQAPLIIPLKATSTPVSIKQYPMSQEARLGIKPHIQRLLDQGILVPCQSPWNTPLLPVKKPGTNDYRPVQDLREVNKRVEDIHPTVPNPYNLLSGLPPSHQWYTVLDLKDAFFCLRLHPTSQPLFAFEWRDPEMGISGQLTWTRLPQGFKNSPTLFNEALHRDLAGFRIQHPDLILLQYVDDLLLAATSELDCQQGTRALLQTLGDLGYRASAKKAQICQKQVKYLGYLLKEGQRWLTEARKETVMGQPIPKTPRQLREFLGKAGFCRLFIPGFAEMAAPLYPLTKPGTLFNWGPDQQKAFQEIKQALLTAPALGLPDLTKPFELFVDEKQGYAKGVLTQKLGPWRRPVAYLSKKLDPVAAGWPPCLRMVAAIAVLTKDAGKLTMGQPLVILAPHAVEALVKQPPDRWLSNARMTHYQALLLDTDRVQFGPVVALNPATLLPLPEEGLQHDCLDILAEAHGTRSDLMDQPLPDADHTWYTDGSSFLQEGQRKAGAAVTTETEVIWARALPAGTSAQRAELIALTQALKMAEGKKLNVYTDSRYAFATAHIHGEIYRRRGWLTSEGKEIKNKDEILALLKALFLPKRLSIIHCPGHQKGNSAEARGNRMADQAAREVATRETPETSTLLAGKRTADGSEFEKRTADGSEFESPKKKAKVE

SEQ ID NO: 2372 - protein, 2096 aa, synthetic construct
  source 1..2096: note = Description of Artificial Sequence: Synthetic polypeptide
MPAAKRVKLDGGDKKYSIGLDIGTNSVGWAVITDEYKVPSKKFKVLGNTDRHSIKKNLIGALLFDSGETAEATRLKRTARRRYTRRKNRICYLQEIFSNEMAKVDDSFFHRLEESFLVEEDKKHERHPIFGNIVDEVAYHEKYPTIYHLRKKLVDSTDKADLRLIYLALAHMIKFRGHFLIEGDLNPDNSDVDKLFIQLVQTYNQLFEENPINASGVDAKAILSARLSKSRRLENLIAQLPGEKKNGLFGNLIALSLGLTPNFKSNFDLAEDAKLQLSKDTYDDDLDNLLAQIGDQYADLFLAAKNLSDAILLSDILRVNTEITKAPLSASMIKRYDEHHQDLTLLKALVRQQLPEKYKEIFFDQSKNGYAGYIDGGASQEEFYKFIKPILEKMDGTEELLVKLNREDLLRKQRTFDNGSIPHQIHLGELHAILRRQEDFYPFLKDNREKIEKILTFRIPYYVGPLARGNSRFAWMTRKSEETITPWNFEEVVDKGASAQSFIERMTNFDKNLPNEKVLPKHSLLYEYFTVYNELTKVKYVTEGMRKPAFLSGEQKKAIVDLLFKTNRKVTVKQLKEDYFKKIECFDSVEISGVEDRFNASLGTYHDLLKIIKDKDFLDNEENEDILEDIVLTLTLFEDREMIEERLKTYAHLFDDKVMKQLKRRRYTGWGRLSRKLINGIRDKQSGKTILDFLKSDGFANRNFMQLIHDDSLTFKEDIQKAQVSGQGDSLHEHIANLAGSPAIKKGILQTVKVVDELVKVMGRHKPENIVIEMARENQTTQKGQKNSRERMKRIEEGIKELGSQILKEHPVENTQLQNEKLYLYYLQNGRDMYVDQELDINRLSDYDVDHIVPQSFLKDDSIDNKVLTRSDKARGKSDNVPSEEVVKKMKNYWRQLLNAKLITQRKFDNLTKAERGGLSELDKAGFIKRQLVETRQITKHVAQILDSRMNTKYDENDKLIREVKVITLKSKLVSDFRKDFQFYKVREINNYHHAHDAYLNAVVGTALIKKYPKLESEFVYGDYKVYDVRKMIAKSEQEIGKATAKYFFYSNIMNFFKTEITLANGEIRKRPLIETNGETGEIVWDKGRDFATVRKVLSMPQVNIVKKTEVQTGGFSKESILPKRNSDKLIARKKDWDPKKYGGFDSPTVAYSVLVVAKVEKGKSKKLKSVKELLGITIMERSSFEKNPIDFLEAKGYKEVKKDLIIKLPKYSLFELENGRKRMLASAGELQKGNELALPSKYVNFLYLASHYEKLKGSPEDNEQKQLFVEQHKHYLDEIIEQISEFSKRVILADANLDKVLSAYNKHRDKPIREQAENIIHLFTLTNLGAPAAFKYFDTTIDRKRYTSTKEVLDATLIHQSITGLYETRIDLSQLGGDGGEAAAKGGSPAPGGTLNIEDEYRLHETSKEPDVSLGSTWLSDFPQAWAETGGMGLAVRQAPLIIPLKATSTPVSIKQYPMSQEARLGIKPHIQRLLDQGILVPCQSPWNTPLLPVKKPGTNDYRPVQDLREVNKRVEDIHPTVPNPYNLLSGLPPSHQWYTVLDLKDAFFCLRLHPTSQPLFAFEWRDPEMGISGQLTWTRLPQGFKNSPTLFNEALHRDLAGFRIQHPDLILLQYVDDLLLAATSELDCQQGTRALLQTLGDLGYRASAKKAQICQKQVKYLGYLLKEGQRWLTEARKETVMGQPIPKTPRQLREFLGKAGFCRLFIPGFAEMAAPLYPLTKPGTLFNWGPDQQKAFQEIKQALLTAPALGLPDLTKPFELFVDEKQGYAKGVLTQKLGPWRRPVAYLSKKLDPVAAGWPPCLRMVAAIAVLTKDAGKLTMGQPLVILAPHAVEALVKQPPDRWLSNARMTHYQALLLDTDRVQFGPVVALNPATLLPLPEEGLQHDCLDILAEAHGTRSDLMDQPLPDADHTWYTDGSSFLQEGQRKAGAAVTTETEVIWARALPAGTSAQRAELIALTQALKMAEGKKLNVYTDSRYAFATAHIHGEIYRRRGWLTSEGKEIKNKDEILALLKALFLPKRLSIIHCPGHQKGNSAEARGNRMADQAAREVATRETPETSTLLAGKRTADGSEFEKRTADGSEFESPKKKAKVE

SEQ ID NO: 2373 - protein, 2100 aa, synthetic construct
  source 1..2100: note = Description of Artificial Sequence: Synthetic polypeptide
MPAAKRVKLDGGDKKYSIGLDIGTNSVGWAVITDEYKVPSKKFKVLGNTDRHSIKKNLIGALLFDSGETAEATRLKRTARRRYTRRKNRICYLQEIFSNEMAKVDDSFFHRLEESFLVEEDKKHERHPIFGNIVDEVAYHEKYPTIYHLRKKLVDSTDKADLRLIYLALAHMIKFRGHFLIEGDLNPDNSDVDKLFIQLVQTYNQLFEENPINASGVDAKAILSARLSKSRRLENLIAQLPGEKKNGLFGNLIALSLGLTPNFKSNFDLAEDAKLQLSKDTYDDDLDNLLAQIGDQYADLFLAAKNLSDAILLSDILRVNTEITKAPLSASMIKRYDEHHQDLTLLKALVRQQLPEKYKEIFFDQSKNGYAGYIDGGASQEEFYKFIKPILEKMDGTEELLVKLNREDLLRKQRTFDNGSIPHQIHLGELHAILRRQEDFYPFLKDNREKIEKILTFRIPYYVGPLARGNSRFAWMTRKSEETITPWNFEEVVDKGASAQSFIERMTNFDKNLPNEKVLPKHSLLYEYFTVYNELTKVKYVTEGMRKPAFLSGEQKKAIVDLLFKTNRKVTVKQLKEDYFKKIECFDSVEISGVEDRFNASLGTYHDLLKIIKDKDFLDNEENEDILEDIVLTLTLFEDREMIEERLKTYAHLFDDKVMKQLKRRRYTGWGRLSRKLINGIRDKQSGKTILDFLKSDGFANRNFMQLIHDDSLTFKEDIQKAQVSGQGDSLHEHIANLAGSPAIKKGILQTVKVVDELVKVMGRHKPENIVIEMARENQTTQKGQKNSRERMKRIEEGIKELGSQILKEHPVENTQLQNEKLYLYYLQNGRDMYVDQELDINRLSDYDVDHIVPQSFLKDDSIDNKVLTRSDKARGKSDNVPSEEVVKKMKNYWRQLLNAKLITQRKFDNLTKAERGGLSELDKAGFIKRQLVETRQITKHVAQILDSRMNTKYDENDKLIREVKVITLKSKLVSDFRKDFQFYKVREINNYHHAHDAYLNAVVGTALIKKYPKLESEFVYGDYKVYDVRKMIAKSEQEIGKATAKYFFYSNIMNFFKTEITLANGEIRKRPLIETNGETGEIVWDKGRDFATVRKVLSMPQVNIVKKTEVQTGGFSKESILPKRNSDKLIARKKDWDPKKYGGFDSPTVAYSVLVVAKVEKGKSKKLKSVKELLGITIMERSSFEKNPIDFLEAKGYKEVKKDLIIKLPKYSLFELENGRKRMLASAGELQKGNELALPSKYVNFLYLASHYEKLKGSPEDNEQKQLFVEQHKHYLDEIIEQISEFSKRVILADANLDKVLSAYNKHRDKPIREQAENIIHLFTLTNLGAPAAFKYFDTTIDRKRYTSTKEVLDATLIHQSITGLYETRIDLSQLGGDGGEAAAKEAAAKEAAAKGGTLNIEDEYRLHETSKEPDVSLGSTWLSDFPQAWAETGGMGLAVRQAPLIIPLKATSTPVSIKQYPMSQEARLGIKPHIQRLLDQGILVPCQSPWNTPLLPVKKPGTNDYRPVQDLREVNKRVEDIHPTVPNPYNLLSGLPPSHQWYTVLDLKDAFFCLRLHPTSQPLFAFEWRDPEMGISGQLTWTRLPQGFKNSPTLFNEALHRDLAGFRIQHPDLILLQYVDDLLLAATSELDCQQGTRALLQTLGDLGYRASAKKAQICQKQVKYLGYLLKEGQRWLTEARKETVMGQPIPKTPRQLREFLGKAGFCRLFIPGFAEMAAPLYPLTKPGTLFNWGPDQQKAFQEIKQALLTAPALGLPDLTKPFELFVDEKQGYAKGVLTQKLGPWRRPVAYLSKKLDPVAAGWPPCLRMVAAIAVLTKDAGKLTMGQPLVILAPHAVEALVKQPPDRWLSNARMTHYQALLLDTDRVQFGPVVALNPATLLPLPEEGLQHDCLDILAEAHGTRSDLMDQPLPDADHTWYTDGSSFLQEGQRKAGAAVTTETEVIWARALPAGTSAQRAELIALTQALKMAEGKKLNVYTDSRYAFATAHIHGEIYRRRGWLTSEGKEIKNKDEILALLKALFLPKRLSIIHCPGHQKGNSAEARGNRMADQAAREVATRETPETSTLLAGKRTADGSEFEKRTADGSEFESPKKKAKVE

SEQ ID NO: 2374 - protein, 2100 aa, synthetic construct
  source 1..2100: note = Description of Artificial Sequence: Synthetic polypeptide
MPAAKRVKLDGGDKKYSIGLDIGTNSVGWAVITDEYKVPSKKFKVLGNTDRHSIKKNLIGALLFDSGETAEATRLKRTARRRYTRRKNRICYLQEIFSNEMAKVDDSFFHRLEESFLVEEDKKHERHPIFGNIVDEVAYHEKYPTIYHLRKKLVDSTDKADLRLIYLALAHMIKFRGHFLIEGDLNPDNSDVDKLFIQLVQTYNQLFEENPINASGVDAKAILSARLSKSRRLENLIAQLPGEKKNGLFGNLIALSLGLTPNFKSNFDLAEDAKLQLSKDTYDDDLDNLLAQIGDQYADLFLAAKNLSDAILLSDILRVNTEITKAPLSASMIKRYDEHHQDLTLLKALVRQQLPEKYKEIFFDQSKNGYAGYIDGGASQEEFYKFIKPILEKMDGTEELLVKLNREDLLRKQRTFDNGSIPHQIHLGELHAILRRQEDFYPFLKDNREKIEKILTFRIPYYVGPLARGNSRFAWMTRKSEETITPWNFEEVVDKGASAQSFIERMTNFDKNLPNEKVLPKHSLLYEYFTVYNELTKVKYVTEGMRKPAFLSGEQKKAIVDLLFKTNRKVTVKQLKEDYFKKIECFDSVEISGVEDRFNASLGTYHDLLKIIKDKDFLDNEENEDILEDIVLTLTLFEDREMIEERLKTYAHLFDDKVMKQLKRRRYTGWGRLSRKLINGIRDKQSGKTILDFLKSDGFANRNFMQLIHDDSLTFKEDIQKAQVSGQGDSLHEHIANLAGSPAIKKGILQTVKVVDELVKVMGRHKPENIVIEMARENQTTQKGQKNSRERMKRIEEGIKELGSQILKEHPVENTQLQNEKLYLYYLQNGRDMYVDQELDINRLSDYDVDHIVPQSFLKDDSIDNKVLTRSDKARGKSDNVPSEEVVKKMKNYWRQLLNAKLITQRKFDNLTKAERGGLSELDKAGFIKRQLVETRQITKHVAQILDSRMNTKYDENDKLIREVKVITLKSKLVSDFRKDFQFYKVREINNYHHAHDAYLNAVVGTALIKKYPKLESEFVYGDYKVYDVRKMIAKSEQEIGKATAKYFFYSNIMNFFKTEITLANGEIRKRPLIETNGETGEIVWDKGRDFATVRKVLSMPQVNIVKKTEVQTGGFSKESILPKRNSDKLIARKKDWDPKKYGGFDSPTVAYSVLVVAKVEKGKSKKLKSVKELLGITIMERSSFEKNPIDFLEAKGYKEVKKDLIIKLPKYSLFELENGRKRMLASAGELQKGNELALPSKYVNFLYLASHYEKLKGSPEDNEQKQLFVEQHKHYLDEIIEQISEFSKRVILADANLDKVLSAYNKHRDKPIREQAENIIHLFTLTNLGAPAAFKYFDTTIDRKRYTSTKEVLDATLIHQSITGLYETRIDLSQLGGDGGGGGGSEAAAKGGGGSGGTLNIEDEYRLHETSKEPDVSLGSTWLSDFPQAWAETGGMGLAVRQAPLIIPLKATSTPVSIKQYPMSQEARLGIKPHIQRLLDQGILVPCQSPWNTPLLPVKKPGTNDYRPVQDLREVNKRVEDIHPTVPNPYNLLSGLPPSHQWYTVLDLKDAFFCLRLHPTSQPLFAFEWRDPEMGISGQLTWTRLPQGFKNSPTLFNEALHRDLAGFRIQHPDLILLQYVDDLLLAATSELDCQQGTRALLQTLGDLGYRASAKKAQICQKQVKYLGYLLKEGQRWLTEARKETVMGQPIPKTPRQLREFLGKAGFCRLFIPGFAEMAAPLYPLTKPGTLFNWGPDQQKAFQEIKQALLTAPALGLPDLTKPFELFVDEKQGYAKGVLTQKLGPWRRPVAYLSKKLDPVAAGWPPCLRMVAAIAVLTKDAGKLTMGQPLVILAPHAVEALVKQPPDRWLSNARMTHYQALLLDTDRVQFGPVVALNPATLLPLPEEGLQHDCLDILAEAHGTRSDLMDQPLPDADHTWYTDGSSFLQEGQRKAGAAVTTETEVIWARALPAGTSAQRAELIALTQALKMAEGKKLNVYTDSRYAFATAHIHGEIYRRRGWLTSEGKEIKNKDEILALLKALFLPKRLSIIHCPGHQKGNSAEARGNRMADQAAREVATRETPETSTLLAGKRTADGSEFEKRTADGSEFESPKKKAKVE

SEQ ID NO: 2375 - protein, 2088 aa, synthetic construct
  source 1..2088: note = Description of Artificial Sequence: Synthetic polypeptide
MPAAKRVKLDGGDKKYSIGLDIGTNSVGWAVITDEYKVPSKKFKVLGNTDRHSIKKNLIGALLFDSGETAEATRLKRTARRRYTRRKNRICYLQEIFSNEMAKVDDSFFHRLEESFLVEEDKKHERHPIFGNIVDEVAYHEKYPTIYHLRKKLVDSTDKADLRLIYLALAHMIKFRGHFLIEGDLNPDNSDVDKLFIQLVQTYNQLFEENPINASGVDAKAILSARLSKSRRLENLIAQLPGEKKNGLFGNLIALSLGLTPNFKSNFDLAEDAKLQLSKDTYDDDLDNLLAQIGDQYADLFLAAKNLSDAILLSDILRVNTEITKAPLSASMIKRYDEHHQDLTLLKALVRQQLPEKYKEIFFDQSKNGYAGYIDGGASQEEFYKFIKPILEKMDGTEELLVKLNREDLLRKQRTFDNGSIPHQIHLGELHAILRRQEDFYPFLKDNREKIEKILTFRIPYYVGPLARGNSRFAWMTRKSEETITPWNFEEVVDKGASAQSFIERMTNFDKNLPNEKVLPKHSLLYEYFTVYNELTKVKYVTEGMRKPAFLSGEQKKAIVDLLFKTNRKVTVKQLKEDYFKKIECFDSVEISGVEDRFNASLGTYHDLLKIIKDKDFLDNEENEDILEDIVLTLTLFEDREMIEERLKTYAHLFDDKVMKQLKRRRYTGWGRLSRKLINGIRDKQSGKTILDFLKSDGFANRNFMQLIHDDSLTFKEDIQKAQVSGQGDSLHEHIANLAGSPAIKKGILQTVKVVDELVKVMGRHKPENIVIEMARENQTTQKGQKNSRERMKRIEEGIKELGSQILKEHPVENTQLQNEKLYLYYLQNGRDMYVDQELDINRLSDYDVDHIVPQSFLKDDSIDNKVLTRSDKARGKSDNVPSEEVVKKMKNYWRQLLNAKLITQRKFDNLTKAERGGLSELDKAGFIKRQLVETRQITKHVAQILDSRMNTKYDENDKLIREVKVITLKSKLVSDFRKDFQFYKVREINNYHHAHDAYLNAVVGTALIKKYPKLESEFVYGDYKVYDVRKMIAKSEQEIGKATAKYFFYSNIMNFFKTEITLANGEIRKRPLIETNGETGEIVWDKGRDFATVRKVLSMPQVNIVKKTEVQTGGFSKESILPKRNSDKLIARKKDWDPKKYGGFDSPTVAYSVLVVAKVEKGKSKKLKSVKELLGITIMERSSFEKNPIDFLEAKGYKEVKKDLIIKLPKYSLFELENGRKRMLASAGELQKGNELALPSKYVNFLYLASHYEKLKGSPEDNEQKQLFVEQHKHYLDEIIEQISEFSKRVILADANLDKVLSAYNKHRDKPIREQAENIIHLFTLTNLGAPAAFKYFDTTIDRKRYTSTKEVLDATLIHQSITGLYETRIDLSQLGGDGGGGGGGTLNIEDEYRLHETSKEPDVSLGSTWLSDFPQAWAETGGMGLAVRQAPLIIPLKATSTPVSIKQYPMSQEARLGIKPHIQRLLDQGILVPCQSPWNTPLLPVKKPGTNDYRPVQDLREVNKRVEDIHPTVPNPYNLLSGLPPSHQWYTVLDLKDAFFCLRLHPTSQPLFAFEWRDPEMGISGQLTWTRLPQGFKNSPTLFNEALHRDLAGFRIQHPDLILLQYVDDLLLAATSELDCQQGTRALLQTLGDLGYRASAKKAQICQKQVKYLGYLLKEGQRWLTEARKETVMGQPIPKTPRQLREFLGKAGFCRLFIPGFAEMAAPLYPLTKPGTLFNWGPDQQKAFQEIKQALLTAPALGLPDLTKPFELFVDEKQGYAKGVLTQKLGPWRRPVAYLSKKLDPVAAGWPPCLRMVAAIAVLTKDAGKLTMGQPLVILAPHAVEALVKQPPDRWLSNARMTHYQALLLDTDRVQFGPVVALNPATLLPLPEEGLQHDCLDILAEAHGTRSDLMDQPLPDADHTWYTDGSSFLQEGQRKAGAAVTTETEVIWARALPAGTSAQRAELIALTQALKMAEGKKLNVYTDSRYAFATAHIHGEIYRRRGWLTSEGKEIKNKDEILALLKALFLPKRLSIIHCPGHQKGNSAEARGNRMADQAAREVATRETPETSTLLAGKRTADGSEFEKRTADGSEFESPKKKAKVE

SEQ ID NO: 2376 - protein, 2118 aa, synthetic construct
  source 1..2118: note = Description of Artificial Sequence: Synthetic polypeptide
MPAAKRVKLDGGDKKYSIGLDIGTNSVGWAVITDEYKVPSKKFKVLGNTDRHSIKKNLIGALLFDSGETAEATRLKRTARRRYTRRKNRICYLQEIFSNEMAKVDDSFFHRLEESFLVEEDKKHERHPIFGNIVDEVAYHEKYPTIYHLRKKLVDSTDKADLRLIYLALAHMIKFRGHFLIEGDLNPDNSDVDKLFIQLVQTYNQLFEENPINASGVDAKAILSARLSKSRRLENLIAQLPGEKKNGLFGNLIALSLGLTPNFKSNFDLAEDAKLQLSKDTYDDDLDNLLAQIGDQYADLFLAAKNLSDAILLSDILRVNTEITKAPLSASMIKRYDEHHQDLTLLKALVRQQLPEKYKEIFFDQSKNGYAGYIDGGASQEEFYKFIKPILEKMDGTEELLVKLNREDLLRKQRTFDNGSIPHQIHLGELHAILRRQEDFYPFLKDNREKIEKILTFRIPYYVGPLARGNSRFAWMTRKSEETITPWNFEEVVDKGASAQSFIERMTNFDKNLPNEKVLPKHSLLYEYFTVYNELTKVKYVTEGMRKPAFLSGEQKKAIVDLLFKTNRKVTVKQLKEDYFKKIECFDSVEISGVEDRFNASLGTYHDLLKIIKDKDFLDNEENEDILEDIVLTLTLFEDREMIEERLKTYAHLFDDKVMKQLKRRRYTGWGRLSRKLINGIRDKQSGKTILDFLKSDGFANRNFMQLIHDDSLTFKEDIQKAQVSGQGDSLHEHIANLAGSPAIKKGILQTVKVVDELVKVMGRHKPENIVIEMARENQTTQKGQKNSRERMKRIEEGIKELGSQILKEHPVENTQLQNEKLYLYYLQNGRDMYVDQELDINRLSDYDVDHIVPQSFLKDDSIDNKVLTRSDKARGKSDNVPSEEVVKKMKNYWRQLLNAKLITQRKFDNLTKAERGGLSELDKAGFIKRQLVETRQITKHVAQILDSRMNTKYDENDKLIREVKVITLKSKLVSDFRKDFQFYKVREINNYHHAHDAYLNAVVGTALIKKYPKLESEFVYGDYKVYDVRKMIAKSEQEIGKATAKYFFYSNIMNFFKTEITLANGEIRKRPLIETNGETGEIVWDKGRDFATVRKVLSMPQVNIVKKTEVQTGGFSKESILPKRNSDKLIARKKDWDPKKYGGFDSPTVAYSVLVVAKVEKGKSKKLKSVKELLGITIMERSSFEKNPIDFLEAKGYKEVKKDLIIKLPKYSLFELENGRKRMLASAGELQKGNELALPSKYVNFLYLASHYEKLKGSPEDNEQKQLFVEQHKHYLDEIIEQISEFSKRVILADANLDKVLSAYNKHRDKPIREQAENIIHLFTLTNLGAPAAFKYFDTTIDRKRYTSTKEVLDATLIHQSITGLYETRIDLSQLGGDGGSGGSSGGSSGSETPGTSESATPESSGGSSGGSSGGTLNIEDEYRLHETSKEPDVSLGSTWLSDFPQAWAETGGMGLAVRQAPLIIPLKATSTPVSIKQYPMSQEARLGIKPHIQRLLDQGILVPCQSPWNTPLLPVKKPGTNDYRPVQDLREVNKRVEDIHPTVPNPYNLLSGLPPSHQWYTVLDLKDAFFCLRLHPTSQPLFAFEWRDPEMGISGQLTWTRLPQGFKNSPTLFNEALHRDLAGFRIQHPDLILLQYVDDLLLAATSELDCQQGTRALLQTLGDLGYRASAKKAQICQKQVKYLGYLLKEGQRWLTEARKETVMGQPIPKTPRQLREFLGKAGFCRLFIPGFAEMAAPLYPLTKPGTLFNWGPDQQKAFQEIKQALLTAPALGLPDLTKPFELFVDEKQGYAKGVLTQKLGPWRRPVAYLSKKLDPVAAGWPPCLRMVAAIAVLTKDAGKLTMGQPLVILAPHAVEALVKQPPDRWLSNARMTHYQALLLDTDRVQFGPVVALNPATLLPLPEEGLQHDCLDILAEAHGTRSDLMDQPLPDADHTWYTDGSSFLQEGQRKAGAAVTTETEVIWARALPAGTSAQRAELIALTQALKMAEGKKLNVYTDSRYAFATAHIHGEIYRRRGWLTSEGKEIKNKDEILALLKALFLPKRLSIIHCPGHQKGNSAEARGNRMADQAAREVATRETPETSTLLAGKRTADGSEFEKRTADGSEFESPKKKAKVE

SEQ ID NO: 2377 - protein, 2096 aa, synthetic construct
  source 1..2096: note = Description of Artificial Sequence: Synthetic polypeptide
MPAAKRVKLDGGDKKYSIGLDIGTNSVGWAVITDEYKVPSKKFKVLGNTDRHSIKKNLIGALLFDSGETAEATRLKRTARRRYTRRKNRICYLQEIFSNEMAKVDDSFFHRLEESFLVEEDKKHERHPIFGNIVDEVAYHEKYPTIYHLRKKLVDSTDKADLRLIYLALAHMIKFRGHFLIEGDLNPDNSDVDKLFIQLVQTYNQLFEENPINASGVDAKAILSARLSKSRRLENLIAQLPGEKKNGLFGNLIALSLGLTPNFKSNFDLAEDAKLQLSKDTYDDDLDNLLAQIGDQYADLFLAAKNLSDAILLSDILRVNTEITKAPLSASMIKRYDEHHQDLTLLKALVRQQLPEKYKEIFFDQSKNGYAGYIDGGASQEEFYKFIKPILEKMDGTEELLVKLNREDLLRKQRTFDNGSIPHQIHLGELHAILRRQEDFYPFLKDNREKIEKILTFRIPYYVGPLARGNSRFAWMTRKSEETITPWNFEEVVDKGASAQSFIERMTNFDKNLPNEKVLPKHSLLYEYFTVYNELTKVKYVTEGMRKPAFLSGEQKKAIVDLLFKTNRKVTVKQLKEDYFKKIECFDSVEISGVEDRFNASLGTYHDLLKIIKDKDFLDNEENEDILEDIVLTLTLFEDREMIEERLKTYAHLFDDKVMKQLKRRRYTGWGRLSRKLINGIRDKQSGKTILDFLKSDGFANRNFMQLIHDDSLTFKEDIQKAQVSGQGDSLHEHIANLAGSPAIKKGILQTVKVVDELVKVMGRHKPENIVIEMARENQTTQKGQKNSRERMKRIEEGIKELGSQILKEHPVENTQLQNEKLYLYYLQNGRDMYVDQELDINRLSDYDVDHIVPQSFLKDDSIDNKVLTRSDKARGKSDNVPSEEVVKKMKNYWRQLLNAKLITQRKFDNLTKAERGGLSELDKAGFIKRQLVETRQITKHVAQILDSRMNTKYDENDKLIREVKVITLKSKLVSDFRKDFQFYKVREINNYHHAHDAYLNAVVGTALIKKYPKLESEFVYGDYKVYDVRKMIAKSEQEIGKATAKYFFYSNIMNFFKTEITLANGEIRKRPLIETNGETGEIVWDKGRDFATVRKVLSMPQVNIVKKTEVQTGGFSKESILPKRNSDKLIARKKDWDPKKYGGFDSPTVAYSVLVVAKVEKGKSKKLKSVKELLGITIMERSSFEKNPIDFLEAKGYKEVKKDLIIKLPKYSLFELENGRKRMLASAGELQKGNELALPSKYVNFLYLASHYEKLKGSPEDNEQKQLFVEQHKHYLDEIIEQISEFSKRVILADANLDKVLSAYNKHRDKPIREQAENIIHLFTLTNLGAPAAFKYFDTTIDRKRYTSTKEVLDATLIHQSITGLYETRIDLSQLGGDGGPAPGGGEAAAKGGTLNIEDEYRLHETSKEPDVSLGSTWLSDFPQAWAETGGMGLAVRQAPLIIPLKATSTPVSIKQYPMSQEARLGIKPHIQRLLDQGILVPCQSPWNTPLLPVKKPGTNDYRPVQDLREVNKRVEDIHPTVPNPYNLLSGLPPSHQWYTVLDLKDAFFCLRLHPTSQPLFAFEWRDPEMGISGQLTWTRLPQGFKNSPTLFNEALHRDLAGFRIQHPDLILLQYVDDLLLAATSELDCQQGTRALLQTLGDLGYRASAKKAQICQKQVKYLGYLLKEGQRWLTEARKETVMGQPIPKTPRQLREFLGKAGFCRLFIPGFAEMAAPLYPLTKPGTLFNWGPDQQKAFQEIKQALLTAPALGLPDLTKPFELFVDEKQGYAKGVLTQKLGPWRRPVAYLSKKLDPVAAGWPPCLRMVAAIAVLTKDAGKLTMGQPLVILAPHAVEALVKQPPDRWLSNARMTHYQALLLDTDRVQFGPVVALNPATLLPLPEEGLQHDCLDILAEAHGTRSDLMDQPLPDADHTWYTDGSSFLQEGQRKAGAAVTTETEVIWARALPAGTSAQRAELIALTQALKMAEGKKLNVYTDSRYAFATAHIHGEIYRRRGWLTSEGKEIKNKDEILALLKALFLPKRLSIIHCPGHQKGNSAEARGNRMADQAAREVATRETPETSTLLAGKRTADGSEFEKRTADGSEFESPKKKAKVE

SEQ ID NO: 2378 - protein, 2090 aa, synthetic construct
  source 1..2090: note = Description of Artificial Sequence: Synthetic polypeptide
MPAAKRVKLDGGDKKYSIGLDIGTNSVGWAVITDEYKVPSKKFKVLGNTDRHSIKKNLIGALLFDSGETAEATRLKRTARRRYTRRKNRICYLQEIFSNEMAKVDDSFFHRLEESFLVEEDKKHERHPIFGNIVDEVAYHEKYPTIYHLRKKLVDSTDKADLRLIYLALAHMIKFRGHFLIEGDLNPDNSDVDKLFIQLVQTYNQLFEENPINASGVDAKAILSARLSKSRRLENLIAQLPGEKKNGLFGNLIALSLGLTPNFKSNFDLAEDAKLQLSKDTYDDDLDNLLAQIGDQYADLFLAAKNLSDAILLSDILRVNTEITKAPLSASMIKRYDEHHQDLTLLKALVRQQLPEKYKEIFFDQSKNGYAGYIDGGASQEEFYKFIKPILEKMDGTEELLVKLNREDLLRKQRTFDNGSIPHQIHLGELHAILRRQEDFYPFLKDNREKIEKILTFRIPYYVGPLARGNSRFAWMTRKSEETITPWNFEEVVDKGASAQSFIERMTNFDKNLPNEKVLPKHSLLYEYFTVYNELTKVKYVTEGMRKPAFLSGEQKKAIVDLLFKTNRKVTVKQLKEDYFKKIECFDSVEISGVEDRFNASLGTYHDLLKIIKDKDFLDNEENEDILEDIVLTLTLFEDREMIEERLKTYAHLFDDKVMKQLKRRRYTGWGRLSRKLINGIRDKQSGKTILDFLKSDGFANRNFMQLIHDDSLTFKEDIQKAQVSGQGDSLHEHIANLAGSPAIKKGILQTVKVVDELVKVMGRHKPENIVIEMARENQTTQKGQKNSRERMKRIEEGIKELGSQILKEHPVENTQLQNEKLYLYYLQNGRDMYVDQELDINRLSDYDVDHIVPQSFLKDDSIDNKVLTRSDKARGKSDNVPSEEVVKKMKNYWRQLLNAKLITQRKFDNLTKAERGGLSELDKAGFIKRQLVETRQITKHVAQILDSRMNTKYDENDKLIREVKVITLKSKLVSDFRKDFQFYKVREINNYHHAHDAYLNAVVGTALIKKYPKLESEFVYGDYKVYDVRKMIAKSEQEIGKATAKYFFYSNIMNFFKTEITLANGEIRKRPLIETNGETGEIVWDKGRDFATVRKVLSMPQVNIVKKTEVQTGGFSKESILPKRNSDKLIARKKDWDPKKYGGFDSPTVAYSVLVVAKVEKGKSKKLKSVKELLGITIMERSSFEKNPIDFLEAKGYKEVKKDLIIKLPKYSLFELENGRKRMLASAGELQKGNELALPSKYVNFLYLASHYEKLKGSPEDNEQKQLFVEQHKHYLDEIIEQISEFSKRVILADANLDKVLSAYNKHRDKPIREQAENIIHLFTLTNLGAPAAFKYFDTTIDRKRYTSTKEVLDATLIHQSITGLYETRIDLSQLGGDGGGGGGGGGTLNIEDEYRLHETSKEPDVSLGSTWLSDFPQAWAETGGMGLAVRQAPLIIPLKATSTPVSIKQYPMSQEARLGIKPHIQRLLDQGILVPCQSPWNTPLLPVKKPGTNDYRPVQDLREVNKRVEDIHPTVPNPYNLLSGLPPSHQWYTVLDLKDAFFCLRLHPTSQPLFAFEWRDPEMGISGQLTWTRLPQGFKNSPTLFNEALHRDLAGFRIQHPDLILLQYVDDLLLAATSELDCQQGTRALLQTLGDLGYRASAKKAQICQKQVKYLGYLLKEGQRWLTEARKETVMGQPIPKTPRQLREFLGKAGFCRLFIPGFAEMAAPLYPLTKPGTLFNWGPDQQKAFQEIKQALLTAPALGLPDLTKPFELFVDEKQGYAKGVLTQKLGPWRRPVAYLSKKLDPVAAGWPPCLRMVAAIAVLTKDAGKLTMGQPLVILAPHAVEALVKQPPDRWLSNARMTHYQALLLDTDRVQFGPVVALNPATLLPLPEEGLQHDCLDILAEAHGTRSDLMDQPLPDADHTWYTDGSSFLQEGQRKAGAAVTTETEVIWARALPAGTSAQRAELIALTQALKMAEGKKLNVYTDSRYAFATAHIHGEIYRRRGWLTSEGKEIKNKDEILALLKALFLPKRLSIIHCPGHQKGNSAEARGNRMADQAAREVATRETPETSTLLAGKRTADGSEFEKRTADGSEFESPKKKAKVE

SEQ ID NO: 2379 - protein, 2094 aa, synthetic construct
  source 1..2094: note = Description of Artificial Sequence: Synthetic polypeptide
MPAAKRVKLDGGDKKYSIGLDIGTNSVGWAVITDEYKVPSKKFKVLGNTDRHSIKKNLIGALLFDSGETAEATRLKRTARRRYTRRKNRICYLQEIFSNEMAKVDDSFFHRLEESFLVEEDKKHERHPIFGNIVDEVAYHEKYPTIYHLRKKLVDSTDKADLRLIYLALAHMIKFRGHFLIEGDLNPDNSDVDKLFIQLVQTYNQLFEENPINASGVDAKAILSARLSKSRRLENLIAQLPGEKKNGLFGNLIALSLGLTPNFKSNFDLAEDAKLQLSKDTYDDDLDNLLAQIGDQYADLFLAAKNLSDAILLSDILRVNTEITKAPLSASMIKRYDEHHQDLTLLKALVRQQLPEKYKEIFFDQSKNGYAGYIDGGASQEEFYKFIKPILEKMDGTEELLVKLNREDLLRKQRTFDNGSIPHQIHLGELHAILRRQEDFYPFLKDNREKIEKILTFRIPYYVGPLARGNSRFAWMTRKSEETITPWNFEEVVDKGASAQSFIERMTNFDKNLPNEKVLPKHSLLYEYFTVYNELTKVKYVTEGMRKPAFLSGEQKKAIVDLLFKTNRKVTVKQLKEDYFKKIECFDSVEISGVEDRFNASLGTYHDLLKIIKDKDFLDNEENEDILEDIVLTLTLFEDREMIEERLKTYAHLFDDKVMKQLKRRRYTGWGRLSRKLINGIRDKQSGKTILDFLKSDGFANRNFMQLIHDDSLTFKEDIQKAQVSGQGDSLHEHIANLAGSPAIKKGILQTVKVVDELVKVMGRHKPENIVIEMARENQTTQKGQKNSRERMKRIEEGIKELGSQILKEHPVENTQLQNEKLYLYYLQNGRDMYVDQELDINRLSDYDVDHIVPQSFLKDDSIDNKVLTRSDKARGKSDNVPSEEVVKKMKNYWRQLLNAKLITQRKFDNLTKAERGGLSELDKAGFIKRQLVETRQITKHVAQILDSRMNTKYDENDKLIREVKVITLKSKLVSDFRKDFQFYKVREINNYHHAHDAYLNAVVGTALIKKYPKLESEFVYGDYKVYDVRKMIAKSEQEIGKATAKYFFYSNIMNFFKTEITLANGEIRKRPLIETNGETGEIVWDKGRDFATVRKVLSMPQVNIVKKTEVQTGGFSKESILPKRNSDKLIARKKDWDPKKYGGFDSPTVAYSVLVVAKVEKGKSKKLKSVKELLGITIMERSSFEKNPIDFLEAKGYKEVKKDLIIKLPKYSLFELENGRKRMLASAGELQKGNELALPSKYVNFLYLASHYEKLKGSPEDNEQKQLFVEQHKHYLDEIIEQISEFSKRVILADANLDKVLSAYNKHRDKPIREQAENIIHLFTLTNLGAPAAFKYFDTTIDRKRYTSTKEVLDATLIHQSITGLYETRIDLSQLGGDGGGSSGGSGGGGGTLNIEDEYRLHETSKEPDVSLGSTWLSDFPQAWAETGGMGLAVRQAPLIIPLKATSTPVSIKQYPMSQEARLGIKPHIQRLLDQGILVPCQSPWNTPLLPVKKPGTNDYRPVQDLREVNKRVEDIHPTVPNPYNLLSGLPPSHQWYTVLDLKDAFFCLRLHPTSQPLFAFEWRDPEMGISGQLTWTRLPQGFKNSPTLFNEALHRDLAGFRIQHPDLILLQYVDDLLLAATSELDCQQGTRALLQTLGDLGYRASAKKAQICQKQVKYLGYLLKEGQRWLTEARKETVMGQPIPKTPRQLREFLGKAGFCRLFIPGFAEMAAPLYPLTKPGTLFNWGPDQQKAFQEIKQALLTAPALGLPDLTKPFELFVDEKQGYAKGVLTQKLGPWRRPVAYLSKKLDPVAAGWPPCLRMVAAIAVLTKDAGKLTMGQPLVILAPHAVEALVKQPPDRWLSNARMTHYQALLLDTDRVQFGPVVALNPATLLPLPEEGLQHDCLDILAEAHGTRSDLMDQPLPDADHTWYTDGSSFLQEGQRKAGAAVTTETEVIWARALPAGTSAQRAELIALTQALKMAEGKKLNVYTDSRYAFATAHIHGEIYRRRGWLTSEGKEIKNKDEILALLKALFLPKRLSIIHCPGHQKGNSAEARGNRMADQAAREVATRETPETSTLLAGKRTADGSEFEKRTADGSEFESPKKKAKVE

SEQ ID NO: 2380 - protein, 2094 aa, synthetic construct
  source 1..2094: note = Description of Artificial Sequence: Synthetic polypeptide
MPAAKRVKLDGGDKKYSIGLDIGTNSVGWAVITDEYKVPSKKFKVLGNTDRHSIKKNLIGALLFDSGETAEATRLKRTARRRYTRRKNRICYLQEIFSNEMAKVDDSFFHRLEESFLVEEDKKHERHPIFGNIVDEVAYHEKYPTIYHLRKKLVDSTDKADLRLIYLALAHMIKFRGHFLIEGDLNPDNSDVDKLFIQLVQTYNQLFEENPINASGVDAKAILSARLSKSRRLENLIAQLPGEKKNGLFGNLIALSLGLTPNFKSNFDLAEDAKLQLSKDTYDDDLDNLLAQIGDQYADLFLAAKNLSDAILLSDILRVNTEITKAPLSASMIKRYDEHHQDLTLLKALVRQQLPEKYKEIFFDQSKNGYAGYIDGGASQEEFYKFIKPILEKMDGTEELLVKLNREDLLRKQRTFDNGSIPHQIHLGELHAILRRQEDFYPFLKDNREKIEKILTFRIPYYVGPLARGNSRFAWMTRKSEETITPWNFEEVVDKGASAQSFIERMTNFDKNLPNEKVLPKHSLLYEYFTVYNELTKVKYVTEGMRKPAFLSGEQKKAIVDLLFKTNRKVTVKQLKEDYFKKIECFDSVEISGVEDRFNASLGTYHDLLKIIKDKDFLDNEENEDILEDIVLTLTLFEDREMIEERLKTYAHLFDDKVMKQLKRRRYTGWGRLSRKLINGIRDKQSGKTILDFLKSDGFANRNFMQLIHDDSLTFKEDIQKAQVSGQGDSLHEHIANLAGSPAIKKGILQTVKVVDELVKVMGRHKPENIVIEMARENQTTQKGQKNSRERMKRIEEGIKELGSQILKEHPVENTQLQNEKLYLYYLQNGRDMYVDQELDINRLSDYDVDHIVPQSFLKDDSIDNKVLTRSDKARGKSDNVPSEEVVKKMKNYWRQLLNAKLITQRKFDNLTKAERGGLSELDKAGFIKRQLVETRQITKHVAQILDSRMNTKYDENDKLIREVKVITLKSKLVSDFRKDFQFYKVREINNYHHAHDAYLNAVVGTALIKKYPKLESEFVYGDYKVYDVRKMIAKSEQEIGKATAKYFFYSNIMNFFKTEITLANGEIRKRPLIETNGETGEIVWDKGRDFATVRKVLSMPQVNIVKKTEVQTGGFSKESILPKRNSDKLIARKKDWDPKKYGGFDSPTVAYSVLVVAKVEKGKSKKLKSVKELLGITIMERSSFEKNPIDFLEAKGYKEVKKDLIIKLPKYSLFELENGRKRMLASAGELQKGNELALPSKYVNFLYLASHYEKLKGSPEDNEQKQLFVEQHKHYLDEIIEQISEFSKRVILADANLDKVLSAYNKHRDKPIREQAENIIHLFTLTNLGAPAAFKYFDTTIDRKRYTSTKEVLDATLIHQSITGLYETRIDLSQLGGDGGPAPGSSGGSGGTLNIEDEYRLHETSKEPDVSLGSTWLSDFPQAWAETGGMGLAVRQAPLIIPLKATSTPVSIKQYPMSQEARLGIKPHIQRLLDQGILVPCQSPWNTPLLPVKKPGTNDYRPVQDLREVNKRVEDIHPTVPNPYNLLSGLPPSHQWYTVLDLKDAFFCLRLHPTSQPLFAFEWRDPEMGISGQLTWTRLPQGFKNSPTLFNEALHRDLAGFRIQHPDLILLQYVDDLLLAATSELDCQQGTRALLQTLGDLGYRASAKKAQICQKQVKYLGYLLKEGQRWLTEARKETVMGQPIPKTPRQLREFLGKAGFCRLFIPGFAEMAAPLYPLTKPGTLFNWGPDQQKAFQEIKQALLTAPALGLPDLTKPFELFVDEKQGYAKGVLTQKLGPWRRPVAYLSKKLDPVAAGWPPCLRMVAAIAVLTKDAGKLTMGQPLVILAPHAVEALVKQPPDRWLSNARMTHYQALLLDTDRVQFGPVVALNPATLLPLPEEGLQHDCLDILAEAHGTRSDLMDQPLPDADHTWYTDGSSFLQEGQRKAGAAVTTETEVIWARALPAGTSAQRAELIALTQALKMAEGKKLNVYTDSRYAFATAHIHGEIYRRRGWLTSEGKEIKNKDEILALLKALFLPKRLSIIHCPGHQKGNSAEARGNRMADQAAREVATRETPETSTLLAGKRTADGSEFEKRTADGSEFESPKKKAKVE

SEQ ID NO: 2381 - protein, 2090 aa, synthetic construct
  source 1..2090: note = Description of Artificial Sequence: Synthetic polypeptide
MPAAKRVKLDGGDKKYSIGLDIGTNSVGWAVITDEYKVPSKKFKVLGNTDRHSIKKNLIGALLFDSGETAEATRLKRTARRRYTRRKNRICYLQEIFSNEMAKVDDSFFHRLEESFLVEEDKKHERHPIFGNIVDEVAYHEKYPTIYHLRKKLVDSTDKADLRLIYLALAHMIKFRGHFLIEGDLNPDNSDVDKLFIQLVQTYNQLFEENPINASGVDAKAILSARLSKSRRLENLIAQLPGEKKNGLFGNLIALSLGLTPNFKSNFDLAEDAKLQLSKDTYDDDLDNLLAQIGDQYADLFLAAKNLSDAILLSDILRVNTEITKAPLSASMIKRYDEHHQDLTLLKALVRQQLPEKYKEIFFDQSKNGYAGYIDGGASQEEFYKFIKPILEKMDGTEELLVKLNREDLLRKQRTFDNGSIPHQIHLGELHAILRRQEDFYPFLKDNREKIEKILTFRIPYYVGPLARGNSRFAWMTRKSEETITPWNFEEVVDKGASAQSFIERMTNFDKNLPNEKVLPKHSLLYEYFTVYNELTKVKYVTEGMRKPAFLSGEQKKAIVDLLFKTNRKVTVKQLKEDYFKKIECFDSVEISGVEDRFNASLGTYHDLLKIIKDKDFLDNEENEDILEDIVLTLTLFEDREMIEERLKTYAHLFDDKVMKQLKRRRYTGWGRLSRKLINGIRDKQSGKTILDFLKSDGFANRNFMQLIHDDSLTFKEDIQKAQVSGQGDSLHEHIANLAGSPAIKKGILQTVKVVDELVKVMGRHKPENIVIEMARENQTTQKGQKNSRERMKRIEEGIKELGSQILKEHPVENTQLQNEKLYLYYLQNGRDMYVDQELDINRLSDYDVDHIVPQSFLKDDSIDNKVLTRSDKARGKSDNVPSEEVVKKMKNYWRQLLNAKLITQRKFDNLTKAERGGLSELDKAGFIKRQLVETRQITKHVAQILDSRMNTKYDENDKLIREVKVITLKSKLVSDFRKDFQFYKVREINNYHHAHDAYLNAVVGTALIKKYPKLESEFVYGDYKVYDVRKMIAKSEQEIGKATAKYFFYSNIMNFFKTEITLANGEIRKRPLIETNGETGEIVWDKGRDFATVRKVLSMPQVNIVKKTEVQTGGFSKESILPKRNSDKLIARKKDWDPKKYGGFDSPTVAYSVLVVAKVEKGKSKKLKSVKELLGITIMERSSFEKNPIDFLEAKGYKEVKKDLIIKLPKYSLFELENGRKRMLASAGELQKGNELALPSKYVNFLYLASHYEKLKGSPEDNEQKQLFVEQHKHYLDEIIEQISEFSKRVILADANLDKVLSAYNKHRDKPIREQAENIIHLFTLTNLGAPAAFKYFDTTIDRKRYTSTKEVLDATLIHQSITGLYETRIDLSQLGGDGGGGGGSGGTLNIEDEYRLHETSKEPDVSLGSTWLSDFPQAWAETGGMGLAVRQAPLIIPLKATSTPVSIKQYPMSQEARLGIKPHIQRLLDQGILVPCQSPWNTPLLPVKKPGTNDYRPVQDLREVNKRVEDIHPTVPNPYNLLSGLPPSHQWYTVLDLKDAFFCLRLHPTSQPLFAFEWRDPEMGISGQLTWTRLPQGFKNSPTLFNEALHRDLAGFRIQHPDLILLQYVDDLLLAATSELDCQQGTRALLQTLGDLGYRASAKKAQICQKQVKYLGYLLKEGQRWLTEARKETVMGQPIPKTPRQLREFLGKAGFCRLFIPGFAEMAAPLYPLTKPGTLFNWGPDQQKAFQEIKQALLTAPALGLPDLTKPFELFVDEKQGYAKGVLTQKLGPWRRPVAYLSKKLDPVAAGWPPCLRMVAAIAVLTKDAGKLTMGQPLVILAPHAVEALVKQPPDRWLSNARMTHYQALLLDTDRVQFGPVVALNPATLLPLPEEGLQHDCLDILAEAHGTRSDLMDQPLPDADHTWYTDGSSFLQEGQRKAGAAVTTETEVIWARALPAGTSAQRAELIALTQALKMAEGKKLNVYTDSRYAFATAHIHGEIYRRRGWLTSEGKEIKNKDEILALLKALFLPKRLSIIHCPGHQKGNSAEARGNRMADQAAREVATRETPETSTLLAGKRTADGSEFEKRTADGSEFESPKKKAKVE

SEQ ID NO: 2382 - protein, 2093 aa, synthetic construct
  source 1..2093: note = Description of Artificial Sequence: Synthetic polypeptide
MPAAKRVKLDGGDKKYSIGLDIGTNSVGWAVITDEYKVPSKKFKVLGNTDRHSIKKNLIGALLFDSGETAEATRLKRTARRRYTRRKNRICYLQEIFSNEMAKVDDSFFHRLEESFLVEEDKKHERHPIFGNIVDEVAYHEKYPTIYHLRKKLVDSTDKADLRLIYLALAHMIKFRGHFLIEGDLNPDNSDVDKLFIQLVQTYNQLFEENPINASGVDAKAILSARLSKSRRLENLIAQLPGEKKNGLFGNLIALSLGLTPNFKSNFDLAEDAKLQLSKDTYDDDLDNLLAQIGDQYADLFLAAKNLSDAILLSDILRVNTEITKAPLSASMIKRYDEHHQDLTLLKALVRQQLPEKYKEIFFDQSKNGYAGYIDGGASQEEFYKFIKPILEKMDGTEELLVKLNREDLLRKQRTFDNGSIPHQIHLGELHAILRRQEDFYPFLKDNREKIEKILTFRIPYYVGPLARGNSRFAWMTRKSEETITPWNFEEVVDKGASAQSFIERMTNFDKNLPNEKVLPKHSLLYEYFTVYNELTKVKYVTEGMRKPAFLSGEQKKAIVDLLFKTNRKVTVKQLKEDYFKKIECFDSVEISGVEDRFNASLGTYHDLLKIIKDKDFLDNEENEDILEDIVLTLTLFEDREMIEERLKTYAHLFDDKVMKQLKRRRYTGWGRLSRKLINGIRDKQSGKTILDFLKSDGFANRNFMQLIHDDSLTFKEDIQKAQVSGQGDSLHEHIANLAGSPAIKKGILQTVKVVDELVKVMGRHKPENIVIEMARENQTTQKGQKNSRERMKRIEEGIKELGSQILKEHPVENTQLQNEKLYLYYLQNGRDMYVDQELDINRLSDYDVDHIVPQSFLKDDSIDNKVLTRSDKARGKSDNVPSEEVVKKMKNYWRQLLNAKLITQRKFDNLTKAERGGLSELDKAGFIKRQLVETRQITKHVAQILDSRMNTKYDENDKLIREVKVITLKSKLVSDFRKDFQFYKVREINNYHHAHDAYLNAVVGTALIKKYPKLESEFVYGDYKVYDVRKMIAKSEQEIGKATAKYFFYSNIMNFFKTEITLANGEIRKRPLIETNGETGEIVWDKGRDFATVRKVLSMPQVNIVKKTEVQTGGFSKESILPKRNSDKLIARKKDWDPKKYGGFDSPTVAYSVLVVAKVEKGKSKKLKSVKELLGITIMERSSFEKNPIDFLEAKGYKEVKKDLIIKLPKYSLFELENGRKRMLASAGELQKGNELALPSKYVNFLYLASHYEKLKGSPEDNEQKQLFVEQHKHYLDEIIEQISEFSKRVILADANLDKVLSAYNKHRDKPIREQAENIIHLFTLTNLGAPAAFKYFDTTIDRKRYTSTKEVLDATLIHQSITGLYETRIDLSQLGGDGGGSSEAAAKGGTLNIEDEYRLHETSKEPDVSLGSTWLSDFPQAWAETGGMGLAVRQAPLIIPLKATSTPVSIKQYPMSQEARLGIKPHIQRLLDQGILVPCQSPWNTPLLPVKKPGTNDYRPVQDLREVNKRVEDIHPTVPNPYNLLSGLPPSHQWYTVLDLKDAFFCLRLHPTSQPLFAFEWRDPEMGISGQLTWTRLPQGFKNSPTLFNEALHRDLAGFRIQHPDLILLQYVDDLLLAATSELDCQQGTRALLQTLGDLGYRASAKKAQICQKQVKYLGYLLKEGQRWLTEARKETVMGQPIPKTPRQLREFLGKAGFCRLFIPGFAEMAAPLYPLTKPGTLFNWGPDQQKAFQEIKQALLTAPALGLPDLTKPFELFVDEKQGYAKGVLTQKLGPWRRPVAYLSKKLDPVAAGWPPCLRMVAAIAVLTKDAGKLTMGQPLVILAPHAVEALVKQPPDRWLSNARMTHYQALLLDTDRVQFGPVVALNPATLLPLPEEGLQHDCLDILAEAHGTRSDLMDQPLPDADHTWYTDGSSFLQEGQRKAGAAVTTETEVIWARALPAGTSAQRAELIALTQALKMAEGKKLNVYTDSRYAFATAHIHGEIYRRRGWLTSEGKEIKNKDEILALLKALFLPKRLSIIHCPGHQKGNSAEARGNRMADQAAREVATRETPETSTLLAGKRTADGSEFEKRTADGSEFESPKKKAKVE

SEQ ID NO: 2383 - protein, 2091 aa, synthetic construct
  source 1..2091: note = Description of Artificial Sequence: Synthetic polypeptide
MPAAKRVKLDGGDKKYSIGLDIGTNSVGWAVITDEYKVPSKKFKVLGNTDRHSIKKNLIGALLFDSGETAEATRLKRTARRRYTRRKNRICYLQEIFSNEMAKVDDSFFHRLEESFLVEEDKKHERHPIFGNIVDEVAYHEKYPTIYHLRKKLVDSTDKADLRLIYLALAHMIKFRGHFLIEGDLNPDNSDVDKLFIQLVQTYNQLFEENPINASGVDAKAILSARLSKSRRLENLIAQLPGEKKNGLFGNLIALSLGLTPNFKSNFDLAEDAKLQLSKDTYDDDLDNLLAQIGDQYADLFLAAKNLSDAILLSDILRVNTEITKAPLSASMIKRYDEHHQDLTLLKALVRQQLPEKYKEIFFDQSKNGYAGYIDGGASQEEFYKFIKPILEKMDGTEELLVKLNREDLLRKQRTFDNGSIPHQIHLGELHAILRRQEDFYPFLKDNREKIEKILTFRIPYYVGPLARGNSRFAWMTRKSEETITPWNFEEVVDKGASAQSFIERMTNFDKNLPNEKVLPKHSLLYEYFTVYNELTKVKYVTEGMRKPAFLSGEQKKAIVDLLFKTNRKVTVKQLKEDYFKKIECFDSVEISGVEDRFNASLGTYHDLLKIIKDKDFLDNEENEDILEDIVLTLTLFEDREMIEERLKTYAHLFDDKVMKQLKRRRYTGWGRLSRKLINGIRDKQSGKTILDFLKSDGFANRNFMQLIHDDSLTFKEDIQKAQVSGQGDSLHEHIANLAGSPAIKKGILQTVKVVDELVKVMGRHKPENIVIEMARENQTTQKGQKNSRERMKRIEEGIKELGSQILKEHPVENTQLQNEKLYLYYLQNGRDMYVDQELDINRLSDYDVDHIVPQSFLKDDSIDNKVLTRSDKARGKSDNVPSEEVVKKMKNYWRQLLNAKLITQRKFDNLTKAERGGLSELDKAGFIKRQLVETRQITKHVAQILDSRMNTKYDENDKLIREVKVITLKSKLVSDFRKDFQFYKVREINNYHHAHDAYLNAVVGTALIKKYPKLESEFVYGDYKVYDVRKMIAKSEQEIGKATAKYFFYSNIMNFFKTEITLANGEIRKRPLIETNGETGEIVWDKGRDFATVRKVLSMPQVNIVKKTEVQTGGFSKESILPKRNSDKLIARKKDWDPKKYGGFDSPTVAYSVLVVAKVEKGKSKKLKSVKELLGITIMERSSFEKNPIDFLEAKGYKEVKKDLIIKLPKYSLFELENGRKRMLASAGELQKGNELALPSKYVNFLYLASHYEKLKGSPEDNEQKQLFVEQHKHYLDEIIEQISEFSKRVILADANLDKVLSAYNKHRDKPIREQAENIIHLFTLTNLGAPAAFKYFDTTIDRKRYTSTKEVLDATLIHQSITGLYETRIDLSQLGGDGGGGGGSSGGTLNIEDEYRLHETSKEPDVSLGSTWLSDFPQAWAETGGMGLAVRQAPLIIPLKATSTPVSIKQYPMSQEARLGIKPHIQRLLDQGILVPCQSPWNTPLLPVKKPGTNDYRPVQDLREVNKRVEDIHPTVPNPYNLLSGLPPSHQWYTVLDLKDAFFCLRLHPTSQPLFAFEWRDPEMGISGQLTWTRLPQGFKNSPTLFNEALHRDLAGFRIQHPDLILLQYVDDLLLAATSELDCQQGTRALLQTLGDLGYRASAKKAQICQKQVKYLGYLLKEGQRWLTEARKETVMGQPIPKTPRQLREFLGKAGFCRLFIPGFAEMAAPLYPLTKPGTLFNWGPDQQKAFQEIKQALLTAPALGLPDLTKPFELFVDEKQGYAKGVLTQKLGPWRRPVAYLSKKLDPVAAGWPPCLRMVAAIAVLTKDAGKLTMGQPLVILAPHAVEALVKQPPDRWLSNARMTHYQALLLDTDRVQFGPVVALNPATLLPLPEEGLQHDCLDILAEAHGTRSDLMDQPLPDADHTWYTDGSSFLQEGQRKAGAAVTTETEVIWARALPAGTSAQRAELIALTQALKMAEGKKLNVYTDSRYAFATAHIHGEIYRRRGWLTSEGKEIKNKDEILALLKALFLPKRLSIIHCPGHQKGNSAEARGNRMADQAAREVATRETPETSTLLAGKRTADGSEFEKRTADGSEFESPKKKAKVE

SEQ ID NO: 2384 - protein, 2096 aa, synthetic construct
  source 1..2096: note = Description of Artificial Sequence: Synthetic polypeptide
MPAAKRVKLDGGDKKYSIGLDIGTNSVGWAVITDEYKVPSKKFKVLGNTDRHSIKKNLIGALLFDSGETAEATRLKRTARRRYTRRKNRICYLQEIFSNEMAKVDDSFFHRLEESFLVEEDKKHERHPIFGNIVDEVAYHEKYPTIYHLRKKLVDSTDKADLRLIYLALAHMIKFRGHFLIEGDLNPDNSDVDKLFIQLVQTYNQLFEENPINASGVDAKAILSARLSKSRRLENLIAQLPGEKKNGLFGNLIALSLGLTPNFKSNFDLAEDAKLQLSKDTYDDDLDNLLAQIGDQYADLFLAAKNLSDAILLSDILRVNTEITKAPLSASMIKRYDEHHQDLTLLKALVRQQLPEKYKEIFFDQSKNGYAGYIDGGASQEEFYKFIKPILEKMDGTEELLVKLNREDLLRKQRTFDNGSIPHQIHLGELHAILRRQEDFYPFLKDNREKIEKILTFRIPYYVGPLARGNSRFAWMTRKSEETITPWNFEEVVDKGASAQSFIERMTNFDKNLPNEKVLPKHSLLYEYFTVYNELTKVKYVTEGMRKPAFLSGEQKKAIVDLLFKTNRKVTVKQLKEDYFKKIECFDSVEISGVEDRFNASLGTYHDLLKIIKDKDFLDNEENEDILEDIVLTLTLFEDREMIEERLKTYAHLFDDKVMKQLKRRRYTGWGRLSRKLINGIRDKQSGKTILDFLKSDGFANRNFMQLIHDDSLTFKEDIQKAQVSGQGDSLHEHIANLAGSPAIKKGILQTVKVVDELVKVMGRHKPENIVIEMARENQTTQKGQKNSRERMKRIEEGIKELGSQILKEHPVENTQLQNEKLYLYYLQNGRDMYVDQELDINRLSDYDVDHIVPQSFLKDDSIDNKVLTRSDKARGKSDNVPSEEVVKKMKNYWRQLLNAKLITQRKFDNLTKAERGGLSELDKAGFIKRQLVETRQITKHVAQILDSRMNTKYDENDKLIREVKVITLKSKLVSDFRKDFQFYKVREINNYHHAHDAYLNAVVGTALIKKYPKLESEFVYGDYKVYDVRKMIAKSEQEIGKATAKYFFYSNIMNFFKTEITLANGEIRKRPLIETNGETGEIVWDKGRDFATVRKVLSMPQVNIVKKTEVQTGGFSKESILPKRNSDKLIARKKDWDPKKYGGFDSPTVAYSVLVVAKVEKGKSKKLKSVKELLGITIMERSSFEKNPIDFLEAKGYKEVKKDLIIKLPKYSLFELENGRKRMLASAGELQKGNELALPSKYVNFLYLASHYEKLKGSPEDNEQKQLFVEQHKHYLDEIIEQISEFSKRVILADANLDKVLSAYNKHRDKPIREQAENIIHLFTLTNLGAPAAFKYFDTTIDRKRYTSTKEVLDATLIHQSITGLYETRIDLSQLGGDGGGSSEAAAKGGGGGTLNIEDEYRLHETSKEPDVSLGSTWLSDFPQAWAETGGMGLAVRQAPLIIPLKATSTPVSIKQYPMSQEARLGIKPHIQRLLDQGILVPCQSPWNTPLLPVKKPGTNDYRPVQDLREVNKRVEDIHPTVPNPYNLLSGLPPSHQWYTVLDLKDAFFCLRLHPTSQPLFAFEWRDPEMGISGQLTWTRLPQGFKNSPTLFNEALHRDLAGFRIQHPDLILLQYVDDLLLAATSELDCQQGTRALLQTLGDLGYRASAKKAQICQKQVKYLGYLLKEGQRWLTEARKETVMGQPIPKTPRQLREFLGKAGFCRLFIPGFAEMAAPLYPLTKPGTLFNWGPDQQKAFQEIKQALLTAPALGLPDLTKPFELFVDEKQGYAKGVLTQKLGPWRRPVAYLSKKLDPVAAGWPPCLRMVAAIAVLTKDAGKLTMGQPLVILAPHAVEALVKQPPDRWLSNARMTHYQALLLDTDRVQFGPVVALNPATLLPLPEEGLQHDCLDILAEAHGTRSDLMDQPLPDADHTWYTDGSSFLQEGQRKAGAAVTTETEVIWARALPAGTSAQRAELIALTQALKMAEGKKLNVYTDSRYAFATAHIHGEIYRRRGWLTSEGKEIKNKDEILALLKALFLPKRLSIIHCPGHQKGNSAEARGNRMADQAAREVATRETPETSTLLAGKRTADGSEFEKRTADGSEFESPKKKAKVE

SEQ ID NO: 2385 - protein, 2096 aa, synthetic construct
  source 1..2096: note = Description of Artificial Sequence: Synthetic polypeptide
MPAAKRVKLDGGDKKYSIGLDIGTNSVGWAVITDEYKVPSKKFKVLGNTDRHSIKKNLIGALLFDSGETAEATRLKRTARRRYTRRKNRICYLQEIFSNEMAKVDDSFFHRLEESFLVEEDKKHERHPIFGNIVDEVAYHEKYPTIYHLRKKLVDSTDKADLRLIYLALAHMIKFRGHFLIEGDLNPDNSDVDKLFIQLVQTYNQLFEENPINASGVDAKAILSARLSKSRRLENLIAQLPGEKKNGLFGNLIALSLGLTPNFKSNFDLAEDAKLQLSKDTYDDDLDNLLAQIGDQYADLFLAAKNLSDAILLSDILRVNTEITKAPLSASMIKRYDEHHQDLTLLKALVRQQLPEKYKEIFFDQSKNGYAGYIDGGASQEEFYKFIKPILEKMDGTEELLVKLNREDLLRKQRTFDNGSIPHQIHLGELHAILRRQEDFYPFLKDNREKIEKILTFRIPYYVGPLARGNSRFAWMTRKSEETITPWNFEEVVDKGASAQSFIERMTNFDKNLPNEKVLPKHSLLYEYFTVYNELTKVKYVTEGMRKPAFLSGEQKKAIVDLLFKTNRKVTVKQLKEDYFKKIECFDSVEISGVEDRFNASLGTYHDLLKIIKDKDFLDNEENEDILEDIVLTLTLFEDREMIEERLKTYAHLFDDKVMKQLKRRRYTGWGRLSRKLINGIRDKQSGKTILDFLKSDGFANRNFMQLIHDDSLTFKEDIQKAQVSGQGDSLHEHIANLAGSPAIKKGILQTVKVVDELVKVMGRHKPENIVIEMARENQTTQKGQKNSRERMKRIEEGIKELGSQILKEHPVENTQLQNEKLYLYYLQNGRDMYVDQELDINRLSDYDVDHIVPQSFLKDDSIDNKVLTRSDKARGKSDNVPSEEVVKKMKNYWRQLLNAKLITQRKFDNLTKAERGGLSELDKAGFIKRQLVETRQITKHVAQILDSRMNTKYDENDKLIREVKVITLKSKLVSDFRKDFQFYKVREINNYHHAHDAYLNAVVGTALIKKYPKLESEFVYGDYKVYDVRKMIAKSEQEIGKATAKYFFYSNIMNFFKTEITLANGEIRKRPLIETNGETGEIVWDKGRDFATVRKVLSMPQVNIVKKTEVQTGGFSKESILPKRNSDKLIARKKDWDPKKYGGFDSPTVAYSVLVVAKVEKGKSKKLKSVKELLGITIMERSSFEKNPIDFLEAKGYKEVKKDLIIKLPKYSLFELENGRKRMLASAGELQKGNELALPSKYVNFLYLASHYEKLKGSPEDNEQKQLFVEQHKHYLDEIIEQISEFSKRVILADANLDKVLSAYNKHRDKPIREQAENIIHLFTLTNLGAPAAFKYFDTTIDRKRYTSTKEVLDATLIHQSITGLYETRIDLSQLGGDGGGGGEAAAKPAPGGTLNIEDEYRLHETSKEPDVSLGSTWLSDFPQAWAETGGMGLAVRQAPLIIPLKATSTPVSIKQYPMSQEARLGIKPHIQRLLDQGILVPCQSPWNTPLLPVKKPGTNDYRPVQDLREVNKRVEDIHPTVPNPYNLLSGLPPSHQWYTVLDLKDAFFCLRLHPTSQPLFAFEWRDPEMGISGQLTWTRLPQGFKNSPTLFNEALHRDLAGFRIQHPDLILLQYVDDLLLAATSELDCQQGTRALLQTLGDLGYRASAKKAQICQKQVKYLGYLLKEGQRWLTEARKETVMGQPIPKTPRQLREFLGKAGFCRLFIPGFAEMAAPLYPLTKPGTLFNWGPDQQKAFQEIKQALLTAPALGLPDLTKPFELFVDEKQGYAKGVLTQKLGPWRRPVAYLSKKLDPVAAGWPPCLRMVAAIAVLTKDAGKLTMGQPLVILAPHAVEALVKQPPDRWLSNARMTHYQALLLDTDRVQFGPVVALNPATLLPLPEEGLQHDCLDILAEAHGTRSDLMDQPLPDADHTWYTDGSSFLQEGQRKAGAAVTTETEVIWARALPAGTSAQRAELIALTQALKMAEGKKLNVYTDSRYAFATAHIHGEIYRRRGWLTSEGKEIKNKDEILALLKALFLPKRLSIIHCPGHQKGNSAEARGNRMADQAAREVATRETPETSTLLAGKRTADGSEFEKRTADGSEFESPKKKAKVE

SEQ ID NO: 2386 - protein, 2096 aa, synthetic construct
  source 1..2096: note = Description of Artificial Sequence: Synthetic polypeptide
MPAAKRVKLDGGDKKYSIGLDIGTNSVGWAVITDEYKVPSKKFKVLGNTDRHSIKKNLIGALLFDSGETAEATRLKRTARRRYTRRKNRICYLQEIFSNEMAKVDDSFFHRLEESFLVEEDKKHERHPIFGNIVDEVAYHEKYPTIYHLRKKLVDSTDKADLRLIYLALAHMIKFRGHFLIEGDLNPDNSDVDKLFIQLVQTYNQLFEENPINASGVDAKAILSARLSKSRRLENLIAQLPGEKKNGLFGNLIALSLGLTPNFKSNFDLAEDAKLQLSKDTYDDDLDNLLAQIGDQYADLFLAAKNLSDAILLSDILRVNTEITKAPLSASMIKRYDEHHQDLTLLKALVRQQLPEKYKEIFFDQSKNGYAGYIDGGASQEEFYKFIKPILEKMDGTEELLVKLNREDLLRKQRTFDNGSIPHQIHLGELHAILRRQEDFYPFLKDNREKIEKILTFRIPYYVGPLARGNSRFAWMTRKSEETITPWNFEEVVDKGASAQSFIERMTNFDKNLPNEKVLPKHSLLYEYFTVYNELTKVKYVTEGMRKPAFLSGEQKKAIVDLLFKTNRKVTVKQLKEDYFKKIECFDSVEISGVEDRFNASLGTYHDLLKIIKDKDFLDNEENEDILEDIVLTLTLFEDREMIEERLKTYAHLFDDKVMKQLKRRRYTGWGRLSRKLINGIRDKQSGKTILDFLKSDGFANRNFMQLIHDDSLTFKEDIQKAQVSGQGDSLHEHIANLAGSPAIKKGILQTVKVVDELVKVMGRHKPENIVIEMARENQTTQKGQKNSRERMKRIEEGIKELGSQILKEHPVENTQLQNEKLYLYYLQNGRDMYVDQELDINRLSDYDVDHIVPQSFLKDDSIDNKVLTRSDKARGKSDNVPSEEVVKKMKNYWRQLLNAKLITQRKFDNLTKAERGGLSELDKAGFIKRQLVETRQITKHVAQILDSRMNTKYDENDKLIREVKVITLKSKLVSDFRKDFQFYKVREINNYHHAHDAYLNAVVGTALIKKYPKLESEFVYGDYKVYDVRKMIAKSEQEIGKATAKYFFYSNIMNFFKTEITLANGEIRKRPLIETNGETGEIVWDKGRDFATVRKVLSMPQVNIVKKTEVQTGGFSKESILPKRNSDKLIARKKDWDPKKYGGFDSPTVAYSVLVVAKVEKGKSKKLKSVKELLGITIMERSSFEKNPIDFLEAKGYKEVKKDLIIKLPKYSLFELENGRKRMLASAGELQKGNELALPSKYVNFLYLASHYEKLKGSPEDNEQKQLFVEQHKHYLDEIIEQISEFSKRVILADANLDKVLSAYNKHRDKPIREQAENIIHLFTLTNLGAPAAFKYFDTTIDRKRYTSTKEVLDATLIHQSITGLYETRIDLSQLGGDGGGSSGGSEAAAKGGTLNIEDEYRLHETSKEPDVSLGSTWLSDFPQAWAETGGMGLAVRQAPLIIPLKATSTPVSIKQYPMSQEARLGIKPHIQRLLDQGILVPCQSPWNTPLLPVKKPGTNDYRPVQDLREVNKRVEDIHPTVPNPYNLLSGLPPSHQWYTVLDLKDAFFCLRLHPTSQPLFAFEWRDPEMGISGQLTWTRLPQGFKNSPTLFNEALHRDLAGFRIQHPDLILLQYVDDLLLAATSELDCQQGTRALLQTLGDLGYRASAKKAQICQKQVKYLGYLLKEGQRWLTEARKETVMGQPIPKTPRQLREFLGKAGFCRLFIPGFAEMAAPLYPLTKPGTLFNWGPDQQKAFQEIKQALLTAPALGLPDLTKPFELFVDEKQGYAKGVLTQKLGPWRRPVAYLSKKLDPVAAGWPPCLRMVAAIAVLTKDAGKLTMGQPLVILAPHAVEALVKQPPDRWLSNARMTHYQALLLDTDRVQFGPVVALNPATLLPLPEEGLQHDCLDILAEAHGTRSDLMDQPLPDADHTWYTDGSSFLQEGQRKAGAAVTTETEVIWARALPAGTSAQRAELIALTQALKMAEGKKLNVYTDSRYAFATAHIHGEIYRRRGWLTSEGKEIKNKDEILALLKALFLPKRLSIIHCPGHQKGNSAEARGNRMADQAAREVATRETPETSTLLAGKRTADGSEFEKRTADGSEFESPKKKAKVE

SEQ ID NO: 2387 - protein, 2094 aa, synthetic construct
  source 1..2094: note = Description of Artificial Sequence: Synthetic polypeptide
MPAAKRVKLDGGDKKYSIGLDIGTNSVGWAVITDEYKVPSKKFKVLGNTDRHSIKKNLIGALLFDSGETAEATRLKRTARRRYTRRKNRICYLQEIFSNEMAKVDDSFFHRLEESFLVEEDKKHERHPIFGNIVDEVAYHEKYPTIYHLRKKLVDSTDKADLRLIYLALAHMIKFRGHFLIEGDLNPDNSDVDKLFIQLVQTYNQLFEENPINASGVDAKAILSARLSKSRRLENLIAQLPGEKKNGLFGNLIALSLGLTPNFKSNFDLAEDAKLQLSKDTYDDDLDNLLAQIGDQYADLFLAAKNLSDAILLSDILRVNTEITKAPLSASMIKRYDEHHQDLTLLKALVRQQLPEKYKEIFFDQSKNGYAGYIDGGASQEEFYKFIKPILEKMDGTEELLVKLNREDLLRKQRTFDNGSIPHQIHLGELHAILRRQEDFYPFLKDNREKIEKILTFRIPYYVGPLARGNSRFAWMTRKSEETITPWNFEEVVDKGASAQSFIERMTNFDKNLPNEKVLPKHSLLYEYFTVYNELTKVKYVTEGMRKPAFLSGEQKKAIVDLLFKTNRKVTVKQLKEDYFKKIECFDSVEISGVEDRFNASLGTYHDLLKIIKDKDFLDNEENEDILEDIVLTLTLFEDREMIEERLKTYAHLFDDKVMKQLKRRRYTGWGRLSRKLINGIRDKQSGKTILDFLKSDGFANRNFMQLIHDDSLTFKEDIQKAQVSGQGDSLHEHIANLAGSPAIKKGILQTVKVVDELVKVMGRHKPENIVIEMARENQTTQKGQKNSRERMKRIEEGIKELGSQILKEHPVENTQLQNEKLYLYYLQNGRDMYVDQELDINRLSDYDVDHIVPQSFLKDDSIDNKVLTRSDKARGKSDNVPSEEVVKKMKNYWRQLLNAKLITQRKFDNLTKAERGGLSELDKAGFIKRQLVETRQITKHVAQILDSRMNTKYDENDKLIREVKVITLKSKLVSDFRKDFQFYKVREINNYHHAHDAYLNAVVGTALIKKYPKLESEFVYGDYKVYDVRKMIAKSEQEIGKATAKYFFYSNIMNFFKTEITLANGEIRKRPLIETNGETGEIVWDKGRDFATVRKVLSMPQVNIVKKTEVQTGGFSKESILPKRNSDKLIARKKDWDPKKYGGFDSPTVAYSVLVVAKVEKGKSKKLKSVKELLGITIMERSSFEKNPIDFLEAKGYKEVKKDLIIKLPKYSLFELENGRKRMLASAGELQKGNELALPSKYVNFLYLASHYEKLKGSPEDNEQKQLFVEQHKHYLDEIIEQISEFSKRVILADANLDKVLSAYNKHRDKPIREQAENIIHLFTLTNLGAPAAFKYFDTTIDRKRYTSTKEVLDATLIHQSITGLYETRIDLSQLGGDGGGGSPAPGSSGGTLNIEDEYRLHETSKEPDVSLGSTWLSDFPQAWAETGGMGLAVRQAPLIIPLKATSTPVSIKQYPMSQEARLGIKPHIQRLLDQGILVPCQSPWNTPLLPVKKPGTNDYRPVQDLREVNKRVEDIHPTVPNPYNLLSGLPPSHQWYTVLDLKDAFFCLRLHPTSQPLFAFEWRDPEMGISGQLTWTRLPQGFKNSPTLFNEALHRDLAGFRIQHPDLILLQYVDDLLLAATSELDCQQGTRALLQTLGDLGYRASAKKAQICQKQVKYLGYLLKEGQRWLTEARKETVMGQPIPKTPRQLREFLGKAGFCRLFIPGFAEMAAPLYPLTKPGTLFNWGPDQQKAFQEIKQALLTAPALGLPDLTKPFELFVDEKQGYAKGVLTQKLGPWRRPVAYLSKKLDPVAAGWPPCLRMVAAIAVLTKDAGKLTMGQPLVILAPHAVEALVKQPPDRWLSNARMTHYQALLLDTDRVQFGPVVALNPATLLPLPEEGLQHDCLDILAEAHGTRSDLMDQPLPDADHTWYTDGSSFLQEGQRKAGAAVTTETEVIWARALPAGTSAQRAELIALTQALKMAEGKKLNVYTDSRYAFATAHIHGEIYRRRGWLTSEGKEIKNKDEILALLKALFLPKRLSIIHCPGHQKGNSAEARGNRMADQAAREVATRETPETSTLLAGKRTADGSEFEKRTADGSEFESPKKKAKVE

SEQ ID NO: 2388 - protein, 2101 aa, synthetic construct
  source 1..2101: note = Description of Artificial Sequence: Synthetic polypeptide
MPAAKRVKLDGGDKKYSIGLDIGTNSVGWAVITDEYKVPSKKFKVLGNTDRHSIKKNLIGALLFDSGETAEATRLKRTARRRYTRRKNRICYLQEIFSNEMAKVDDSFFHRLEESFLVEEDKKHERHPIFGNIVDEVAYHEKYPTIYHLRKKLVDSTDKADLRLIYLALAHMIKFRGHFLIEGDLNPDNSDVDKLFIQLVQTYNQLFEENPINASGVDAKAILSARLSKSRRLENLIAQLPGEKKNGLFGNLIALSLGLTPNFKSNFDLAEDAKLQLSKDTYDDDLDNLLAQIGDQYADLFLAAKNLSDAILLSDILRVNTEITKAPLSASMIKRYDEHHQDLTLLKALVRQQLPEKYKEIFFDQSKNGYAGYIDGGASQEEFYKFIKPILEKMDGTEELLVKLNREDLLRKQRTFDNGSIPHQIHLGELHAILRRQEDFYPFLKDNREKIEKILTFRIPYYVGPLARGNSRFAWMTRKSEETITPWNFEEVVDKGASAQSFIERMTNFDKNLPNEKVLPKHSLLYEYFTVYNELTKVKYVTEGMRKPAFLSGEQKKAIVDLLFKTNRKVTVKQLKEDYFKKIECFDSVEISGVEDRFNASLGTYHDLLKIIKDKDFLDNEENEDILEDIVLTLTLFEDREMIEERLKTYAHLFDDKVMKQLKRRRYTGWGRLSRKLINGIRDKQSGKTILDFLKSDGFANRNFMQLIHDDSLTFKEDIQKAQVSGQGDSLHEHIANLAGSPAIKKGILQTVKVVDELVKVMGRHKPENIVIEMARENQTTQKGQKNSRERMKRIEEGIKELGSQILKEHPVENTQLQNEKLYLYYLQNGRDMYVDQELDINRLSDYDVDHIVPQSFLKDDSIDNKVLTRSDKARGKSDNVPSEEVVKKMKNYWRQLLNAKLITQRKFDNLTKAERGGLSELDKAGFIKRQLVETRQITKHVAQILDSRMNTKYDENDKLIREVKVITLKSKLVSDFRKDFQFYKVREINNYHHAHDAYLNAVVGTALIKKYPKLESEFVYGDYKVYDVRKMIAKSEQEIGKATAKYFFYSNIMNFFKTEITLANGEIRKRPLIETNGETGEIVWDKGRDFATVRKVLSMPQVNIVKKTEVQTGGFSKESILPKRNSDKLIARKKDWDPKKYGGFDSPTVAYSVLVVAKVEKGKSKKLKSVKELLGITIMERSSFEKNPIDFLEAKGYKEVKKDLIIKLPKYSLFELENGRKRMLASAGELQKGNELALPSKYVNFLYLASHYEKLKGSPEDNEQKQLFVEQHKHYLDEIIEQISEFSKRVILADANLDKVLSAYNKHRDKPIREQAENIIHLFTLTNLGAPAAFKYFDTTIDRKRYTSTKEVLDATLIHQSITGLYETRIDLSQLGGDGGSGSETPGTSESATPESGGTLNIEDEYRLHETSKEPDVSLGSTWLSDFPQAWAETGGMGLAVRQAPLIIPLKATSTPVSIKQYPMSQEARLGIKPHIQRLLDQGILVPCQSPWNTPLLPVKKPGTNDYRPVQDLREVNKRVEDIHPTVPNPYNLLSGLPPSHQWYTVLDLKDAFFCLRLHPTSQPLFAFEWRDPEMGISGQLTWTRLPQGFKNSPTLFNEALHRDLAGFRIQHPDLILLQYVDDLLLAATSELDCQQGTRALLQTLGDLGYRASAKKAQICQKQVKYLGYLLKEGQRWLTEARKETVMGQPIPKTPRQLREFLGKAGFCRLFIPGFAEMAAPLYPLTKPGTLFNWGPDQQKAFQEIKQALLTAPALGLPDLTKPFELFVDEKQGYAKGVLTQKLGPWRRPVAYLSKKLDPVAAGWPPCLRMVAAIAVLTKDAGKLTMGQPLVILAPHAVEALVKQPPDRWLSNARMTHYQALLLDTDRVQFGPVVALNPATLLPLPEEGLQHDCLDILAEAHGTRSDLMDQPLPDADHTWYTDGSSFLQEGQRKAGAAVTTETEVIWARALPAGTSAQRAELIALTQALKMAEGKKLNVYTDSRYAFATAHIHGEIYRRRGWLTSEGKEIKNKDEILALLKALFLPKRLSIIHCPGHQKGNSAEARGNRMADQAAREVATRETPETSTLLAGKRTADGSEFEKRTADGSEFESPKKKAKVE

SEQ ID NO: 2389 - protein, 2091 aa, synthetic construct
  source 1..2091: note = Description of Artificial Sequence: Synthetic polypeptide
MPAAKRVKLDGGDKKYSIGLDIGTNSVGWAVITDEYKVPSKKFKVLGNTDRHSIKKNLIGALLFDSGETAEATRLKRTARRRYTRRKNRICYLQEIFSNEMAKVDDSFFHRLEESFLVEEDKKHERHPIFGNIVDEVAYHEKYPTIYHLRKKLVDSTDKADLRLIYLALAHMIKFRGHFLIEGDLNPDNSDVDKLFIQLVQTYNQLFEENPINASGVDAKAILSARLSKSRRLENLIAQLPGEKKNGLFGNLIALSLGLTPNFKSNFDLAEDAKLQLSKDTYDDDLDNLLAQIGDQYADLFLAAKNLSDAILLSDILRVNTEITKAPLSASMIKRYDEHHQDLTLLKALVRQQLPEKYKEIFFDQSKNGYAGYIDGGASQEEFYKFIKPILEKMDGTEELLVKLNREDLLRKQRTFDNGSIPHQIHLGELHAILRRQEDFYPFLKDNREKIEKILTFRIPYYVGPLARGNSRFAWMTRKSEETITPWNFEEVVDKGASAQSFIERMTNFDKNLPNEKVLPKHSLLYEYFTVYNELTKVKYVTEGMRKPAFLSGEQKKAIVDLLFKTNRKVTVKQLKEDYFKKIECFDSVEISGVEDRFNASLGTYHDLLKIIKDKDFLDNEENEDILEDIVLTLTLFEDREMIEERLKTYAHLFDDKVMKQLKRRRYTGWGRLSRKLINGIRDKQSGKTILDFLKSDGFANRNFMQLIHDDSLTFKEDIQKAQVSGQGDSLHEHIANLAGSPAIKKGILQTVKVVDELVKVMGRHKPENIVIEMARENQTTQKGQKNSRERMKRIEEGIKELGSQILKEHPVENTQLQNEKLYLYYLQNGRDMYVDQELDINRLSDYDVDHIVPQSFLKDDSIDNKVLTRSDKARGKSDNVPSEEVVKKMKNYWRQLLNAKLITQRKFDNLTKAERGGLSELDKAGFIKRQLVETRQITKHVAQILDSRMNTKYDENDKLIREVKVITLKSKLVSDFRKDFQFYKVREINNYHHAHDAYLNAVVGTALIKKYPKLESEFVYGDYKVYDVRKMIAKSEQEIGKATAKYFFYSNIMNFFKTEITLANGEIRKRPLIETNGETGEIVWDKGRDFATVRKVLSMPQVNIVKKTEVQTGGFSKESILPKRNSDKLIARKKDWDPKKYGGFDSPTVAYSVLVVAKVEKGKSKKLKSVKELLGITIMERSSFEKNPIDFLEAKGYKEVKKDLIIKLPKYSLFELENGRKRMLASAGELQKGNELALPSKYVNFLYLASHYEKLKGSPEDNEQKQLFVEQHKHYLDEIIEQISEFSKRVILADANLDKVLSAYNKHRDKPIREQAENIIHLFTLTNLGAPAAFKYFDTTIDRKRYTSTKEVLDATLIHQSITGLYETRIDLSQLGGDGGGGSPAPGGTLNIEDEYRLHETSKEPDVSLGSTWLSDFPQAWAETGGMGLAVRQAPLIIPLKATSTPVSIKQYPMSQEARLGIKPHIQRLLDQGILVPCQSPWNTPLLPVKKPGTNDYRPVQDLREVNKRVEDIHPTVPNPYNLLSGLPPSHQWYTVLDLKDAFFCLRLHPTSQPLFAFEWRDPEMGISGQLTWTRLPQGFKNSPTLFNEALHRDLAGFRIQHPDLILLQYVDDLLLAATSELDCQQGTRALLQTLGDLGYRASAKKAQICQKQVKYLGYLLKEGQRWLTEARKETVMGQPIPKTPRQLREFLGKAGFCRLFIPGFAEMAAPLYPLTKPGTLFNWGPDQQKAFQEIKQALLTAPALGLPDLTKPFELFVDEKQGYAKGVLTQKLGPWRRPVAYLSKKLDPVAAGWPPCLRMVAAIAVLTKDAGKLTMGQPLVILAPHAVEALVKQPPDRWLSNARMTHYQALLLDTDRVQFGPVVALNPATLLPLPEEGLQHDCLDILAEAHGTRSDLMDQPLPDADHTWYTDGSSFLQEGQRKAGAAVTTETEVIWARALPAGTSAQRAELIALTQALKMAEGKKLNVYTDSRYAFATAHIHGEIYRRRGWLTSEGKEIKNKDEILALLKALFLPKRLSIIHCPGHQKGNSAEARGNRMADQAAREVATRETPETSTLLAGKRTADGSEFEKRTADGSEFESPKKKAKVE

SEQ ID NO: 2390 - protein, 2096 aa, synthetic construct
  source 1..2096: note = Description of Artificial Sequence: Synthetic polypeptide
MPAAKRVKLDGGDKKYSIGLDIGTNSVGWAVITDEYKVPSKKFKVLGNTDRHSIKKNLIGALLFDSGETAEATRLKRTARRRYTRRKNRICYLQEIFSNEMAKVDDSFFHRLEESFLVEEDKKHERHPIFGNIVDEVAYHEKYPTIYHLRKKLVDSTDKADLRLIYLALAHMIKFRGHFLIEGDLNPDNSDVDKLFIQLVQTYNQLFEENPINASGVDAKAILSARLSKSRRLENLIAQLPGEKKNGLFGNLIALSLGLTPNFKSNFDLAEDAKLQLSKDTYDDDLDNLLAQIGDQYADLFLAAKNLSDAILLSDILRVNTEITKAPLSASMIKRYDEHHQDLTLLKALVRQQLPEKYKEIFFDQSKNGYAGYIDGGASQEEFYKFIKPILEKMDGTEELLVKLNREDLLRKQRTFDNGSIPHQIHLGELHAILRRQEDFYPFLKDNREKIEKILTFRIPYYVGPLARGNSRFAWMTRKSEETITPWNFEEVVDKGASAQSFIERMTNFDKNLPNEKVLPKHSLLYEYFTVYNELTKVKYVTEGMRKPAFLSGEQKKAIVDLLFKTNRKVTVKQLKEDYFKKIECFDSVEISGVEDRFNASLGTYHDLLKIIKDKDFLDNEENEDILEDIVLTLTLFEDREMIEERLKTYAHLFDDKVMKQLKRRRYTGWGRLSRKLINGIRDKQSGKTILDFLKSDGFANRNFMQLIHDDSLTFKEDIQKAQVSGQGDSLHEHIANLAGSPAIKKGILQTVKVVDELVKVMGRHKPENIVIEMARENQTTQKGQKNSRERMKRIEEGIKELGSQILKEHPVENTQLQNEKLYLYYLQNGRDMYVDQELDINRLSDYDVDHIVPQSFLKDDSIDNKVLTRSDKARGKSDNVPSEEVVKKMKNYWRQLLNAKLITQRKFDNLTKAERGGLSELDKAGFIKRQLVETRQITKHVAQILDSRMNTKYDENDKLIREVKVITLKSKLVSDFRKDFQFYKVREINNYHHAHDAYLNAVVGTALIKKYPKLESEFVYGDYKVYDVRKMIAKSEQEIGKATAKYFFYSNIMNFFKTEITLANGEIRKRPLIETNGETGEIVWDKGRDFATVRKVLSMPQVNIVKKTEVQTGGFSKESILPKRNSDKLIARKKDWDPKKYGGFDSPTVAYSVLVVAKVEKGKSKKLKSVKELLGITIMERSSFEKNPIDFLEAKGYKEVKKDLIIKLPKYSLFELENGRKRMLASAGELQKGNELALPSKYVNFLYLASHYEKLKGSPEDNEQKQLFVEQHKHYLDEIIEQISEFSKRVILADANLDKVLSAYNKHRDKPIREQAENIIHLFTLTNLGAPAAFKYFDTTIDRKRYTSTKEVLDATLIHQSITGLYETRIDLSQLGGDGGGSSGGGEAAAKGGTLNIEDEYRLHETSKEPDVSLGSTWLSDFPQAWAETGGMGLAVRQAPLIIPLKATSTPVSIKQYPMSQEARLGIKPHIQRLLDQGILVPCQSPWNTPLLPVKKPGTNDYRPVQDLREVNKRVEDIHPTVPNPYNLLSGLPPSHQWYTVLDLKDAFFCLRLHPTSQPLFAFEWRDPEMGISGQLTWTRLPQGFKNSPTLFNEALHRDLAGFRIQHPDLILLQYVDDLLLAATSELDCQQGTRALLQTLGDLGYRASAKKAQICQKQVKYLGYLLKEGQRWLTEARKETVMGQPIPKTPRQLREFLGKAGFCRLFIPGFAEMAAPLYPLTKPGTLFNWGPDQQKAFQEIKQALLTAPALGLPDLTKPFELFVDEKQGYAKGVLTQKLGPWRRPVAYLSKKLDPVAAGWPPCLRMVAAIAVLTKDAGKLTMGQPLVILAPHAVEALVKQPPDRWLSNARMTHYQALLLDTDRVQFGPVVALNPATLLPLPEEGLQHDCLDILAEAHGTRSDLMDQPLPDADHTWYTDGSSFLQEGQRKAGAAVTTETEVIWARALPAGTSAQRAELIALTQALKMAEGKKLNVYTDSRYAFATAHIHGEIYRRRGWLTSEGKEIKNKDEILALLKALFLPKRLSIIHCPGHQKGNSAEARGNRMADQAAREVATRETPETSTLLAGKRTADGSEFEKRTADGSEFESPKKKAKVE

SEQ ID NO: 2391 - protein, 2096 aa, synthetic construct
  source 1..2096: note = Description of Artificial Sequence: Synthetic polypeptide
MPAAKRVKLDGGDKKYSIGLDIGTNSVGWAVITDEYKVPSKKFKVLGNTDRHSIKKNLIGALLFDSGETAEATRLKRTARRRYTRRKNRICYLQEIFSNEMAKVDDSFFHRLEESFLVEEDKKHERHPIFGNIVDEVAYHEKYPTIYHLRKKLVDSTDKADLRLIYLALAHMIKFRGHFLIEGDLNPDNSDVDKLFIQLVQTYNQLFEENPINASGVDAKAILSARLSKSRRLENLIAQLPGEKKNGLFGNLIALSLGLTPNFKSNFDLAEDAKLQLSKDTYDDDLDNLLAQIGDQYADLFLAAKNLSDAILLSDILRVNTEITKAPLSASMIKRYDEHHQDLTLLKALVRQQLPEKYKEIFFDQSKNGYAGYIDGGASQEEFYKFIKPILEKMDGTEELLVKLNREDLLRKQRTFDNGSIPHQIHLGELHAILRRQEDFYPFLKDNREKIEKILTFRIPYYVGPLARGNSRFAWMTRKSEETITPWNFEEVVDKGASAQSFIERMTNFDKNLPNEKVLPKHSLLYEYFTVYNELTKVKYVTEGMRKPAFLSGEQKKAIVDLLFKTNRKVTVKQLKEDYFKKIECFDSVEISGVEDRFNASLGTYHDLLKIIKDKDFLDNEENEDILEDIVLTLTLFEDREMIEERLKTYAHLFDDKVMKQLKRRRYTGWGRLSRKLINGIRDKQSGKTILDFLKSDGFANRNFMQLIHDDSLTFKEDIQKAQVSGQGDSLHEHIANLAGSPAIKKGILQTVKVVDELVKVMGRHKPENIVIEMARENQTTQKGQKNSRERMKRIEEGIKELGSQILKEHPVENTQLQNEKLYLYYLQNGRDMYVDQELDINRLSDYDVDHIVPQSFLKDDSIDNKVLTRSDKARGKSDNVPSEEVVKKMKNYWRQLLNAKLITQRKFDNLTKAERGGLSELDKAGFIKRQLVETRQITKHVAQILDSRMNTKYDENDKLIREVKVITLKSKLVSDFRKDFQFYKVREINNYHHAHDAYLNAVVGTALIKKYPKLESEFVYGDYKVYDVRKMIAKSEQEIGKATAKYFFYSNIMNFFKTEITLANGEIRKRPLIETNGETGEIVWDKGRDFATVRKVLSMPQVNIVKKTEVQTGGFSKESILPKRNSDKLIARKKDWDPKKYGGFDSPTVAYSVLVVAKVEKGKSKKLKSVKELLGITIMERSSFEKNPIDFLEAKGYKEVKKDLIIKLPKYSLFELENGRKRMLASAGELQKGNELALPSKYVNFLYLASHYEKLKGSPEDNEQKQLFVEQHKHYLDEIIEQISEFSKRVILADANLDKVLSAYNKHRDKPIREQAENIIHLFTLTNLGAPAAFKYFDTTIDRKRYTSTKEVLDATLIHQSITGLYETRIDLSQLGGDGGEAAAKGGGPAPGGTLNIEDEYRLHETSKEPDVSLGSTWLSDFPQAWAETGGMGLAVRQAPLIIPLKATSTPVSIKQYPMSQEARLGIKPHIQRLLDQGILVPCQSPWNTPLLPVKKPGTNDYRPVQDLREVNKRVEDIHPTVPNPYNLLSGLPPSHQWYTVLDLKDAFFCLRLHPTSQPLFAFEWRDPEMGISGQLTWTRLPQGFKNSPTLFNEALHRDLAGFRIQHPDLILLQYVDDLLLAATSELDCQQGTRALLQTLGDLGYRASAKKAQICQKQVKYLGYLLKEGQRWLTEARKETVMGQPIPKTPRQLREFLGKAGFCRLFIPGFAEMAAPLYPLTKPGTLFNWGPDQQKAFQEIKQALLTAPALGLPDLTKPFELFVDEKQGYAKGVLTQKLGPWRRPVAYLSKKLDPVAAGWPPCLRMVAAIAVLTKDAGKLTMGQPLVILAPHAVEALVKQPPDRWLSNARMTHYQALLLDTDRVQFGPVVALNPATLLPLPEEGLQHDCLDILAEAHGTRSDLMDQPLPDADHTWYTDGSSFLQEGQRKAGAAVTTETEVIWARALPAGTSAQRAELIALTQALKMAEGKKLNVYTDSRYAFATAHIHGEIYRRRGWLTSEGKEIKNKDEILALLKALFLPKRLSIIHCPGHQKGNSAEARGNRMADQAAREVATRETPETSTLLAGKRTADGSEFEKRTADGSEFESPKKKAKVE

SEQ ID NO: 2392 - protein, 2096 aa, synthetic construct
  source 1..2096: note = Description of Artificial Sequence: Synthetic polypeptide
MPAAKRVKLDGGDKKYSIGLDIGTNSVGWAVITDEYKVPSKKFKVLGNTDRHSIKKNLIGALLFDSGETAEATRLKRTARRRYTRRKNRICYLQEIFSNEMAKVDDSFFHRLEESFLVEEDKKHERHPIFGNIVDEVAYHEKYPTIYHLRKKLVDSTDKADLRLIYLALAHMIKFRGHFLIEGDLNPDNSDVDKLFIQLVQTYNQLFEENPINASGVDAKAILSARLSKSRRLENLIAQLPGEKKNGLFGNLIALSLGLTPNFKSNFDLAEDAKLQLSKDTYDDDLDNLLAQIGDQYADLFLAAKNLSDAILLSDILRVNTEITKAPLSASMIKRYDEHHQDLTLLKALVRQQLPEKYKEIFFDQSKNGYAGYIDGGASQEEFYKFIKPILEKMDGTEELLVKLNREDLLRKQRTFDNGSIPHQIHLGELHAILRRQEDFYPFLKDNREKIEKILTFRIPYYVGPLARGNSRFAWMTRKSEETITPWNFEEVVDKGASAQSFIERMTNFDKNLPNEKVLPKHSLLYEYFTVYNELTKVKYVTEGMRKPAFLSGEQKKAIVDLLFKTNRKVTVKQLKEDYFKKIECFDSVEISGVEDRFNASLGTYHDLLKIIKDKDFLDNEENEDILEDIVLTLTLFEDREMIEERLKTYAHLFDDKVMKQLKRRRYTGWGRLSRKLINGIRDKQSGKTILDFLKSDGFANRNFMQLIHDDSLTFKEDIQKAQVSGQGDSLHEHIANLAGSPAIKKGILQTVKVVDELVKVMGRHKPENIVIEMARENQTTQKGQKNSRERMKRIEEGIKELGSQILKEHPVENTQLQNEKLYLYYLQNGRDMYVDQELDINRLSDYDVDHIVPQSFLKDDSIDNKVLTRSDKARGKSDNVPSEEVVKKMKNYWRQLLNAKLITQRKFDNLTKAERGGLSELDKAGFIKRQLVETRQITKHVAQILDSRMNTKYDENDKLIREVKVITLKSKLVSDFRKDFQFYKVREINNYHHAHDAYLNAVVGTALIKKYPKLESEFVYGDYKVYDVRKMIAKSEQEIGKATAKYFFYSNIMNFFKTEITLANGEIRKRPLIETNGETGEIVWDKGRDFATVRKVLSMPQVNIVKKTEVQTGGFSKESILPKRNSDKLIARKKDWDPKKYGGFDSPTVAYSVLVVAKVEKGKSKKLKSVKELLGITIMERSSFEKNPIDFLEAKGYKEVKKDLIIKLPKYSLFELENGRKRMLASAGELQKGNELALPSKYVNFLYLASHYEKLKGSPEDNEQKQLFVEQHKHYLDEIIEQISEFSKRVILADANLDKVLSAYNKHRDKPIREQAENIIHLFTLTNLGAPAAFKYFDTTIDRKRYTSTKEVLDATLIHQSITGLYETRIDLSQLGGDGGGGGPAPEAAAKGGTLNIEDEYRLHETSKEPDVSLGSTWLSDFPQAWAETGGMGLAVRQAPLIIPLKATSTPVSIKQYPMSQEARLGIKPHIQRLLDQGILVPCQSPWNTPLLPVKKPGTNDYRPVQDLREVNKRVEDIHPTVPNPYNLLSGLPPSHQWYTVLDLKDAFFCLRLHPTSQPLFAFEWRDPEMGISGQLTWTRLPQGFKNSPTLFNEALHRDLAGFRIQHPDLILLQYVDDLLLAATSELDCQQGTRALLQTLGDLGYRASAKKAQICQKQVKYLGYLLKEGQRWLTEARKETVMGQPIPKTPRQLREFLGKAGFCRLFIPGFAEMAAPLYPLTKPGTLFNWGPDQQKAFQEIKQALLTAPALGLPDLTKPFELFVDEKQGYAKGVLTQKLGPWRRPVAYLSKKLDPVAAGWPPCLRMVAAIAVLTKDAGKLTMGQPLVILAPHAVEALVKQPPDRWLSNARMTHYQALLLDTDRVQFGPVVALNPATLLPLPEEGLQHDCLDILAEAHGTRSDLMDQPLPDADHTWYTDGSSFLQEGQRKAGAAVTTETEVIWARALPAGTSAQRAELIALTQALKMAEGKKLNVYTDSRYAFATAHIHGEIYRRRGWLTSEGKEIKNKDEILALLKALFLPKRLSIIHCPGHQKGNSAEARGNRMADQAAREVATRETPETSTLLAGKRTADGSEFEKRTADGSEFESPKKKAKVE

SEQ ID NO: 2393 - protein, 2094 aa, synthetic construct
  source 1..2094: note = Description of Artificial Sequence: Synthetic polypeptide
MPAAKRVKLDGGDKKYSIGLDIGTNSVGWAVITDEYKVPSKKFKVLGNTDRHSIKKNLIGALLFDSGETAEATRLKRTARRRYTRRKNRICYLQEIFSNEMAKVDDSFFHRLEESFLVEEDKKHERHPIFGNIVDEVAYHEKYPTIYHLRKKLVDSTDKADLRLIYLALAHMIKFRGHFLIEGDLNPDNSDVDKLFIQLVQTYNQLFEENPINASGVDAKAILSARLSKSRRLENLIAQLPGEKKNGLFGNLIALSLGLTPNFKSNFDLAEDAKLQLSKDTYDDDLDNLLAQIGDQYADLFLAAKNLSDAILLSDILRVNTEITKAPLSASMIKRYDEHHQDLTLLKALVRQQLPEKYKEIFFDQSKNGYAGYIDGGASQEEFYKFIKPILEKMDGTEELLVKLNREDLLRKQRTFDNGSIPHQIHLGELHAILRRQEDFYPFLKDNREKIEKILTFRIPYYVGPLARGNSRFAWMTRKSEETITPWNFEEVVDKGASAQSFIERMTNFDKNLPNEKVLPKHSLLYEYFTVYNELTKVKYVTEGMRKPAFLSGEQKKAIVDLLFKTNRKVTVKQLKEDYFKKIECFDSVEISGVEDRFNASLGTYHDLLKIIKDKDFLDNEENEDILEDIVLTLTLFEDREMIEERLKTYAHLFDDKVMKQLKRRRYTGWGRLSRKLINGIRDKQSGKTILDFLKSDGFANRNFMQLIHDDSLTFKEDIQKAQVSGQGDSLHEHIANLAGSPAIKKGILQTVKVVDELVKVMGRHKPENIVIEMARENQTTQKGQKNSRERMKRIEEGIKELGSQILKEHPVENTQLQNEKLYLYYLQNGRDMYVDQELDINRLSDYDVDHIVPQSFLKDDSIDNKVLTRSDKARGKSDNVPSEEVVKKMKNYWRQLLNAKLITQRKFDNLTKAERGGLSELDKAGFIKRQLVETRQITKHVAQILDSRMNTKYDENDKLIREVKVITLKSKLVSDFRKDFQFYKVREINNYHHAHDAYLNAVVGTALIKKYPKLESEFVYGDYKVYDVRKMIAKSEQEIGKATAKYFFYSNIMNFFKTEITLANGEIRKRPLIETNGETGEIVWDKGRDFATVRKVLSMPQVNIVKKTEVQTGGFSKESILPKRNSDKLIARKKDWDPKKYGGFDSPTVAYSVLVVAKVEKGKSKKLKSVKELLGITIMERSSFEKNPIDFLEAKGYKEVKKDLIIKLPKYSLFELENGRKRMLASAGELQKGNELALPSKYVNFLYLASHYEKLKGSPEDNEQKQLFVEQHKHYLDEIIEQISEFSKRVILADANLDKVLSAYNKHRDKPIREQAENIIHLFTLTNLGAPAAFKYFDTTIDRKRYTSTKEVLDATLIHQSITGLYETRIDLSQLGGDGGGSSGSSGSSGGTLNIEDEYRLHETSKEPDVSLGSTWLSDFPQAWAETGGMGLAVRQAPLIIPLKATSTPVSIKQYPMSQEARLGIKPHIQRLLDQGILVPCQSPWNTPLLPVKKPGTNDYRPVQDLREVNKRVEDIHPTVPNPYNLLSGLPPSHQWYTVLDLKDAFFCLRLHPTSQPLFAFEWRDPEMGISGQLTWTRLPQGFKNSPTLFNEALHRDLAGFRIQHPDLILLQYVDDLLLAATSELDCQQGTRALLQTLGDLGYRASAKKAQICQKQVKYLGYLLKEGQRWLTEARKETVMGQPIPKTPRQLREFLGKAGFCRLFIPGFAEMAAPLYPLTKPGTLFNWGPDQQKAFQEIKQALLTAPALGLPDLTKPFELFVDEKQGYAKGVLTQKLGPWRRPVAYLSKKLDPVAAGWPPCLRMVAAIAVLTKDAGKLTMGQPLVILAPHAVEALVKQPPDRWLSNARMTHYQALLLDTDRVQFGPVVALNPATLLPLPEEGLQHDCLDILAEAHGTRSDLMDQPLPDADHTWYTDGSSFLQEGQRKAGAAVTTETEVIWARALPAGTSAQRAELIALTQALKMAEGKKLNVYTDSRYAFATAHIHGEIYRRRGWLTSEGKEIKNKDEILALLKALFLPKRLSIIHCPGHQKGNSAEARGNRMADQAAREVATRETPETSTLLAGKRTADGSEFEKRTADGSEFESPKKKAKVE

SEQ ID NO: 2394 - protein, 2092 aa, synthetic construct
  source 1..2092: note = Description of Artificial Sequence: Synthetic polypeptide
MPAAKRVKLDGGDKKYSIGLDIGTNSVGWAVITDEYKVPSKKFKVLGNTDRHSIKKNLIGALLFDSGETAEATRLKRTARRRYTRRKNRICYLQEIFSNEMAKVDDSFFHRLEESFLVEEDKKHERHPIFGNIVDEVAYHEKYPTIYHLRKKLVDSTDKADLRLIYLALAHMIKFRGHFLIEGDLNPDNSDVDKLFIQLVQTYNQLFEENPINASGVDAKAILSARLSKSRRLENLIAQLPGEKKNGLFGNLIALSLGLTPNFKSNFDLAEDAKLQLSKDTYDDDLDNLLAQIGDQYADLFLAAKNLSDAILLSDILRVNTEITKAPLSASMIKRYDEHHQDLTLLKALVRQQLPEKYKEIFFDQSKNGYAGYIDGGASQEEFYKFIKPILEKMDGTEELLVKLNREDLLRKQRTFDNGSIPHQIHLGELHAILRRQEDFYPFLKDNREKIEKILTFRIPYYVGPLARGNSRFAWMTRKSEETITPWNFEEVVDKGASAQSFIERMTNFDKNLPNEKVLPKHSLLYEYFTVYNELTKVKYVTEGMRKPAFLSGEQKKAIVDLLFKTNRKVTVKQLKEDYFKKIECFDSVEISGVEDRFNASLGTYHDLLKIIKDKDFLDNEENEDILEDIVLTLTLFEDREMIEERLKTYAHLFDDKVMKQLKRRRYTGWGRLSRKLINGIRDKQSGKTILDFLKSDGFANRNFMQLIHDDSLTFKEDIQKAQVSGQGDSLHEHIANLAGSPAIKKGILQTVKVVDELVKVMGRHKPENIVIEMARENQTTQKGQKNSRERMKRIEEGIKELGSQILKEHPVENTQLQNEKLYLYYLQNGRDMYVDQELDINRLSDYDVDHIVPQSFLKDDSIDNKVLTRSDKARGKSDNVPSEEVVKKMKNYWRQLLNAKLITQRKFDNLTKAERGGLSELDKAGFIKRQLVETRQITKHVAQILDSRMNTKYDENDKLIREVKVITLKSKLVSDFRKDFQFYKVREINNYHHAHDAYLNAVVGTALIKKYPKLESEFVYGDYKVYDVRKMIAKSEQEIGKATAKYFFYSNIMNFFKTEITLANGEIRKRPLIETNGETGEIVWDKGRDFATVRKVLSMPQVNIVKKTEVQTGGFSKESILPKRNSDKLIARKKDWDPKKYGGFDSPTVAYSVLVVAKVEKGKSKKLKSVKELLGITIMERSSFEKNPIDFLEAKGYKEVKKDLIIKLPKYSLFELENGRKRMLASAGELQKGNELALPSKYVNFLYLASHYEKLKGSPEDNEQKQLFVEQHKHYLDEIIEQISEFSKRVILADANLDKVLSAYNKHRDKPIREQAENIIHLFTLTNLGAPAAFKYFDTTIDRKRYTSTKEVLDATLIHQSITGLYETRIDLSQLGGDGGPAPAPAPGGTLNIEDEYRLHETSKEPDVSLGSTWLSDFPQAWAETGGMGLAVRQAPLIIPLKATSTPVSIKQYPMSQEARLGIKPHIQRLLDQGILVPCQSPWNTPLLPVKKPGTNDYRPVQDLREVNKRVEDIHPTVPNPYNLLSGLPPSHQWYTVLDLKDAFFCLRLHPTSQPLFAFEWRDPEMGISGQLTWTRLPQGFKNSPTLFNEALHRDLAGFRIQHPDLILLQYVDDLLLAATSELDCQQGTRALLQTLGDLGYRASAKKAQICQKQVKYLGYLLKEGQRWLTEARKETVMGQPIPKTPRQLREFLGKAGFCRLFIPGFAEMAAPLYPLTKPGTLFNWGPDQQKAFQEIKQALLTAPALGLPDLTKPFELFVDEKQGYAKGVLTQKLGPWRRPVAYLSKKLDPVAAGWPPCLRMVAAIAVLTKDAGKLTMGQPLVILAPHAVEALVKQPPDRWLSNARMTHYQALLLDTDRVQFGPVVALNPATLLPLPEEGLQHDCLDILAEAHGTRSDLMDQPLPDADHTWYTDGSSFLQEGQRKAGAAVTTETEVIWARALPAGTSAQRAELIALTQALKMAEGKKLNVYTDSRYAFATAHIHGEIYRRRGWLTSEGKEIKNKDEILALLKALFLPKRLSIIHCPGHQKGNSAEARGNRMADQAAREVATRETPETSTLLAGKRTADGSEFEKRTADGSEFESPKKKAKVE

SEQ ID NO: 2395 - protein, 2091 aa, synthetic construct
  source 1..2091: note = Description of Artificial Sequence: Synthetic polypeptide
MPAAKRVKLDGGDKKYSIGLDIGTNSVGWAVITDEYKVPSKKFKVLGNTDRHSIKKNLIGALLFDSGETAEATRLKRTARRRYTRRKNRICYLQEIFSNEMAKVDDSFFHRLEESFLVEEDKKHERHPIFGNIVDEVAYHEKYPTIYHLRKKLVDSTDKADLRLIYLALAHMIKFRGHFLIEGDLNPDNSDVDKLFIQLVQTYNQLFEENPINASGVDAKAILSARLSKSRRLENLIAQLPGEKKNGLFGNLIALSLGLTPNFKSNFDLAEDAKLQLSKDTYDDDLDNLLAQIGDQYADLFLAAKNLSDAILLSDILRVNTEITKAPLSASMIKRYDEHHQDLTLLKALVRQQLPEKYKEIFFDQSKNGYAGYIDGGASQEEFYKFIKPILEKMDGTEELLVKLNREDLLRKQRTFDNGSIPHQIHLGELHAILRRQEDFYPFLKDNREKIEKILTFRIPYYVGPLARGNSRFAWMTRKSEETITPWNFEEVVDKGASAQSFIERMTNFDKNLPNEKVLPKHSLLYEYFTVYNELTKVKYVTEGMRKPAFLSGEQKKAIVDLLFKTNRKVTVKQLKEDYFKKIECFDSVEISGVEDRFNASLGTYHDLLKIIKDKDFLDNEENEDILEDIVLTLTLFEDREMIEERLKTYAHLFDDKVMKQLKRRRYTGWGRLSRKLINGIRDKQSGKTILDFLKSDGFANRNFMQLIHDDSLTFKEDIQKAQVSGQGDSLHEHIANLAGSPAIKKGILQTVKVVDELVKVMGRHKPENIVIEMARENQTTQKGQKNSRERMKRIEEGIKELGSQILKEHPVENTQLQNEKLYLYYLQNGRDMYVDQELDINRLSDYDVDHIVPQSFLKDDSIDNKVLTRSDKARGKSDNVPSEEVVKKMKNYWRQLLNAKLITQRKFDNLTKAERGGLSELDKAGFIKRQLVETRQITKHVAQILDSRMNTKYDENDKLIREVKVITLKSKLVSDFRKDFQFYKVREINNYHHAHDAYLNAVVGTALIKKYPKLESEFVYGDYKVYDVRKMIAKSEQEIGKATAKYFFYSNIMNFFKTEITLANGEIRKRPLIETNGETGEIVWDKGRDFATVRKVLSMPQVNIVKKTEVQTGGFSKESILPKRNSDKLIARKKDWDPKKYGGFDSPTVAYSVLVVAKVEKGKSKKLKSVKELLGITIMERSSFEKNPIDFLEAKGYKEVKKDLIIKLPKYSLFELENGRKRMLASAGELQKGNELALPSKYVNFLYLASHYEKLKGSPEDNEQKQLFVEQHKHYLDEIIEQISEFSKRVILADANLDKVLSAYNKHRDKPIREQAENIIHLFTLTNLGAPAAFKYFDTTIDRKRYTSTKEVLDATLIHQSITGLYETRIDLSQLGGDGGPAPGGGGGTLNIEDEYRLHETSKEPDVSLGSTWLSDFPQAWAETGGMGLAVRQAPLIIPLKATSTPVSIKQYPMSQEARLGIKPHIQRLLDQGILVPCQSPWNTPLLPVKKPGTNDYRPVQDLREVNKRVEDIHPTVPNPYNLLSGLPPSHQWYTVLDLKDAFFCLRLHPTSQPLFAFEWRDPEMGISGQLTWTRLPQGFKNSPTLFNEALHRDLAGFRIQHPDLILLQYVDDLLLAATSELDCQQGTRALLQTLGDLGYRASAKKAQICQKQVKYLGYLLKEGQRWLTEARKETVMGQPIPKTPRQLREFLGKAGFCRLFIPGFAEMAAPLYPLTKPGTLFNWGPDQQKAFQEIKQALLTAPALGLPDLTKPFELFVDEKQGYAKGVLTQKLGPWRRPVAYLSKKLDPVAAGWPPCLRMVAAIAVLTKDAGKLTMGQPLVILAPHAVEALVKQPPDRWLSNARMTHYQALLLDTDRVQFGPVVALNPATLLPLPEEGLQHDCLDILAEAHGTRSDLMDQPLPDADHTWYTDGSSFLQEGQRKAGAAVTTETEVIWARALPAGTSAQRAELIALTQALKMAEGKKLNVYTDSRYAFATAHIHGEIYRRRGWLTSEGKEIKNKDEILALLKALFLPKRLSIIHCPGHQKGNSAEARGNRMADQAAREVATRETPETSTLLAGKRTADGSEFEKRTADGSEFESPKKKAKVE

SEQ ID NO: 2396 - protein, 2097 aa, synthetic construct
  source 1..2097: note = Description of Artificial Sequence: Synthetic polypeptide
MPAAKRVKLDGGDKKYSIGLDIGTNSVGWAVITDEYKVPSKKFKVLGNTDRHSIKKNLIGALLFDSGETAEATRLKRTARRRYTRRKNRICYLQEIFSNEMAKVDDSFFHRLEESFLVEEDKKHERHPIFGNIVDEVAYHEKYPTIYHLRKKLVDSTDKADLRLIYLALAHMIKFRGHFLIEGDLNPDNSDVDKLFIQLVQTYNQLFEENPINASGVDAKAILSARLSKSRRLENLIAQLPGEKKNGLFGNLIALSLGLTPNFKSNFDLAEDAKLQLSKDTYDDDLDNLLAQIGDQYADLFLAAKNLSDAILLSDILRVNTEITKAPLSASMIKRYDEHHQDLTLLKALVRQQLPEKYKEIFFDQSKNGYAGYIDGGASQEEFYKFIKPILEKMDGTEELLVKLNREDLLRKQRTFDNGSIPHQIHLGELHAILRRQEDFYPFLKDNREKIEKILTFRIPYYVGPLARGNSRFAWMTRKSEETITPWNFEEVVDKGASAQSFIERMTNFDKNLPNEKVLPKHSLLYEYFTVYNELTKVKYVTEGMRKPAFLSGEQKKAIVDLLFKTNRKVTVKQLKEDYFKKIECFDSVEISGVEDRFNASLGTYHDLLKIIKDKDFLDNEENEDILEDIVLTLTLFEDREMIEERLKTYAHLFDDKVMKQLKRRRYTGWGRLSRKLINGIRDKQSGKTILDFLKSDGFANRNFMQLIHDDSLTFKEDIQKAQVSGQGDSLHEHIANLAGSPAIKKGILQTVKVVDELVKVMGRHKPENIVIEMARENQTTQKGQKNSRERMKRIEEGIKELGSQILKEHPVENTQLQNEKLYLYYLQNGRDMYVDQELDINRLSDYDVDHIVPQSFLKDDSIDNKVLTRSDKARGKSDNVPSEEVVKKMKNYWRQLLNAKLITQRKFDNLTKAERGGLSELDKAGFIKRQLVETRQITKHVAQILDSRMNTKYDENDKLIREVKVITLKSKLVSDFRKDFQFYKVREINNYHHAHDAYLNAVVGTALIKKYPKLESEFVYGDYKVYDVRKMIAKSEQEIGKATAKYFFYSNIMNFFKTEITLANGEIRKRPLIETNGETGEIVWDKGRDFATVRKVLSMPQVNIVKKTEVQTGGFSKESILPKRNSDKLIARKKDWDPKKYGGFDSPTVAYSVLVVAKVEKGKSKKLKSVKELLGITIMERSSFEKNPIDFLEAKGYKEVKKDLIIKLPKYSLFELENGRKRMLASAGELQKGNELALPSKYVNFLYLASHYEKLKGSPEDNEQKQLFVEQHKHYLDEIIEQISEFSKRVILADANLDKVLSAYNKHRDKPIREQAENIIHLFTLTNLGAPAAFKYFDTTIDRKRYTSTKEVLDATLIHQSITGLYETRIDLSQLGGDGGGSSGSSGSSGSSGGTLNIEDEYRLHETSKEPDVSLGSTWLSDFPQAWAETGGMGLAVRQAPLIIPLKATSTPVSIKQYPMSQEARLGIKPHIQRLLDQGILVPCQSPWNTPLLPVKKPGTNDYRPVQDLREVNKRVEDIHPTVPNPYNLLSGLPPSHQWYTVLDLKDAFFCLRLHPTSQPLFAFEWRDPEMGISGQLTWTRLPQGFKNSPTLFNEALHRDLAGFRIQHPDLILLQYVDDLLLAATSELDCQQGTRALLQTLGDLGYRASAKKAQICQKQVKYLGYLLKEGQRWLTEARKETVMGQPIPKTPRQLREFLGKAGFCRLFIPGFAEMAAPLYPLTKPGTLFNWGPDQQKAFQEIKQALLTAPALGLPDLTKPFELFVDEKQGYAKGVLTQKLGPWRRPVAYLSKKLDPVAAGWPPCLRMVAAIAVLTKDAGKLTMGQPLVILAPHAVEALVKQPPDRWLSNARMTHYQALLLDTDRVQFGPVVALNPATLLPLPEEGLQHDCLDILAEAHGTRSDLMDQPLPDADHTWYTDGSSFLQEGQRKAGAAVTTETEVIWARALPAGTSAQRAELIALTQALKMAEGKKLNVYTDSRYAFATAHIHGEIYRRRGWLTSEGKEIKNKDEILALLKALFLPKRLSIIHCPGHQKGNSAEARGNRMADQAAREVATRETPETSTLLAGKRTADGSEFEKRTADGSEFESPKKKAKVE

SEQ ID NO: 2397 - protein, 2091 aa, synthetic construct
  source 1..2091: note = Description of Artificial Sequence: Synthetic polypeptide
MPAAKRVKLDGGDKKYSIGLDIGTNSVGWAVITDEYKVPSKKFKVLGNTDRHSIKKNLIGALLFDSGETAEATRLKRTARRRYTRRKNRICYLQEIFSNEMAKVDDSFFHRLEESFLVEEDKKHERHPIFGNIVDEVAYHEKYPTIYHLRKKLVDSTDKADLRLIYLALAHMIKFRGHFLIEGDLNPDNSDVDKLFIQLVQTYNQLFEENPINASGVDAKAILSARLSKSRRLENLIAQLPGEKKNGLFGNLIALSLGLTPNFKSNFDLAEDAKLQLSKDTYDDDLDNLLAQIGDQYADLFLAAKNLSDAILLSDILRVNTEITKAPLSASMIKRYDEHHQDLTLLKALVRQQLPEKYKEIFFDQSKNGYAGYIDGGASQEEFYKFIKPILEKMDGTEELLVKLNREDLLRKQRTFDNGSIPHQIHLGELHAILRRQEDFYPFLKDNREKIEKILTFRIPYYVGPLARGNSRFAWMTRKSEETITPWNFEEVVDKGASAQSFIERMTNFDKNLPNEKVLPKHSLLYEYFTVYNELTKVKYVTEGMRKPAFLSGEQKKAIVDLLFKTNRKVTVKQLKEDYFKKIECFDSVEISGVEDRFNASLGTYHDLLKIIKDKDFLDNEENEDILEDIVLTLTLFEDREMIEERLKTYAHLFDDKVMKQLKRRRYTGWGRLSRKLINGIRDKQSGKTILDFLKSDGFANRNFMQLIHDDSLTFKEDIQKAQVSGQGDSLHEHIANLAGSPAIKKGILQTVKVVDELVKVMGRHKPENIVIEMARENQTTQKGQKNSRERMKRIEEGIKELGSQILKEHPVENTQLQNEKLYLYYLQNGRDMYVDQELDINRLSDYDVDHIVPQSFLKDDSIDNKVLTRSDKARGKSDNVPSEEVVKKMKNYWRQLLNAKLITQRKFDNLTKAERGGLSELDKAGFIKRQLVETRQITKHVAQILDSRMNTKYDENDKLIREVKVITLKSKLVSDFRKDFQFYKVREINNYHHAHDAYLNAVVGTALIKKYPKLESEFVYGDYKVYDVRKMIAKSEQEIGKATAKYFFYSNIMNFFKTEITLANGEIRKRPLIETNGETGEIVWDKGRDFATVRKVLSMPQVNIVKKTEVQTGGFSKESILPKRNSDKLIARKKDWDPKKYGGFDSPTVAYSVLVVAKVEKGKSKKLKSVKELLGITIMERSSFEKNPIDFLEAKGYKEVKKDLIIKLPKYSLFELENGRKRMLASAGELQKGNELALPSKYVNFLYLASHYEKLKGSPEDNEQKQLFVEQHKHYLDEIIEQISEFSKRVILADANLDKVLSAYNKHRDKPIREQAENIIHLFTLTNLGAPAAFKYFDTTIDRKRYTSTKEVLDATLIHQSITGLYETRIDLSQLGGDGGGGGGGSGGTLNIEDEYRLHETSKEPDVSLGSTWLSDFPQAWAETGGMGLAVRQAPLIIPLKATSTPVSIKQYPMSQEARLGIKPHIQRLLDQGILVPCQSPWNTPLLPVKKPGTNDYRPVQDLREVNKRVEDIHPTVPNPYNLLSGLPPSHQWYTVLDLKDAFFCLRLHPTSQPLFAFEWRDPEMGISGQLTWTRLPQGFKNSPTLFNEALHRDLAGFRIQHPDLILLQYVDDLLLAATSELDCQQGTRALLQTLGDLGYRASAKKAQICQKQVKYLGYLLKEGQRWLTEARKETVMGQPIPKTPRQLREFLGKAGFCRLFIPGFAEMAAPLYPLTKPGTLFNWGPDQQKAFQEIKQALLTAPALGLPDLTKPFELFVDEKQGYAKGVLTQKLGPWRRPVAYLSKKLDPVAAGWPPCLRMVAAIAVLTKDAGKLTMGQPLVILAPHAVEALVKQPPDRWLSNARMTHYQALLLDTDRVQFGPVVALNPATLLPLPEEGLQHDCLDILAEAHGTRSDLMDQPLPDADHTWYTDGSSFLQEGQRKAGAAVTTETEVIWARALPAGTSAQRAELIALTQALKMAEGKKLNVYTDSRYAFATAHIHGEIYRRRGWLTSEGKEIKNKDEILALLKALFLPKRLSIIHCPGHQKGNSAEARGNRMADQAAREVATRETPETSTLLAGKRTADGSEFEKRTADGSEFESPKKKAKVE

SEQ ID NO: 2398 - protein, 2091 aa, synthetic construct
  source 1..2091: note = Description of Artificial Sequence: Synthetic polypeptide
MPAAKRVKLDGGDKKYSIGLDIGTNSVGWAVITDEYKVPSKKFKVLGNTDRHSIKKNLIGALLFDSGETAEATRLKRTARRRYTRRKNRICYLQEIFSNEMAKVDDSFFHRLEESFLVEEDKKHERHPIFGNIVDEVAYHEKYPTIYHLRKKLVDSTDKADLRLIYLALAHMIKFRGHFLIEGDLNPDNSDVDKLFIQLVQTYNQLFEENPINASGVDAKAILSARLSKSRRLENLIAQLPGEKKNGLFGNLIALSLGLTPNFKSNFDLAEDAKLQLSKDTYDDDLDNLLAQIGDQYADLFLAAKNLSDAILLSDILRVNTEITKAPLSASMIKRYDEHHQDLTLLKALVRQQLPEKYKEIFFDQSKNGYAGYIDGGASQEEFYKFIKPILEKMDGTEELLVKLNREDLLRKQRTFDNGSIPHQIHLGELHAILRRQEDFYPFLKDNREKIEKILTFRIPYYVGPLARGNSRFAWMTRKSEETITPWNFEEVVDKGASAQSFIERMTNFDKNLPNEKVLPKHSLLYEYFTVYNELTKVKYVTEGMRKPAFLSGEQKKAIVDLLFKTNRKVTVKQLKEDYFKKIECFDSVEISGVEDRFNASLGTYHDLLKIIKDKDFLDNEENEDILEDIVLTLTLFEDREMIEERLKTYAHLFDDKVMKQLKRRRYTGWGRLSRKLINGIRDKQSGKTILDFLKSDGFANRNFMQLIHDDSLTFKEDIQKAQVSGQGDSLHEHIANLAGSPAIKKGILQTVKVVDELVKVMGRHKPENIVIEMARENQTTQKGQKNSRERMKRIEEGIKELGSQILKEHPVENTQLQNEKLYLYYLQNGRDMYVDQELDINRLSDYDVDHIVPQSFLKDDSIDNKVLTRSDKARGKSDNVPSEEVVKKMKNYWRQLLNAKLITQRKFDNLTKAERGGLSELDKAGFIKRQLVETRQITKHVAQILDSRMNTKYDENDKLIREVKVITLKSKLVSDFRKDFQFYKVREINNYHHAHDAYLNAVVGTALIKKYPKLESEFVYGDYKVYDVRKMIAKSEQEIGKATAKYFFYSNIMNFFKTEITLANGEIRKRPLIETNGETGEIVWDKGRDFATVRKVLSMPQVNIVKKTEVQTGGFSKESILPKRNSDKLIARKKDWDPKKYGGFDSPTVAYSVLVVAKVEKGKSKKLKSVKELLGITIMERSSFEKNPIDFLEAKGYKEVKKDLIIKLPKYSLFELENGRKRMLASAGELQKGNELALPSKYVNFLYLASHYEKLKGSPEDNEQKQLFVEQHKHYLDEIIEQISEFSKRVILADANLDKVLSAYNKHRDKPIREQAENIIHLFTLTNLGAPAAFKYFDTTIDRKRYTSTKEVLDATLIHQSITGLYETRIDLSQLGGDGGGGSGGSGGTLNIEDEYRLHETSKEPDVSLGSTWLSDFPQAWAETGGMGLAVRQAPLIIPLKATSTPVSIKQYPMSQEARLGIKPHIQRLLDQGILVPCQSPWNTPLLPVKKPGTNDYRPVQDLREVNKRVEDIHPTVPNPYNLLSGLPPSHQWYTVLDLKDAFFCLRLHPTSQPLFAFEWRDPEMGISGQLTWTRLPQGFKNSPTLFNEALHRDLAGFRIQHPDLILLQYVDDLLLAATSELDCQQGTRALLQTLGDLGYRASAKKAQICQKQVKYLGYLLKEGQRWLTEARKETVMGQPIPKTPRQLREFLGKAGFCRLFIPGFAEMAAPLYPLTKPGTLFNWGPDQQKAFQEIKQALLTAPALGLPDLTKPFELFVDEKQGYAKGVLTQKLGPWRRPVAYLSKKLDPVAAGWPPCLRMVAAIAVLTKDAGKLTMGQPLVILAPHAVEALVKQPPDRWLSNARMTHYQALLLDTDRVQFGPVVALNPATLLPLPEEGLQHDCLDILAEAHGTRSDLMDQPLPDADHTWYTDGSSFLQEGQRKAGAAVTTETEVIWARALPAGTSAQRAELIALTQALKMAEGKKLNVYTDSRYAFATAHIHGEIYRRRGWLTSEGKEIKNKDEILALLKALFLPKRLSIIHCPGHQKGNSAEARGNRMADQAAREVATRETPETSTLLAGKRTADGSEFEKRTADGSEFESPKKKAKVE

SEQ ID NO: 2399 - protein, 2094 aa, synthetic construct
  source 1..2094: note = Description of Artificial Sequence: Synthetic polypeptide
MPAAKRVKLDGGDKKYSIGLDIGTNSVGWAVITDEYKVPSKKFKVLGNTDRHSIKKNLIGALLFDSGETAEATRLKRTARRRYTRRKNRICYLQEIFSNEMAKVDDSFFHRLEESFLVEEDKKHERHPIFGNIVDEVAYHEKYPTIYHLRKKLVDSTDKADLRLIYLALAHMIKFRGHFLIEGDLNPDNSDVDKLFIQLVQTYNQLFEENPINASGVDAKAILSARLSKSRRLENLIAQLPGEKKNGLFGNLIALSLGLTPNFKSNFDLAEDAKLQLSKDTYDDDLDNLLAQIGDQYADLFLAAKNLSDAILLSDILRVNTEITKAPLSASMIKRYDEHHQDLTLLKALVRQQLPEKYKEIFFDQSKNGYAGYIDGGASQEEFYKFIKPILEKMDGTEELLVKLNREDLLRKQRTFDNGSIPHQIHLGELHAILRRQEDFYPFLKDNREKIEKILTFRIPYYVGPLARGNSRFAWMTRKSEETITPWNFEEVVDKGASAQSFIERMTNFDKNLPNEKVLPKHSLLYEYFTVYNELTKVKYVTEGMRKPAFLSGEQKKAIVDLLFKTNRKVTVKQLKEDYFKKIECFDSVEISGVEDRFNASLGTYHDLLKIIKDKDFLDNEENEDILEDIVLTLTLFEDREMIEERLKTYAHLFDDKVMKQLKRRRYTGWGRLSRKLINGIRDKQSGKTILDFLKSDGFANRNFMQLIHDDSLTFKEDIQKAQVSGQGDSLHEHIANLAGSPAIKKGILQTVKVVDELVKVMGRHKPENIVIEMARENQTTQKGQKNSRERMKRIEEGIKELGSQILKEHPVENTQLQNEKLYLYYLQNGRDMYVDQELDINRLSDYDVDHIVPQSFLKDDSIDNKVLTRSDKARGKSDNVPSEEVVKKMKNYWRQLLNAKLITQRKFDNLTKAERGGLSELDKAGFIKRQLVETRQITKHVAQILDSRMNTKYDENDKLIREVKVITLKSKLVSDFRKDFQFYKVREINNYHHAHDAYLNAVVGTALIKKYPKLESEFVYGDYKVYDVRKMIAKSEQEIGKATAKYFFYSNIMNFFKTEITLANGEIRKRPLIETNGETGEIVWDKGRDFATVRKVLSMPQVNIVKKTEVQTGGFSKESILPKRNSDKLIARKKDWDPKKYGGFDSPTVAYSVLVVAKVEKGKSKKLKSVKELLGITIMERSSFEKNPIDFLEAKGYKEVKKDLIIKLPKYSLFELENGRKRMLASAGELQKGNELALPSKYVNFLYLASHYEKLKGSPEDNEQKQLFVEQHKHYLDEIIEQISEFSKRVILADANLDKVLSAYNKHRDKPIREQAENIIHLFTLTNLGAPAAFKYFDTTIDRKRYTSTKEVLDATLIHQSITGLYETRIDLSQLGGDGGGSSGGSPAPGGTLNIEDEYRLHETSKEPDVSLGSTWLSDFPQAWAETGGMGLAVRQAPLIIPLKATSTPVSIKQYPMSQEARLGIKPHIQRLLDQGILVPCQSPWNTPLLPVKKPGTNDYRPVQDLREVNKRVEDIHPTVPNPYNLLSGLPPSHQWYTVLDLKDAFFCLRLHPTSQPLFAFEWRDPEMGISGQLTWTRLPQGFKNSPTLFNEALHRDLAGFRIQHPDLILLQYVDDLLLAATSELDCQQGTRALLQTLGDLGYRASAKKAQICQKQVKYLGYLLKEGQRWLTEARKETVMGQPIPKTPRQLREFLGKAGFCRLFIPGFAEMAAPLYPLTKPGTLFNWGPDQQKAFQEIKQALLTAPALGLPDLTKPFELFVDEKQGYAKGVLTQKLGPWRRPVAYLSKKLDPVAAGWPPCLRMVAAIAVLTKDAGKLTMGQPLVILAPHAVEALVKQPPDRWLSNARMTHYQALLLDTDRVQFGPVVALNPATLLPLPEEGLQHDCLDILAEAHGTRSDLMDQPLPDADHTWYTDGSSFLQEGQRKAGAAVTTETEVIWARALPAGTSAQRAELIALTQALKMAEGKKLNVYTDSRYAFATAHIHGEIYRRRGWLTSEGKEIKNKDEILALLKALFLPKRLSIIHCPGHQKGNSAEARGNRMADQAAREVATRETPETSTLLAGKRTADGSEFEKRTADGSEFESPKKKAKVE

SEQ ID NO: 2400 - protein, 2096 aa, synthetic construct
  source 1..2096: note = Description of Artificial Sequence: Synthetic polypeptide
MPAAKRVKLDGGDKKYSIGLDIGTNSVGWAVITDEYKVPSKKFKVLGNTDRHSIKKNLIGALLFDSGETAEATRLKRTARRRYTRRKNRICYLQEIFSNEMAKVDDSFFHRLEESFLVEEDKKHERHPIFGNIVDEVAYHEKYPTIYHLRKKLVDSTDKADLRLIYLALAHMIKFRGHFLIEGDLNPDNSDVDKLFIQLVQTYNQLFEENPINASGVDAKAILSARLSKSRRLENLIAQLPGEKKNGLFGNLIALSLGLTPNFKSNFDLAEDAKLQLSKDTYDDDLDNLLAQIGDQYADLFLAAKNLSDAILLSDILRVNTEITKAPLSASMIKRYDEHHQDLTLLKALVRQQLPEKYKEIFFDQSKNGYAGYIDGGASQEEFYKFIKPILEKMDGTEELLVKLNREDLLRKQRTFDNGSIPHQIHLGELHAILRRQEDFYPFLKDNREKIEKILTFRIPYYVGPLARGNSRFAWMTRKSEETITPWNFEEVVDKGASAQSFIERMTNFDKNLPNEKVLPKHSLLYEYFTVYNELTKVKYVTEGMRKPAFLSGEQKKAIVDLLFKTNRKVTVKQLKEDYFKKIECFDSVEISGVEDRFNASLGTYHDLLKIIKDKDFLDNEENEDILEDIVLTLTLFEDREMIEERLKTYAHLFDDKVMKQLKRRRYTGWGRLSRKLINGIRDKQSGKTILDFLKSDGFANRNFMQLIHDDSLTFKEDIQKAQVSGQGDSLHEHIANLAGSPAIKKGILQTVKVVDELVKVMGRHKPENIVIEMARENQTTQKGQKNSRERMKRIEEGIKELGSQILKEHPVENTQLQNEKLYLYYLQNGRDMYVDQELDINRLSDYDVDHIVPQSFLKDDSIDNKVLTRSDKARGKSDNVPSEEVVKKMKNYWRQLLNAKLITQRKFDNLTKAERGGLSELDKAGFIKRQLVETRQITKHVAQILDSRMNTKYDENDKLIREVKVITLKSKLVSDFRKDFQFYKVREINNYHHAHDAYLNAVVGTALIKKYPKLESEFVYGDYKVYDVRKMIAKSEQEIGKATAKYFFYSNIMNFFKTEITLANGEIRKRPLIETNGETGEIVWDKGRDFATVRKVLSMPQVNIVKKTEVQTGGFSKESILPKRNSDKLIARKKDWDPKKYGGFDSPTVAYSVLVVAKVEKGKSKKLKSVKELLGITIMERSSFEKNPIDFLEAKGYKEVKKDLIIKLPKYSLFELENGRKRMLASAGELQKGNELALPSKYVNFLYLASHYEKLKGSPEDNEQKQLFVEQHKHYLDEIIEQISEFSKRVILADANLDKVLSAYNKHRDKPIREQAENIIHLFTLTNLGAPAAFKYFDTTIDRKRYTSTKEVLDATLIHQSITGLYETRIDLSQLGGDGGPAPEAAAKGGGGGTLNIEDEYRLHETSKEPDVSLGSTWLSDFPQAWAETGGMGLAVRQAPLIIPLKATSTPVSIKQYPMSQEARLGIKPHIQRLLDQGILVPCQSPWNTPLLPVKKPGTNDYRPVQDLREVNKRVEDIHPTVPNPYNLLSGLPPSHQWYTVLDLKDAFFCLRLHPTSQPLFAFEWRDPEMGISGQLTWTRLPQGFKNSPTLFNEALHRDLAGFRIQHPDLILLQYVDDLLLAATSELDCQQGTRALLQTLGDLGYRASAKKAQICQKQVKYLGYLLKEGQRWLTEARKETVMGQPIPKTPRQLREFLGKAGFCRLFIPGFAEMAAPLYPLTKPGTLFNWGPDQQKAFQEIKQALLTAPALGLPDLTKPFELFVDEKQGYAKGVLTQKLGPWRRPVAYLSKKLDPVAAGWPPCLRMVAAIAVLTKDAGKLTMGQPLVILAPHAVEALVKQPPDRWLSNARMTHYQALLLDTDRVQFGPVVALNPATLLPLPEEGLQHDCLDILAEAHGTRSDLMDQPLPDADHTWYTDGSSFLQEGQRKAGAAVTTETEVIWARALPAGTSAQRAELIALTQALKMAEGKKLNVYTDSRYAFATAHIHGEIYRRRGWLTSEGKEIKNKDEILALLKALFLPKRLSIIHCPGHQKGNSAEARGNRMADQAAREVATRETPETSTLLAGKRTADGSEFEKRTADGSEFESPKKKAKVE

SEQ ID NO: 2401 - protein, 2094 aa, synthetic construct
  source 1..2094: note = Description of Artificial Sequence: Synthetic polypeptide
MPAAKRVKLDGGDKKYSIGLDIGTNSVGWAVITDEYKVPSKKFKVLGNTDRHSIKKNLIGALLFDSGETAEATRLKRTARRRYTRRKNRICYLQEIFSNEMAKVDDSFFHRLEESFLVEEDKKHERHPIFGNIVDEVAYHEKYPTIYHLRKKLVDSTDKADLRLIYLALAHMIKFRGHFLIEGDLNPDNSDVDKLFIQLVQTYNQLFEENPINASGVDAKAILSARLSKSRRLENLIAQLPGEKKNGLFGNLIALSLGLTPNFKSNFDLAEDAKLQLSKDTYDDDLDNLLAQIGDQYADLFLAAKNLSDAILLSDILRVNTEITKAPLSASMIKRYDEHHQDLTLLKALVRQQLPEKYKEIFFDQSKNGYAGYIDGGASQEEFYKFIKPILEKMDGTEELLVKLNREDLLRKQRTFDNGSIPHQIHLGELHAILRRQEDFYPFLKDNREKIEKILTFRIPYYVGPLARGNSRFAWMTRKSEETITPWNFEEVVDKGASAQSFIERMTNFDKNLPNEKVLPKHSLLYEYFTVYNELTKVKYVTEGMRKPAFLSGEQKKAIVDLLFKTNRKVTVKQLKEDYFKKIECFDSVEISGVEDRFNASLGTYHDLLKIIKDKDFLDNEENEDILEDIVLTLTLFEDREMIEERLKTYAHLFDDKVMKQLKRRRYTGWGRLSRKLINGIRDKQSGKTILDFLKSDGFANRNFMQLIHDDSLTFKEDIQKAQVSGQGDSLHEHIANLAGSPAIKKGILQTVKVVDELVKVMGRHKPENIVIEMARENQTTQKGQKNSRERMKRIEEGIKELGSQILKEHPVENTQLQNEKLYLYYLQNGRDMYVDQELDINRLSDYDVDHIVPQSFLKDDSIDNKVLTRSDKARGKSDNVPSEEVVKKMKNYWRQLLNAKLITQRKFDNLTKAERGGLSELDKAGFIKRQLVETRQITKHVAQILDSRMNTKYDENDKLIREVKVITLKSKLVSDFRKDFQFYKVREINNYHHAHDAYLNAVVGTALIKKYPKLESEFVYGDYKVYDVRKMIAKSEQEIGKATAKYFFYSNIMNFFKTEITLANGEIRKRPLIETNGETGEIVWDKGRDFATVRKVLSMPQVNIVKKTEVQTGGFSKESILPKRNSDKLIARKKDWDPKKYGGFDSPTVAYSVLVVAKVEKGKSKKLKSVKELLGITIMERSSFEKNPIDFLEAKGYKEVKKDLIIKLPKYSLFELENGRKRMLASAGELQKGNELALPSKYVNFLYLASHYEKLKGSPEDNEQKQLFVEQHKHYLDEIIEQISEFSKRVILADANLDKVLSAYNKHRDKPIREQAENIIHLFTLTNLGAPAAFKYFDTTIDRKRYTSTKEVLDATLIHQSITGLYETRIDLSQLGGDGGPAPGGGGGSGGTLNIEDEYRLHETSKEPDVSLGSTWLSDFPQAWAETGGMGLAVRQAPLIIPLKATSTPVSIKQYPMSQEARLGIKPHIQRLLDQGILVPCQSPWNTPLLPVKKPGTNDYRPVQDLREVNKRVEDIHPTVPNPYNLLSGLPPSHQWYTVLDLKDAFFCLRLHPTSQPLFAFEWRDPEMGISGQLTWTRLPQGFKNSPTLFNEALHRDLAGFRIQHPDLILLQYVDDLLLAATSELDCQQGTRALLQTLGDLGYRASAKKAQICQKQVKYLGYLLKEGQRWLTEARKETVMGQPIPKTPRQLREFLGKAGFCRLFIPGFAEMAAPLYPLTKPGTLFNWGPDQQKAFQEIKQALLTAPALGLPDLTKPFELFVDEKQGYAKGVLTQKLGPWRRPVAYLSKKLDPVAAGWPPCLRMVAAIAVLTKDAGKLTMGQPLVILAPHAVEALVKQPPDRWLSNARMTHYQALLLDTDRVQFGPVVALNPATLLPLPEEGLQHDCLDILAEAHGTRSDLMDQPLPDADHTWYTDGSSFLQEGQRKAGAAVTTETEVIWARALPAGTSAQRAELIALTQALKMAEGKKLNVYTDSRYAFATAHIHGEIYRRRGWLTSEGKEIKNKDEILALLKALFLPKRLSIIHCPGHQKGNSAEARGNRMADQAAREVATRETPETSTLLAGKRTADGSEFEKRTADGSEFESPKKKAKVE

SEQ ID NO: 2402 - protein, 2094 aa, synthetic construct
  source 1..2094: note = Description of Artificial Sequence: Synthetic polypeptide
MPAAKRVKLDGGDKKYSIGLDIGTNSVGWAVITDEYKVPSKKFKVLGNTDRHSIKKNLIGALLFDSGETAEATRLKRTARRRYTRRKNRICYLQEIFSNEMAKVDDSFFHRLEESFLVEEDKKHERHPIFGNIVDEVAYHEKYPTIYHLRKKLVDSTDKADLRLIYLALAHMIKFRGHFLIEGDLNPDNSDVDKLFIQLVQTYNQLFEENPINASGVDAKAILSARLSKSRRLENLIAQLPGEKKNGLFGNLIALSLGLTPNFKSNFDLAEDAKLQLSKDTYDDDLDNLLAQIGDQYADLFLAAKNLSDAILLSDILRVNTEITKAPLSASMIKRYDEHHQDLTLLKALVRQQLPEKYKEIFFDQSKNGYAGYIDGGASQEEFYKFIKPILEKMDGTEELLVKLNREDLLRKQRTFDNGSIPHQIHLGELHAILRRQEDFYPFLKDNREKIEKILTFRIPYYVGPLARGNSRFAWMTRKSEETITPWNFEEVVDKGASAQSFIERMTNFDKNLPNEKVLPKHSLLYEYFTVYNELTKVKYVTEGMRKPAFLSGEQKKAIVDLLFKTNRKVTVKQLKEDYFKKIECFDSVEISGVEDRFNASLGTYHDLLKIIKDKDFLDNEENEDILEDIVLTLTLFEDREMIEERLKTYAHLFDDKVMKQLKRRRYTGWGRLSRKLINGIRDKQSGKTILDFLKSDGFANRNFMQLIHDDSLTFKEDIQKAQVSGQGDSLHEHIANLAGSPAIKKGILQTVKVVDELVKVMGRHKPENIVIEMARENQTTQKGQKNSRERMKRIEEGIKELGSQILKEHPVENTQLQNEKLYLYYLQNGRDMYVDQELDINRLSDYDVDHIVPQSFLKDDSIDNKVLTRSDKARGKSDNVPSEEVVKKMKNYWRQLLNAKLITQRKFDNLTKAERGGLSELDKAGFIKRQLVETRQITKHVAQILDSRMNTKYDENDKLIREVKVITLKSKLVSDFRKDFQFYKVREINNYHHAHDAYLNAVVGTALIKKYPKLESEFVYGDYKVYDVRKMIAKSEQEIGKATAKYFFYSNIMNFFKTEITLANGEIRKRPLIETNGETGEIVWDKGRDFATVRKVLSMPQVNIVKKTEVQTGGFSKESILPKRNSDKLIARKKDWDPKKYGGFDSPTVAYSVLVVAKVEKGKSKKLKSVKELLGITIMERSSFEKNPIDFLEAKGYKEVKKDLIIKLPKYSLFELENGRKRMLASAGELQKGNELALPSKYVNFLYLASHYEKLKGSPEDNEQKQLFVEQHKHYLDEIIEQISEFSKRVILADANLDKVLSAYNKHRDKPIREQAENIIHLFTLTNLGAPAAFKYFDTTIDRKRYTSTKEVLDATLIHQSITGLYETRIDLSQLGGDGGGSSGGGPAPGGTLNIEDEYRLHETSKEPDVSLGSTWLSDFPQAWAETGGMGLAVRQAPLIIPLKATSTPVSIKQYPMSQEARLGIKPHIQRLLDQGILVPCQSPWNTPLLPVKKPGTNDYRPVQDLREVNKRVEDIHPTVPNPYNLLSGLPPSHQWYTVLDLKDAFFCLRLHPTSQPLFAFEWRDPEMGISGQLTWTRLPQGFKNSPTLFNEALHRDLAGFRIQHPDLILLQYVDDLLLAATSELDCQQGTRALLQTLGDLGYRASAKKAQICQKQVKYLGYLLKEGQRWLTEARKETVMGQPIPKTPRQLREFLGKAGFCRLFIPGFAEMAAPLYPLTKPGTLFNWGPDQQKAFQEIKQALLTAPALGLPDLTKPFELFVDEKQGYAKGVLTQKLGPWRRPVAYLSKKLDPVAAGWPPCLRMVAAIAVLTKDAGKLTMGQPLVILAPHAVEALVKQPPDRWLSNARMTHYQALLLDTDRVQFGPVVALNPATLLPLPEEGLQHDCLDILAEAHGTRSDLMDQPLPDADHTWYTDGSSFLQEGQRKAGAAVTTETEVIWARALPAGTSAQRAELIALTQALKMAEGKKLNVYTDSRYAFATAHIHGEIYRRRGWLTSEGKEIKNKDEILALLKALFLPKRLSIIHCPGHQKGNSAEARGNRMADQAAREVATRETPETSTLLAGKRTADGSEFEKRTADGSEFESPKKKAKVE

SEQ ID NO: 2403 - protein, 2094 aa, synthetic construct
  source 1..2094: note = Description of Artificial Sequence: Synthetic polypeptide
MPAAKRVKLDGGDKKYSIGLDIGTNSVGWAVITDEYKVPSKKFKVLGNTDRHSIKKNLIGALLFDSGETAEATRLKRTARRRYTRRKNRICYLQEIFSNEMAKVDDSFFHRLEESFLVEEDKKHERHPIFGNIVDEVAYHEKYPTIYHLRKKLVDSTDKADLRLIYLALAHMIKFRGHFLIEGDLNPDNSDVDKLFIQLVQTYNQLFEENPINASGVDAKAILSARLSKSRRLENLIAQLPGEKKNGLFGNLIALSLGLTPNFKSNFDLAEDAKLQLSKDTYDDDLDNLLAQIGDQYADLFLAAKNLSDAILLSDILRVNTEITKAPLSASMIKRYDEHHQDLTLLKALVRQQLPEKYKEIFFDQSKNGYAGYIDGGASQEEFYKFIKPILEKMDGTEELLVKLNREDLLRKQRTFDNGSIPHQIHLGELHAILRRQEDFYPFLKDNREKIEKILTFRIPYYVGPLARGNSRFAWMTRKSEETITPWNFEEVVDKGASAQSFIERMTNFDKNLPNEKVLPKHSLLYEYFTVYNELTKVKYVTEGMRKPAFLSGEQKKAIVDLLFKTNRKVTVKQLKEDYFKKIECFDSVEISGVEDRFNASLGTYHDLLKIIKDKDFLDNEENEDILEDIVLTLTLFEDREMIEERLKTYAHLFDDKVMKQLKRRRYTGWGRLSRKLINGIRDKQSGKTILDFLKSDGFANRNFMQLIHDDSLTFKEDIQKAQVSGQGDSLHEHIANLAGSPAIKKGILQTVKVVDELVKVMGRHKPENIVIEMARENQTTQKGQKNSRERMKRIEEGIKELGSQILKEHPVENTQLQNEKLYLYYLQNGRDMYVDQELDINRLSDYDVDHIVPQSFLKDDSIDNKVLTRSDKARGKSDNVPSEEVVKKMKNYWRQLLNAKLITQRKFDNLTKAERGGLSELDKAGFIKRQLVETRQITKHVAQILDSRMNTKYDENDKLIREVKVITLKSKLVSDFRKDFQFYKVREINNYHHAHDAYLNAVVGTALIKKYPKLESEFVYGDYKVYDVRKMIAKSEQEIGKATAKYFFYSNIMNFFKTEITLANGEIRKRPLIETNGETGEIVWDKGRDFATVRKVLSMPQVNIVKKTEVQTGGFSKESILPKRNSDKLIARKKDWDPKKYGGFDSPTVAYSVLVVAKVEKGKSKKLKSVKELLGITIMERSSFEKNPIDFLEAKGYKEVKKDLIIKLPKYSLFELENGRKRMLASAGELQKGNELALPSKYVNFLYLASHYEKLKGSPEDNEQKQLFVEQHKHYLDEIIEQISEFSKRVILADANLDKVLSAYNKHRDKPIREQAENIIHLFTLTNLGAPAAFKYFDTTIDRKRYTSTKEVLDATLIHQSITGLYETRIDLSQLGGDGGPAPGGSGGGGGTLNIEDEYRLHETSKEPDVSLGSTWLSDFPQAWAETGGMGLAVRQAPLIIPLKATSTPVSIKQYPMSQEARLGIKPHIQRLLDQGILVPCQSPWNTPLLPVKKPGTNDYRPVQDLREVNKRVEDIHPTVPNPYNLLSGLPPSHQWYTVLDLKDAFFCLRLHPTSQPLFAFEWRDPEMGISGQLTWTRLPQGFKNSPTLFNEALHRDLAGFRIQHPDLILLQYVDDLLLAATSELDCQQGTRALLQTLGDLGYRASAKKAQICQKQVKYLGYLLKEGQRWLTEARKETVMGQPIPKTPRQLREFLGKAGFCRLFIPGFAEMAAPLYPLTKPGTLFNWGPDQQKAFQEIKQALLTAPALGLPDLTKPFELFVDEKQGYAKGVLTQKLGPWRRPVAYLSKKLDPVAAGWPPCLRMVAAIAVLTKDAGKLTMGQPLVILAPHAVEALVKQPPDRWLSNARMTHYQALLLDTDRVQFGPVVALNPATLLPLPEEGLQHDCLDILAEAHGTRSDLMDQPLPDADHTWYTDGSSFLQEGQRKAGAAVTTETEVIWARALPAGTSAQRAELIALTQALKMAEGKKLNVYTDSRYAFATAHIHGEIYRRRGWLTSEGKEIKNKDEILALLKALFLPKRLSIIHCPGHQKGNSAEARGNRMADQAAREVATRETPETSTLLAGKRTADGSEFEKRTADGSEFESPKKKAKVE

SEQ ID NO: 2404 - protein, 2096 aa, synthetic construct
  source 1..2096: note = Description of Artificial Sequence: Synthetic polypeptide
MPAAKRVKLDGGDKKYSIGLDIGTNSVGWAVITDEYKVPSKKFKVLGNTDRHSIKKNLIGALLFDSGETAEATRLKRTARRRYTRRKNRICYLQEIFSNEMAKVDDSFFHRLEESFLVEEDKKHERHPIFGNIVDEVAYHEKYPTIYHLRKKLVDSTDKADLRLIYLALAHMIKFRGHFLIEGDLNPDNSDVDKLFIQLVQTYNQLFEENPINASGVDAKAILSARLSKSRRLENLIAQLPGEKKNGLFGNLIALSLGLTPNFKSNFDLAEDAKLQLSKDTYDDDLDNLLAQIGDQYADLFLAAKNLSDAILLSDILRVNTEITKAPLSASMIKRYDEHHQDLTLLKALVRQQLPEKYKEIFFDQSKNGYAGYIDGGASQEEFYKFIKPILEKMDGTEELLVKLNREDLLRKQRTFDNGSIPHQIHLGELHAILRRQEDFYPFLKDNREKIEKILTFRIPYYVGPLARGNSRFAWMTRKSEETITPWNFEEVVDKGASAQSFIERMTNFDKNLPNEKVLPKHSLLYEYFTVYNELTKVKYVTEGMRKPAFLSGEQKKAIVDLLFKTNRKVTVKQLKEDYFKKIECFDSVEISGVEDRFNASLGTYHDLLKIIKDKDFLDNEENEDILEDIVLTLTLFEDREMIEERLKTYAHLFDDKVMKQLKRRRYTGWGRLSRKLINGIRDKQSGKTILDFLKSDGFANRNFMQLIHDDSLTFKEDIQKAQVSGQGDSLHEHIANLAGSPAIKKGILQTVKVVDELVKVMGRHKPENIVIEMARENQTTQKGQKNSRERMKRIEEGIKELGSQILKEHPVENTQLQNEKLYLYYLQNGRDMYVDQELDINRLSDYDVDHIVPQSFLKDDSIDNKVLTRSDKARGKSDNVPSEEVVKKMKNYWRQLLNAKLITQRKFDNLTKAERGGLSELDKAGFIKRQLVETRQITKHVAQILDSRMNTKYDENDKLIREVKVITLKSKLVSDFRKDFQFYKVREINNYHHAHDAYLNAVVGTALIKKYPKLESEFVYGDYKVYDVRKMIAKSEQEIGKATAKYFFYSNIMNFFKTEITLANGEIRKRPLIETNGETGEIVWDKGRDFATVRKVLSMPQVNIVKKTEVQTGGFSKESILPKRNSDKLIARKKDWDPKKYGGFDSPTVAYSVLVVAKVEKGKSKKLKSVKELLGITIMERSSFEKNPIDFLEAKGYKEVKKDLIIKLPKYSLFELENGRKRMLASAGELQKGNELALPSKYVNFLYLASHYEKLKGSPEDNEQKQLFVEQHKHYLDEIIEQISEFSKRVILADANLDKVLSAYNKHRDKPIREQAENIIHLFTLTNLGAPAAFKYFDTTIDRKRYTSTKEVLDATLIHQSITGLYETRIDLSQLGGDGGGGSGSSEAAAKGGTLNIEDEYRLHETSKEPDVSLGSTWLSDFPQAWAETGGMGLAVRQAPLIIPLKATSTPVSIKQYPMSQEARLGIKPHIQRLLDQGILVPCQSPWNTPLLPVKKPGTNDYRPVQDLREVNKRVEDIHPTVPNPYNLLSGLPPSHQWYTVLDLKDAFFCLRLHPTSQPLFAFEWRDPEMGISGQLTWTRLPQGFKNSPTLFNEALHRDLAGFRIQHPDLILLQYVDDLLLAATSELDCQQGTRALLQTLGDLGYRASAKKAQICQKQVKYLGYLLKEGQRWLTEARKETVMGQPIPKTPRQLREFLGKAGFCRLFIPGFAEMAAPLYPLTKPGTLFNWGPDQQKAFQEIKQALLTAPALGLPDLTKPFELFVDEKQGYAKGVLTQKLGPWRRPVAYLSKKLDPVAAGWPPCLRMVAAIAVLTKDAGKLTMGQPLVILAPHAVEALVKQPPDRWLSNARMTHYQALLLDTDRVQFGPVVALNPATLLPLPEEGLQHDCLDILAEAHGTRSDLMDQPLPDADHTWYTDGSSFLQEGQRKAGAAVTTETEVIWARALPAGTSAQRAELIALTQALKMAEGKKLNVYTDSRYAFATAHIHGEIYRRRGWLTSEGKEIKNKDEILALLKALFLPKRLSIIHCPGHQKGNSAEARGNRMADQAAREVATRETPETSTLLAGKRTADGSEFEKRTADGSEFESPKKKAKVE

SEQ ID NO: 2405 - protein, 2100 aa, synthetic construct
  source 1..2100: note = Description of Artificial Sequence: Synthetic polypeptide
MPAAKRVKLDGGDKKYSIGLDIGTNSVGWAVITDEYKVPSKKFKVLGNTDRHSIKKNLIGALLFDSGETAEATRLKRTARRRYTRRKNRICYLQEIFSNEMAKVDDSFFHRLEESFLVEEDKKHERHPIFGNIVDEVAYHEKYPTIYHLRKKLVDSTDKADLRLIYLALAHMIKFRGHFLIEGDLNPDNSDVDKLFIQLVQTYNQLFEENPINASGVDAKAILSARLSKSRRLENLIAQLPGEKKNGLFGNLIALSLGLTPNFKSNFDLAEDAKLQLSKDTYDDDLDNLLAQIGDQYADLFLAAKNLSDAILLSDILRVNTEITKAPLSASMIKRYDEHHQDLTLLKALVRQQLPEKYKEIFFDQSKNGYAGYIDGGASQEEFYKFIKPILEKMDGTEELLVKLNREDLLRKQRTFDNGSIPHQIHLGELHAILRRQEDFYPFLKDNREKIEKILTFRIPYYVGPLARGNSRFAWMTRKSEETITPWNFEEVVDKGASAQSFIERMTNFDKNLPNEKVLPKHSLLYEYFTVYNELTKVKYVTEGMRKPAFLSGEQKKAIVDLLFKTNRKVTVKQLKEDYFKKIECFDSVEISGVEDRFNASLGTYHDLLKIIKDKDFLDNEENEDILEDIVLTLTLFEDREMIEERLKTYAHLFDDKVMKQLKRRRYTGWGRLSRKLINGIRDKQSGKTILDFLKSDGFANRNFMQLIHDDSLTFKEDIQKAQVSGQGDSLHEHIANLAGSPAIKKGILQTVKVVDELVKVMGRHKPENIVIEMARENQTTQKGQKNSRERMKRIEEGIKELGSQILKEHPVENTQLQNEKLYLYYLQNGRDMYVDQELDINRLSDYDVDHIVPQSFLKDDSIDNKVLTRSDKARGKSDNVPSEEVVKKMKNYWRQLLNAKLITQRKFDNLTKAERGGLSELDKAGFIKRQLVETRQITKHVAQILDSRMNTKYDENDKLIREVKVITLKSKLVSDFRKDFQFYKVREINNYHHAHDAYLNAVVGTALIKKYPKLESEFVYGDYKVYDVRKMIAKSEQEIGKATAKYFFYSNIMNFFKTEITLANGEIRKRPLIETNGETGEIVWDKGRDFATVRKVLSMPQVNIVKKTEVQTGGFSKESILPKRNSDKLIARKKDWDPKKYGGFDSPTVAYSVLVVAKVEKGKSKKLKSVKELLGITIMERSSFEKNPIDFLEAKGYKEVKKDLIIKLPKYSLFELENGRKRMLASAGELQKGNELALPSKYVNFLYLASHYEKLKGSPEDNEQKQLFVEQHKHYLDEIIEQISEFSKRVILADANLDKVLSAYNKHRDKPIREQAENIIHLFTLTNLGAPAAFKYFDTTIDRKRYTSTKEVLDATLIHQSITGLYETRIDLSQLGGDGGGSSGSSGSSGSSGSSGGTLNIEDEYRLHETSKEPDVSLGSTWLSDFPQAWAETGGMGLAVRQAPLIIPLKATSTPVSIKQYPMSQEARLGIKPHIQRLLDQGILVPCQSPWNTPLLPVKKPGTNDYRPVQDLREVNKRVEDIHPTVPNPYNLLSGLPPSHQWYTVLDLKDAFFCLRLHPTSQPLFAFEWRDPEMGISGQLTWTRLPQGFKNSPTLFNEALHRDLAGFRIQHPDLILLQYVDDLLLAATSELDCQQGTRALLQTLGDLGYRASAKKAQICQKQVKYLGYLLKEGQRWLTEARKETVMGQPIPKTPRQLREFLGKAGFCRLFIPGFAEMAAPLYPLTKPGTLFNWGPDQQKAFQEIKQALLTAPALGLPDLTKPFELFVDEKQGYAKGVLTQKLGPWRRPVAYLSKKLDPVAAGWPPCLRMVAAIAVLTKDAGKLTMGQPLVILAPHAVEALVKQPPDRWLSNARMTHYQALLLDTDRVQFGPVVALNPATLLPLPEEGLQHDCLDILAEAHGTRSDLMDQPLPDADHTWYTDGSSFLQEGQRKAGAAVTTETEVIWARALPAGTSAQRAELIALTQALKMAEGKKLNVYTDSRYAFATAHIHGEIYRRRGWLTSEGKEIKNKDEILALLKALFLPKRLSIIHCPGHQKGNSAEARGNRMADQAAREVATRETPETSTLLAGKRTADGSEFEKRTADGSEFESPKKKAKVE

SEQ ID NO: 2406 - protein, 2091 aa, synthetic construct
  source 1..2091: note = Description of Artificial Sequence: Synthetic polypeptide
MPAAKRVKLDGGDKKYSIGLDIGTNSVGWAVITDEYKVPSKKFKVLGNTDRHSIKKNLIGALLFDSGETAEATRLKRTARRRYTRRKNRICYLQEIFSNEMAKVDDSFFHRLEESFLVEEDKKHERHPIFGNIVDEVAYHEKYPTIYHLRKKLVDSTDKADLRLIYLALAHMIKFRGHFLIEGDLNPDNSDVDKLFIQLVQTYNQLFEENPINASGVDAKAILSARLSKSRRLENLIAQLPGEKKNGLFGNLIALSLGLTPNFKSNFDLAEDAKLQLSKDTYDDDLDNLLAQIGDQYADLFLAAKNLSDAILLSDILRVNTEITKAPLSASMIKRYDEHHQDLTLLKALVRQQLPEKYKEIFFDQSKNGYAGYIDGGASQEEFYKFIKPILEKMDGTEELLVKLNREDLLRKQRTFDNGSIPHQIHLGELHAILRRQEDFYPFLKDNREKIEKILTFRIPYYVGPLARGNSRFAWMTRKSEETITPWNFEEVVDKGASAQSFIERMTNFDKNLPNEKVLPKHSLLYEYFTVYNELTKVKYVTEGMRKPAFLSGEQKKAIVDLLFKTNRKVTVKQLKEDYFKKIECFDSVEISGVEDRFNASLGTYHDLLKIIKDKDFLDNEENEDILEDIVLTLTLFEDREMIEERLKTYAHLFDDKVMKQLKRRRYTGWGRLSRKLINGIRDKQSGKTILDFLKSDGFANRNFMQLIHDDSLTFKEDIQKAQVSGQGDSLHEHIANLAGSPAIKKGILQTVKVVDELVKVMGRHKPENIVIEMARENQTTQKGQKNSRERMKRIEEGIKELGSQILKEHPVENTQLQNEKLYLYYLQNGRDMYVDQELDINRLSDYDVDHIVPQSFLKDDSIDNKVLTRSDKARGKSDNVPSEEVVKKMKNYWRQLLNAKLITQRKFDNLTKAERGGLSELDKAGFIKRQLVETRQITKHVAQILDSRMNTKYDENDKLIREVKVITLKSKLVSDFRKDFQFYKVREINNYHHAHDAYLNAVVGTALIKKYPKLESEFVYGDYKVYDVRKMIAKSEQEIGKATAKYFFYSNIMNFFKTEITLANGEIRKRPLIETNGETGEIVWDKGRDFATVRKVLSMPQVNIVKKTEVQTGGFSKESILPKRNSDKLIARKKDWDPKKYGGFDSPTVAYSVLVVAKVEKGKSKKLKSVKELLGITIMERSSFEKNPIDFLEAKGYKEVKKDLIIKLPKYSLFELENGRKRMLASAGELQKGNELALPSKYVNFLYLASHYEKLKGSPEDNEQKQLFVEQHKHYLDEIIEQISEFSKRVILADANLDKVLSAYNKHRDKPIREQAENIIHLFTLTNLGAPAAFKYFDTTIDRKRYTSTKEVLDATLIHQSITGLYETRIDLSQLGGDGGGSSGGSGGTLNIEDEYRLHETSKEPDVSLGSTWLSDFPQAWAETGGMGLAVRQAPLIIPLKATSTPVSIKQYPMSQEARLGIKPHIQRLLDQGILVPCQSPWNTPLLPVKKPGTNDYRPVQDLREVNKRVEDIHPTVPNPYNLLSGLPPSHQWYTVLDLKDAFFCLRLHPTSQPLFAFEWRDPEMGISGQLTWTRLPQGFKNSPTLFNEALHRDLAGFRIQHPDLILLQYVDDLLLAATSELDCQQGTRALLQTLGDLGYRASAKKAQICQKQVKYLGYLLKEGQRWLTEARKETVMGQPIPKTPRQLREFLGKAGFCRLFIPGFAEMAAPLYPLTKPGTLFNWGPDQQKAFQEIKQALLTAPALGLPDLTKPFELFVDEKQGYAKGVLTQKLGPWRRPVAYLSKKLDPVAAGWPPCLRMVAAIAVLTKDAGKLTMGQPLVILAPHAVEALVKQPPDRWLSNARMTHYQALLLDTDRVQFGPVVALNPATLLPLPEEGLQHDCLDILAEAHGTRSDLMDQPLPDADHTWYTDGSSFLQEGQRKAGAAVTTETEVIWARALPAGTSAQRAELIALTQALKMAEGKKLNVYTDSRYAFATAHIHGEIYRRRGWLTSEGKEIKNKDEILALLKALFLPKRLSIIHCPGHQKGNSAEARGNRMADQAAREVATRETPETSTLLAGKRTADGSEFEKRTADGSEFESPKKKAKVE

SEQ ID NO: 2407 - protein, 2094 aa, synthetic construct
  source 1..2094: note = Description of Artificial Sequence: Synthetic polypeptide
MPAAKRVKLDGGDKKYSIGLDIGTNSVGWAVITDEYKVPSKKFKVLGNTDRHSIKKNLIGALLFDSGETAEATRLKRTARRRYTRRKNRICYLQEIFSNEMAKVDDSFFHRLEESFLVEEDKKHERHPIFGNIVDEVAYHEKYPTIYHLRKKLVDSTDKADLRLIYLALAHMIKFRGHFLIEGDLNPDNSDVDKLFIQLVQTYNQLFEENPINASGVDAKAILSARLSKSRRLENLIAQLPGEKKNGLFGNLIALSLGLTPNFKSNFDLAEDAKLQLSKDTYDDDLDNLLAQIGDQYADLFLAAKNLSDAILLSDILRVNTEITKAPLSASMIKRYDEHHQDLTLLKALVRQQLPEKYKEIFFDQSKNGYAGYIDGGASQEEFYKFIKPILEKMDGTEELLVKLNREDLLRKQRTFDNGSIPHQIHLGELHAILRRQEDFYPFLKDNREKIEKILTFRIPYYVGPLARGNSRFAWMTRKSEETITPWNFEEVVDKGASAQSFIERMTNFDKNLPNEKVLPKHSLLYEYFTVYNELTKVKYVTEGMRKPAFLSGEQKKAIVDLLFKTNRKVTVKQLKEDYFKKIECFDSVEISGVEDRFNASLGTYHDLLKIIKDKDFLDNEENEDILEDIVLTLTLFEDREMIEERLKTYAHLFDDKVMKQLKRRRYTGWGRLSRKLINGIRDKQSGKTILDFLKSDGFANRNFMQLIHDDSLTFKEDIQKAQVSGQGDSLHEHIANLAGSPAIKKGILQTVKVVDELVKVMGRHKPENIVIEMARENQTTQKGQKNSRERMKRIEEGIKELGSQILKEHPVENTQLQNEKLYLYYLQNGRDMYVDQELDINRLSDYDVDHIVPQSFLKDDSIDNKVLTRSDKARGKSDNVPSEEVVKKMKNYWRQLLNAKLITQRKFDNLTKAERGGLSELDKAGFIKRQLVETRQITKHVAQILDSRMNTKYDENDKLIREVKVITLKSKLVSDFRKDFQFYKVREINNYHHAHDAYLNAVVGTALIKKYPKLESEFVYGDYKVYDVRKMIAKSEQEIGKATAKYFFYSNIMNFFKTEITLANGEIRKRPLIETNGETGEIVWDKGRDFATVRKVLSMPQVNIVKKTEVQTGGFSKESILPKRNSDKLIARKKDWDPKKYGGFDSPTVAYSVLVVAKVEKGKSKKLKSVKELLGITIMERSSFEKNPIDFLEAKGYKEVKKDLIIKLPKYSLFELENGRKRMLASAGELQKGNELALPSKYVNFLYLASHYEKLKGSPEDNEQKQLFVEQHKHYLDEIIEQISEFSKRVILADANLDKVLSAYNKHRDKPIREQAENIIHLFTLTNLGAPAAFKYFDTTIDRKRYTSTKEVLDATLIHQSITGLYETRIDLSQLGGDGGGSSPAPGGSGGTLNIEDEYRLHETSKEPDVSLGSTWLSDFPQAWAETGGMGLAVRQAPLIIPLKATSTPVSIKQYPMSQEARLGIKPHIQRLLDQGILVPCQSPWNTPLLPVKKPGTNDYRPVQDLREVNKRVEDIHPTVPNPYNLLSGLPPSHQWYTVLDLKDAFFCLRLHPTSQPLFAFEWRDPEMGISGQLTWTRLPQGFKNSPTLFNEALHRDLAGFRIQHPDLILLQYVDDLLLAATSELDCQQGTRALLQTLGDLGYRASAKKAQICQKQVKYLGYLLKEGQRWLTEARKETVMGQPIPKTPRQLREFLGKAGFCRLFIPGFAEMAAPLYPLTKPGTLFNWGPDQQKAFQEIKQALLTAPALGLPDLTKPFELFVDEKQGYAKGVLTQKLGPWRRPVAYLSKKLDPVAAGWPPCLRMVAAIAVLTKDAGKLTMGQPLVILAPHAVEALVKQPPDRWLSNARMTHYQALLLDTDRVQFGPVVALNPATLLPLPEEGLQHDCLDILAEAHGTRSDLMDQPLPDADHTWYTDGSSFLQEGQRKAGAAVTTETEVIWARALPAGTSAQRAELIALTQALKMAEGKKLNVYTDSRYAFATAHIHGEIYRRRGWLTSEGKEIKNKDEILALLKALFLPKRLSIIHCPGHQKGNSAEARGNRMADQAAREVATRETPETSTLLAGKRTADGSEFEKRTADGSEFESPKKKAKVE

SEQ ID NO: 2408 - protein, 2096 aa, synthetic construct
  source 1..2096: note = Description of Artificial Sequence: Synthetic polypeptide
MPAAKRVKLDGGDKKYSIGLDIGTNSVGWAVITDEYKVPSKKFKVLGNTDRHSIKKNLIGALLFDSGETAEATRLKRTARRRYTRRKNRICYLQEIFSNEMAKVDDSFFHRLEESFLVEEDKKHERHPIFGNIVDEVAYHEKYPTIYHLRKKLVDSTDKADLRLIYLALAHMIKFRGHFLIEGDLNPDNSDVDKLFIQLVQTYNQLFEENPINASGVDAKAILSARLSKSRRLENLIAQLPGEKKNGLFGNLIALSLGLTPNFKSNFDLAEDAKLQLSKDTYDDDLDNLLAQIGDQYADLFLAAKNLSDAILLSDILRVNTEITKAPLSASMIKRYDEHHQDLTLLKALVRQQLPEKYKEIFFDQSKNGYAGYIDGGASQEEFYKFIKPILEKMDGTEELLVKLNREDLLRKQRTFDNGSIPHQIHLGELHAILRRQEDFYPFLKDNREKIEKILTFRIPYYVGPLARGNSRFAWMTRKSEETITPWNFEEVVDKGASAQSFIERMTNFDKNLPNEKVLPKHSLLYEYFTVYNELTKVKYVTEGMRKPAFLSGEQKKAIVDLLFKTNRKVTVKQLKEDYFKKIECFDSVEISGVEDRFNASLGTYHDLLKIIKDKDFLDNEENEDILEDIVLTLTLFEDREMIEERLKTYAHLFDDKVMKQLKRRRYTGWGRLSRKLINGIRDKQSGKTILDFLKSDGFANRNFMQLIHDDSLTFKEDIQKAQVSGQGDSLHEHIANLAGSPAIKKGILQTVKVVDELVKVMGRHKPENIVIEMARENQTTQKGQKNSRERMKRIEEGIKELGSQILKEHPVENTQLQNEKLYLYYLQNGRDMYVDQELDINRLSDYDVDHIVPQSFLKDDSIDNKVLTRSDKARGKSDNVPSEEVVKKMKNYWRQLLNAKLITQRKFDNLTKAERGGLSELDKAGFIKRQLVETRQITKHVAQILDSRMNTKYDENDKLIREVKVITLKSKLVSDFRKDFQFYKVREINNYHHAHDAYLNAVVGTALIKKYPKLESEFVYGDYKVYDVRKMIAKSEQEIGKATAKYFFYSNIMNFFKTEITLANGEIRKRPLIETNGETGEIVWDKGRDFATVRKVLSMPQVNIVKKTEVQTGGFSKESILPKRNSDKLIARKKDWDPKKYGGFDSPTVAYSVLVVAKVEKGKSKKLKSVKELLGITIMERSSFEKNPIDFLEAKGYKEVKKDLIIKLPKYSLFELENGRKRMLASAGELQKGNELALPSKYVNFLYLASHYEKLKGSPEDNEQKQLFVEQHKHYLDEIIEQISEFSKRVILADANLDKVLSAYNKHRDKPIREQAENIIHLFTLTNLGAPAAFKYFDTTIDRKRYTSTKEVLDATLIHQSITGLYETRIDLSQLGGDGGGGSEAAAKGSSGGTLNIEDEYRLHETSKEPDVSLGSTWLSDFPQAWAETGGMGLAVRQAPLIIPLKATSTPVSIKQYPMSQEARLGIKPHIQRLLDQGILVPCQSPWNTPLLPVKKPGTNDYRPVQDLREVNKRVEDIHPTVPNPYNLLSGLPPSHQWYTVLDLKDAFFCLRLHPTSQPLFAFEWRDPEMGISGQLTWTRLPQGFKNSPTLFNEALHRDLAGFRIQHPDLILLQYVDDLLLAATSELDCQQGTRALLQTLGDLGYRASAKKAQICQKQVKYLGYLLKEGQRWLTEARKETVMGQPIPKTPRQLREFLGKAGFCRLFIPGFAEMAAPLYPLTKPGTLFNWGPDQQKAFQEIKQALLTAPALGLPDLTKPFELFVDEKQGYAKGVLTQKLGPWRRPVAYLSKKLDPVAAGWPPCLRMVAAIAVLTKDAGKLTMGQPLVILAPHAVEALVKQPPDRWLSNARMTHYQALLLDTDRVQFGPVVALNPATLLPLPEEGLQHDCLDILAEAHGTRSDLMDQPLPDADHTWYTDGSSFLQEGQRKAGAAVTTETEVIWARALPAGTSAQRAELIALTQALKMAEGKKLNVYTDSRYAFATAHIHGEIYRRRGWLTSEGKEIKNKDEILALLKALFLPKRLSIIHCPGHQKGNSAEARGNRMADQAAREVATRETPETSTLLAGKRTADGSEFEKRTADGSEFESPKKKAKVE

SEQ ID NO: 2409 - protein, 2094 aa, synthetic construct
  source 1..2094: note = Description of Artificial Sequence: Synthetic polypeptide
MPAAKRVKLDGGDKKYSIGLDIGTNSVGWAVITDEYKVPSKKFKVLGNTDRHSIKKNLIGALLFDSGETAEATRLKRTARRRYTRRKNRICYLQEIFSNEMAKVDDSFFHRLEESFLVEEDKKHERHPIFGNIVDEVAYHEKYPTIYHLRKKLVDSTDKADLRLIYLALAHMIKFRGHFLIEGDLNPDNSDVDKLFIQLVQTYNQLFEENPINASGVDAKAILSARLSKSRRLENLIAQLPGEKKNGLFGNLIALSLGLTPNFKSNFDLAEDAKLQLSKDTYDDDLDNLLAQIGDQYADLFLAAKNLSDAILLSDILRVNTEITKAPLSASMIKRYDEHHQDLTLLKALVRQQLPEKYKEIFFDQSKNGYAGYIDGGASQEEFYKFIKPILEKMDGTEELLVKLNREDLLRKQRTFDNGSIPHQIHLGELHAILRRQEDFYPFLKDNREKIEKILTFRIPYYVGPLARGNSRFAWMTRKSEETITPWNFEEVVDKGASAQSFIERMTNFDKNLPNEKVLPKHSLLYEYFTVYNELTKVKYVTEGMRKPAFLSGEQKKAIVDLLFKTNRKVTVKQLKEDYFKKIECFDSVEISGVEDRFNASLGTYHDLLKIIKDKDFLDNEENEDILEDIVLTLTLFEDREMIEERLKTYAHLFDDKVMKQLKRRRYTGWGRLSRKLINGIRDKQSGKTILDFLKSDGFANRNFMQLIHDDSLTFKEDIQKAQVSGQGDSLHEHIANLAGSPAIKKGILQTVKVVDELVKVMGRHKPENIVIEMARENQTTQKGQKNSRERMKRIEEGIKELGSQILKEHPVENTQLQNEKLYLYYLQNGRDMYVDQELDINRLSDYDVDHIVPQSFLKDDSIDNKVLTRSDKARGKSDNVPSEEVVKKMKNYWRQLLNAKLITQRKFDNLTKAERGGLSELDKAGFIKRQLVETRQITKHVAQILDSRMNTKYDENDKLIREVKVITLKSKLVSDFRKDFQFYKVREINNYHHAHDAYLNAVVGTALIKKYPKLESEFVYGDYKVYDVRKMIAKSEQEIGKATAKYFFYSNIMNFFKTEITLANGEIRKRPLIETNGETGEIVWDKGRDFATVRKVLSMPQVNIVKKTEVQTGGFSKESILPKRNSDKLIARKKDWDPKKYGGFDSPTVAYSVLVVAKVEKGKSKKLKSVKELLGITIMERSSFEKNPIDFLEAKGYKEVKKDLIIKLPKYSLFELENGRKRMLASAGELQKGNELALPSKYVNFLYLASHYEKLKGSPEDNEQKQLFVEQHKHYLDEIIEQISEFSKRVILADANLDKVLSAYNKHRDKPIREQAENIIHLFTLTNLGAPAAFKYFDTTIDRKRYTSTKEVLDATLIHQSITGLYETRIDLSQLGGDGGGGGGSSGGSGGTLNIEDEYRLHETSKEPDVSLGSTWLSDFPQAWAETGGMGLAVRQAPLIIPLKATSTPVSIKQYPMSQEARLGIKPHIQRLLDQGILVPCQSPWNTPLLPVKKPGTNDYRPVQDLREVNKRVEDIHPTVPNPYNLLSGLPPSHQWYTVLDLKDAFFCLRLHPTSQPLFAFEWRDPEMGISGQLTWTRLPQGFKNSPTLFNEALHRDLAGFRIQHPDLILLQYVDDLLLAATSELDCQQGTRALLQTLGDLGYRASAKKAQICQKQVKYLGYLLKEGQRWLTEARKETVMGQPIPKTPRQLREFLGKAGFCRLFIPGFAEMAAPLYPLTKPGTLFNWGPDQQKAFQEIKQALLTAPALGLPDLTKPFELFVDEKQGYAKGVLTQKLGPWRRPVAYLSKKLDPVAAGWPPCLRMVAAIAVLTKDAGKLTMGQPLVILAPHAVEALVKQPPDRWLSNARMTHYQALLLDTDRVQFGPVVALNPATLLPLPEEGLQHDCLDILAEAHGTRSDLMDQPLPDADHTWYTDGSSFLQEGQRKAGAAVTTETEVIWARALPAGTSAQRAELIALTQALKMAEGKKLNVYTDSRYAFATAHIHGEIYRRRGWLTSEGKEIKNKDEILALLKALFLPKRLSIIHCPGHQKGNSAEARGNRMADQAAREVATRETPETSTLLAGKRTADGSEFEKRTADGSEFESPKKKAKVE

SEQ ID NO: 2410 - protein, 2110 aa, synthetic construct
  source 1..2110: note = Description of Artificial Sequence: Synthetic polypeptide
MPAAKRVKLDGGDKKYSIGLDIGTNSVGWAVITDEYKVPSKKFKVLGNTDRHSIKKNLIGALLFDSGETAEATRLKRTARRRYTRRKNRICYLQEIFSNEMAKVDDSFFHRLEESFLVEEDKKHERHPIFGNIVDEVAYHEKYPTIYHLRKKLVDSTDKADLRLIYLALAHMIKFRGHFLIEGDLNPDNSDVDKLFIQLVQTYNQLFEENPINASGVDAKAILSARLSKSRRLENLIAQLPGEKKNGLFGNLIALSLGLTPNFKSNFDLAEDAKLQLSKDTYDDDLDNLLAQIGDQYADLFLAAKNLSDAILLSDILRVNTEITKAPLSASMIKRYDEHHQDLTLLKALVRQQLPEKYKEIFFDQSKNGYAGYIDGGASQEEFYKFIKPILEKMDGTEELLVKLNREDLLRKQRTFDNGSIPHQIHLGELHAILRRQEDFYPFLKDNREKIEKILTFRIPYYVGPLARGNSRFAWMTRKSEETITPWNFEEVVDKGASAQSFIERMTNFDKNLPNEKVLPKHSLLYEYFTVYNELTKVKYVTEGMRKPAFLSGEQKKAIVDLLFKTNRKVTVKQLKEDYFKKIECFDSVEISGVEDRFNASLGTYHDLLKIIKDKDFLDNEENEDILEDIVLTLTLFEDREMIEERLKTYAHLFDDKVMKQLKRRRYTGWGRLSRKLINGIRDKQSGKTILDFLKSDGFANRNFMQLIHDDSLTFKEDIQKAQVSGQGDSLHEHIANLAGSPAIKKGILQTVKVVDELVKVMGRHKPENIVIEMARENQTTQKGQKNSRERMKRIEEGIKELGSQILKEHPVENTQLQNEKLYLYYLQNGRDMYVDQELDINRLSDYDVDHIVPQSFLKDDSIDNKVLTRSDKARGKSDNVPSEEVVKKMKNYWRQLLNAKLITQRKFDNLTKAERGGLSELDKAGFIKRQLVETRQITKHVAQILDSRMNTKYDENDKLIREVKVITLKSKLVSDFRKDFQFYKVREINNYHHAHDAYLNAVVGTALIKKYPKLESEFVYGDYKVYDVRKMIAKSEQEIGKATAKYFFYSNIMNFFKTEITLANGEIRKRPLIETNGETGEIVWDKGRDFATVRKVLSMPQVNIVKKTEVQTGGFSKESILPKRNSDKLIARKKDWDPKKYGGFDSPTVAYSVLVVAKVEKGKSKKLKSVKELLGITIMERSSFEKNPIDFLEAKGYKEVKKDLIIKLPKYSLFELENGRKRMLASAGELQKGNELALPSKYVNFLYLASHYEKLKGSPEDNEQKQLFVEQHKHYLDEIIEQISEFSKRVILADANLDKVLSAYNKHRDKPIREQAENIIHLFTLTNLGAPAAFKYFDTTIDRKRYTSTKEVLDATLIHQSITGLYETRIDLSQLGGDGGGGGGSGGGGSGGGGSGGGGSGGGGSGGTLNIEDEYRLHETSKEPDVSLGSTWLSDFPQAWAETGGMGLAVRQAPLIIPLKATSTPVSIKQYPMSQEARLGIKPHIQRLLDQGILVPCQSPWNTPLLPVKKPGTNDYRPVQDLREVNKRVEDIHPTVPNPYNLLSGLPPSHQWYTVLDLKDAFFCLRLHPTSQPLFAFEWRDPEMGISGQLTWTRLPQGFKNSPTLFNEALHRDLAGFRIQHPDLILLQYVDDLLLAATSELDCQQGTRALLQTLGDLGYRASAKKAQICQKQVKYLGYLLKEGQRWLTEARKETVMGQPIPKTPRQLREFLGKAGFCRLFIPGFAEMAAPLYPLTKPGTLFNWGPDQQKAFQEIKQALLTAPALGLPDLTKPFELFVDEKQGYAKGVLTQKLGPWRRPVAYLSKKLDPVAAGWPPCLRMVAAIAVLTKDAGKLTMGQPLVILAPHAVEALVKQPPDRWLSNARMTHYQALLLDTDRVQFGPVVALNPATLLPLPEEGLQHDCLDILAEAHGTRSDLMDQPLPDADHTWYTDGSSFLQEGQRKAGAAVTTETEVIWARALPAGTSAQRAELIALTQALKMAEGKKLNVYTDSRYAFATAHIHGEIYRRRGWLTSEGKEIKNKDEILALLKALFLPKRLSIIHCPGHQKGNSAEARGNRMADQAAREVATRETPETSTLLAGKRTADGSEFEKRTADGSEFESPKKKAKVE

SEQ ID NO: 2411 - protein, 2091 aa, synthetic construct
  source 1..2091: note = Description of Artificial Sequence: Synthetic polypeptide
MPAAKRVKLDGGDKKYSIGLDIGTNSVGWAVITDEYKVPSKKFKVLGNTDRHSIKKNLIGALLFDSGETAEATRLKRTARRRYTRRKNRICYLQEIFSNEMAKVDDSFFHRLEESFLVEEDKKHERHPIFGNIVDEVAYHEKYPTIYHLRKKLVDSTDKADLRLIYLALAHMIKFRGHFLIEGDLNPDNSDVDKLFIQLVQTYNQLFEENPINASGVDAKAILSARLSKSRRLENLIAQLPGEKKNGLFGNLIALSLGLTPNFKSNFDLAEDAKLQLSKDTYDDDLDNLLAQIGDQYADLFLAAKNLSDAILLSDILRVNTEITKAPLSASMIKRYDEHHQDLTLLKALVRQQLPEKYKEIFFDQSKNGYAGYIDGGASQEEFYKFIKPILEKMDGTEELLVKLNREDLLRKQRTFDNGSIPHQIHLGELHAILRRQEDFYPFLKDNREKIEKILTFRIPYYVGPLARGNSRFAWMTRKSEETITPWNFEEVVDKGASAQSFIERMTNFDKNLPNEKVLPKHSLLYEYFTVYNELTKVKYVTEGMRKPAFLSGEQKKAIVDLLFKTNRKVTVKQLKEDYFKKIECFDSVEISGVEDRFNASLGTYHDLLKIIKDKDFLDNEENEDILEDIVLTLTLFEDREMIEERLKTYAHLFDDKVMKQLKRRRYTGWGRLSRKLINGIRDKQSGKTILDFLKSDGFANRNFMQLIHDDSLTFKEDIQKAQVSGQGDSLHEHIANLAGSPAIKKGILQTVKVVDELVKVMGRHKPENIVIEMARENQTTQKGQKNSRERMKRIEEGIKELGSQILKEHPVENTQLQNEKLYLYYLQNGRDMYVDQELDINRLSDYDVDHIVPQSFLKDDSIDNKVLTRSDKARGKSDNVPSEEVVKKMKNYWRQLLNAKLITQRKFDNLTKAERGGLSELDKAGFIKRQLVETRQITKHVAQILDSRMNTKYDENDKLIREVKVITLKSKLVSDFRKDFQFYKVREINNYHHAHDAYLNAVVGTALIKKYPKLESEFVYGDYKVYDVRKMIAKSEQEIGKATAKYFFYSNIMNFFKTEITLANGEIRKRPLIETNGETGEIVWDKGRDFATVRKVLSMPQVNIVKKTEVQTGGFSKESILPKRNSDKLIARKKDWDPKKYGGFDSPTVAYSVLVVAKVEKGKSKKLKSVKELLGITIMERSSFEKNPIDFLEAKGYKEVKKDLIIKLPKYSLFELENGRKRMLASAGELQKGNELALPSKYVNFLYLASHYEKLKGSPEDNEQKQLFVEQHKHYLDEIIEQISEFSKRVILADANLDKVLSAYNKHRDKPIREQAENIIHLFTLTNLGAPAAFKYFDTTIDRKRYTSTKEVLDATLIHQSITGLYETRIDLSQLGGDGGGSSGSSGGTLNIEDEYRLHETSKEPDVSLGSTWLSDFPQAWAETGGMGLAVRQAPLIIPLKATSTPVSIKQYPMSQEARLGIKPHIQRLLDQGILVPCQSPWNTPLLPVKKPGTNDYRPVQDLREVNKRVEDIHPTVPNPYNLLSGLPPSHQWYTVLDLKDAFFCLRLHPTSQPLFAFEWRDPEMGISGQLTWTRLPQGFKNSPTLFNEALHRDLAGFRIQHPDLILLQYVDDLLLAATSELDCQQGTRALLQTLGDLGYRASAKKAQICQKQVKYLGYLLKEGQRWLTEARKETVMGQPIPKTPRQLREFLGKAGFCRLFIPGFAEMAAPLYPLTKPGTLFNWGPDQQKAFQEIKQALLTAPALGLPDLTKPFELFVDEKQGYAKGVLTQKLGPWRRPVAYLSKKLDPVAAGWPPCLRMVAAIAVLTKDAGKLTMGQPLVILAPHAVEALVKQPPDRWLSNARMTHYQALLLDTDRVQFGPVVALNPATLLPLPEEGLQHDCLDILAEAHGTRSDLMDQPLPDADHTWYTDGSSFLQEGQRKAGAAVTTETEVIWARALPAGTSAQRAELIALTQALKMAEGKKLNVYTDSRYAFATAHIHGEIYRRRGWLTSEGKEIKNKDEILALLKALFLPKRLSIIHCPGHQKGNSAEARGNRMADQAAREVATRETPETSTLLAGKRTADGSEFEKRTADGSEFESPKKKAKVE

SEQ ID NO: 2412 - protein, 2096 aa, synthetic construct
  source 1..2096: note = Description of Artificial Sequence: Synthetic polypeptide
MPAAKRVKLDGGDKKYSIGLDIGTNSVGWAVITDEYKVPSKKFKVLGNTDRHSIKKNLIGALLFDSGETAEATRLKRTARRRYTRRKNRICYLQEIFSNEMAKVDDSFFHRLEESFLVEEDKKHERHPIFGNIVDEVAYHEKYPTIYHLRKKLVDSTDKADLRLIYLALAHMIKFRGHFLIEGDLNPDNSDVDKLFIQLVQTYNQLFEENPINASGVDAKAILSARLSKSRRLENLIAQLPGEKKNGLFGNLIALSLGLTPNFKSNFDLAEDAKLQLSKDTYDDDLDNLLAQIGDQYADLFLAAKNLSDAILLSDILRVNTEITKAPLSASMIKRYDEHHQDLTLLKALVRQQLPEKYKEIFFDQSKNGYAGYIDGGASQEEFYKFIKPILEKMDGTEELLVKLNREDLLRKQRTFDNGSIPHQIHLGELHAILRRQEDFYPFLKDNREKIEKILTFRIPYYVGPLARGNSRFAWMTRKSEETITPWNFEEVVDKGASAQSFIERMTNFDKNLPNEKVLPKHSLLYEYFTVYNELTKVKYVTEGMRKPAFLSGEQKKAIVDLLFKTNRKVTVKQLKEDYFKKIECFDSVEISGVEDRFNASLGTYHDLLKIIKDKDFLDNEENEDILEDIVLTLTLFEDREMIEERLKTYAHLFDDKVMKQLKRRRYTGWGRLSRKLINGIRDKQSGKTILDFLKSDGFANRNFMQLIHDDSLTFKEDIQKAQVSGQGDSLHEHIANLAGSPAIKKGILQTVKVVDELVKVMGRHKPENIVIEMARENQTTQKGQKNSRERMKRIEEGIKELGSQILKEHPVENTQLQNEKLYLYYLQNGRDMYVDQELDINRLSDYDVDHIVPQSFLKDDSIDNKVLTRSDKARGKSDNVPSEEVVKKMKNYWRQLLNAKLITQRKFDNLTKAERGGLSELDKAGFIKRQLVETRQITKHVAQILDSRMNTKYDENDKLIREVKVITLKSKLVSDFRKDFQFYKVREINNYHHAHDAYLNAVVGTALIKKYPKLESEFVYGDYKVYDVRKMIAKSEQEIGKATAKYFFYSNIMNFFKTEITLANGEIRKRPLIETNGETGEIVWDKGRDFATVRKVLSMPQVNIVKKTEVQTGGFSKESILPKRNSDKLIARKKDWDPKKYGGFDSPTVAYSVLVVAKVEKGKSKKLKSVKELLGITIMERSSFEKNPIDFLEAKGYKEVKKDLIIKLPKYSLFELENGRKRMLASAGELQKGNELALPSKYVNFLYLASHYEKLKGSPEDNEQKQLFVEQHKHYLDEIIEQISEFSKRVILADANLDKVLSAYNKHRDKPIREQAENIIHLFTLTNLGAPAAFKYFDTTIDRKRYTSTKEVLDATLIHQSITGLYETRIDLSQLGGDGGEAAAKGGGGSSGGTLNIEDEYRLHETSKEPDVSLGSTWLSDFPQAWAETGGMGLAVRQAPLIIPLKATSTPVSIKQYPMSQEARLGIKPHIQRLLDQGILVPCQSPWNTPLLPVKKPGTNDYRPVQDLREVNKRVEDIHPTVPNPYNLLSGLPPSHQWYTVLDLKDAFFCLRLHPTSQPLFAFEWRDPEMGISGQLTWTRLPQGFKNSPTLFNEALHRDLAGFRIQHPDLILLQYVDDLLLAATSELDCQQGTRALLQTLGDLGYRASAKKAQICQKQVKYLGYLLKEGQRWLTEARKETVMGQPIPKTPRQLREFLGKAGFCRLFIPGFAEMAAPLYPLTKPGTLFNWGPDQQKAFQEIKQALLTAPALGLPDLTKPFELFVDEKQGYAKGVLTQKLGPWRRPVAYLSKKLDPVAAGWPPCLRMVAAIAVLTKDAGKLTMGQPLVILAPHAVEALVKQPPDRWLSNARMTHYQALLLDTDRVQFGPVVALNPATLLPLPEEGLQHDCLDILAEAHGTRSDLMDQPLPDADHTWYTDGSSFLQEGQRKAGAAVTTETEVIWARALPAGTSAQRAELIALTQALKMAEGKKLNVYTDSRYAFATAHIHGEIYRRRGWLTSEGKEIKNKDEILALLKALFLPKRLSIIHCPGHQKGNSAEARGNRMADQAAREVATRETPETSTLLAGKRTADGSEFEKRTADGSEFESPKKKAKVE

SEQ ID NO: 2413 - protein, 2096 aa, synthetic construct
  source 1..2096: note = Description of Artificial Sequence: Synthetic polypeptide
MPAAKRVKLDGGDKKYSIGLDIGTNSVGWAVITDEYKVPSKKFKVLGNTDRHSIKKNLIGALLFDSGETAEATRLKRTARRRYTRRKNRICYLQEIFSNEMAKVDDSFFHRLEESFLVEEDKKHERHPIFGNIVDEVAYHEKYPTIYHLRKKLVDSTDKADLRLIYLALAHMIKFRGHFLIEGDLNPDNSDVDKLFIQLVQTYNQLFEENPINASGVDAKAILSARLSKSRRLENLIAQLPGEKKNGLFGNLIALSLGLTPNFKSNFDLAEDAKLQLSKDTYDDDLDNLLAQIGDQYADLFLAAKNLSDAILLSDILRVNTEITKAPLSASMIKRYDEHHQDLTLLKALVRQQLPEKYKEIFFDQSKNGYAGYIDGGASQEEFYKFIKPILEKMDGTEELLVKLNREDLLRKQRTFDNGSIPHQIHLGELHAILRRQEDFYPFLKDNREKIEKILTFRIPYYVGPLARGNSRFAWMTRKSEETITPWNFEEVVDKGASAQSFIERMTNFDKNLPNEKVLPKHSLLYEYFTVYNELTKVKYVTEGMRKPAFLSGEQKKAIVDLLFKTNRKVTVKQLKEDYFKKIECFDSVEISGVEDRFNASLGTYHDLLKIIKDKDFLDNEENEDILEDIVLTLTLFEDREMIEERLKTYAHLFDDKVMKQLKRRRYTGWGRLSRKLINGIRDKQSGKTILDFLKSDGFANRNFMQLIHDDSLTFKEDIQKAQVSGQGDSLHEHIANLAGSPAIKKGILQTVKVVDELVKVMGRHKPENIVIEMARENQTTQKGQKNSRERMKRIEEGIKELGSQILKEHPVENTQLQNEKLYLYYLQNGRDMYVDQELDINRLSDYDVDHIVPQSFLKDDSIDNKVLTRSDKARGKSDNVPSEEVVKKMKNYWRQLLNAKLITQRKFDNLTKAERGGLSELDKAGFIKRQLVETRQITKHVAQILDSRMNTKYDENDKLIREVKVITLKSKLVSDFRKDFQFYKVREINNYHHAHDAYLNAVVGTALIKKYPKLESEFVYGDYKVYDVRKMIAKSEQEIGKATAKYFFYSNIMNFFKTEITLANGEIRKRPLIETNGETGEIVWDKGRDFATVRKVLSMPQVNIVKKTEVQTGGFSKESILPKRNSDKLIARKKDWDPKKYGGFDSPTVAYSVLVVAKVEKGKSKKLKSVKELLGITIMERSSFEKNPIDFLEAKGYKEVKKDLIIKLPKYSLFELENGRKRMLASAGELQKGNELALPSKYVNFLYLASHYEKLKGSPEDNEQKQLFVEQHKHYLDEIIEQISEFSKRVILADANLDKVLSAYNKHRDKPIREQAENIIHLFTLTNLGAPAAFKYFDTTIDRKRYTSTKEVLDATLIHQSITGLYETRIDLSQLGGDGGGGSGGGEAAAKGGTLNIEDEYRLHETSKEPDVSLGSTWLSDFPQAWAETGGMGLAVRQAPLIIPLKATSTPVSIKQYPMSQEARLGIKPHIQRLLDQGILVPCQSPWNTPLLPVKKPGTNDYRPVQDLREVNKRVEDIHPTVPNPYNLLSGLPPSHQWYTVLDLKDAFFCLRLHPTSQPLFAFEWRDPEMGISGQLTWTRLPQGFKNSPTLFNEALHRDLAGFRIQHPDLILLQYVDDLLLAATSELDCQQGTRALLQTLGDLGYRASAKKAQICQKQVKYLGYLLKEGQRWLTEARKETVMGQPIPKTPRQLREFLGKAGFCRLFIPGFAEMAAPLYPLTKPGTLFNWGPDQQKAFQEIKQALLTAPALGLPDLTKPFELFVDEKQGYAKGVLTQKLGPWRRPVAYLSKKLDPVAAGWPPCLRMVAAIAVLTKDAGKLTMGQPLVILAPHAVEALVKQPPDRWLSNARMTHYQALLLDTDRVQFGPVVALNPATLLPLPEEGLQHDCLDILAEAHGTRSDLMDQPLPDADHTWYTDGSSFLQEGQRKAGAAVTTETEVIWARALPAGTSAQRAELIALTQALKMAEGKKLNVYTDSRYAFATAHIHGEIYRRRGWLTSEGKEIKNKDEILALLKALFLPKRLSIIHCPGHQKGNSAEARGNRMADQAAREVATRETPETSTLLAGKRTADGSEFEKRTADGSEFESPKKKAKVE

SEQ ID NO: 2414 - protein, 2094 aa, synthetic construct
  source 1..2094: note = Description of Artificial Sequence: Synthetic polypeptide
MPAAKRVKLDGGDKKYSIGLDIGTNSVGWAVITDEYKVPSKKFKVLGNTDRHSIKKNLIGALLFDSGETAEATRLKRTARRRYTRRKNRICYLQEIFSNEMAKVDDSFFHRLEESFLVEEDKKHERHPIFGNIVDEVAYHEKYPTIYHLRKKLVDSTDKADLRLIYLALAHMIKFRGHFLIEGDLNPDNSDVDKLFIQLVQTYNQLFEENPINASGVDAKAILSARLSKSRRLENLIAQLPGEKKNGLFGNLIALSLGLTPNFKSNFDLAEDAKLQLSKDTYDDDLDNLLAQIGDQYADLFLAAKNLSDAILLSDILRVNTEITKAPLSASMIKRYDEHHQDLTLLKALVRQQLPEKYKEIFFDQSKNGYAGYIDGGASQEEFYKFIKPILEKMDGTEELLVKLNREDLLRKQRTFDNGSIPHQIHLGELHAILRRQEDFYPFLKDNREKIEKILTFRIPYYVGPLARGNSRFAWMTRKSEETITPWNFEEVVDKGASAQSFIERMTNFDKNLPNEKVLPKHSLLYEYFTVYNELTKVKYVTEGMRKPAFLSGEQKKAIVDLLFKTNRKVTVKQLKEDYFKKIECFDSVEISGVEDRFNASLGTYHDLLKIIKDKDFLDNEENEDILEDIVLTLTLFEDREMIEERLKTYAHLFDDKVMKQLKRRRYTGWGRLSRKLINGIRDKQSGKTILDFLKSDGFANRNFMQLIHDDSLTFKEDIQKAQVSGQGDSLHEHIANLAGSPAIKKGILQTVKVVDELVKVMGRHKPENIVIEMARENQTTQKGQKNSRERMKRIEEGIKELGSQILKEHPVENTQLQNEKLYLYYLQNGRDMYVDQELDINRLSDYDVDHIVPQSFLKDDSIDNKVLTRSDKARGKSDNVPSEEVVKKMKNYWRQLLNAKLITQRKFDNLTKAERGGLSELDKAGFIKRQLVETRQITKHVAQILDSRMNTKYDENDKLIREVKVITLKSKLVSDFRKDFQFYKVREINNYHHAHDAYLNAVVGTALIKKYPKLESEFVYGDYKVYDVRKMIAKSEQEIGKATAKYFFYSNIMNFFKTEITLANGEIRKRPLIETNGETGEIVWDKGRDFATVRKVLSMPQVNIVKKTEVQTGGFSKESILPKRNSDKLIARKKDWDPKKYGGFDSPTVAYSVLVVAKVEKGKSKKLKSVKELLGITIMERSSFEKNPIDFLEAKGYKEVKKDLIIKLPKYSLFELENGRKRMLASAGELQKGNELALPSKYVNFLYLASHYEKLKGSPEDNEQKQLFVEQHKHYLDEIIEQISEFSKRVILADANLDKVLSAYNKHRDKPIREQAENIIHLFTLTNLGAPAAFKYFDTTIDRKRYTSTKEVLDATLIHQSITGLYETRIDLSQLGGDGGPAPGSSGGGGGTLNIEDEYRLHETSKEPDVSLGSTWLSDFPQAWAETGGMGLAVRQAPLIIPLKATSTPVSIKQYPMSQEARLGIKPHIQRLLDQGILVPCQSPWNTPLLPVKKPGTNDYRPVQDLREVNKRVEDIHPTVPNPYNLLSGLPPSHQWYTVLDLKDAFFCLRLHPTSQPLFAFEWRDPEMGISGQLTWTRLPQGFKNSPTLFNEALHRDLAGFRIQHPDLILLQYVDDLLLAATSELDCQQGTRALLQTLGDLGYRASAKKAQICQKQVKYLGYLLKEGQRWLTEARKETVMGQPIPKTPRQLREFLGKAGFCRLFIPGFAEMAAPLYPLTKPGTLFNWGPDQQKAFQEIKQALLTAPALGLPDLTKPFELFVDEKQGYAKGVLTQKLGPWRRPVAYLSKKLDPVAAGWPPCLRMVAAIAVLTKDAGKLTMGQPLVILAPHAVEALVKQPPDRWLSNARMTHYQALLLDTDRVQFGPVVALNPATLLPLPEEGLQHDCLDILAEAHGTRSDLMDQPLPDADHTWYTDGSSFLQEGQRKAGAAVTTETEVIWARALPAGTSAQRAELIALTQALKMAEGKKLNVYTDSRYAFATAHIHGEIYRRRGWLTSEGKEIKNKDEILALLKALFLPKRLSIIHCPGHQKGNSAEARGNRMADQAAREVATRETPETSTLLAGKRTADGSEFEKRTADGSEFESPKKKAKVE

SEQ ID NO: 2415 - protein, 2089 aa, synthetic construct
  source 1..2089: note = Description of Artificial Sequence: Synthetic polypeptide
MPAAKRVKLDGGDKKYSIGLDIGTNSVGWAVITDEYKVPSKKFKVLGNTDRHSIKKNLIGALLFDSGETAEATRLKRTARRRYTRRKNRICYLQEIFSNEMAKVDDSFFHRLEESFLVEEDKKHERHPIFGNIVDEVAYHEKYPTIYHLRKKLVDSTDKADLRLIYLALAHMIKFRGHFLIEGDLNPDNSDVDKLFIQLVQTYNQLFEENPINASGVDAKAILSARLSKSRRLENLIAQLPGEKKNGLFGNLIALSLGLTPNFKSNFDLAEDAKLQLSKDTYDDDLDNLLAQIGDQYADLFLAAKNLSDAILLSDILRVNTEITKAPLSASMIKRYDEHHQDLTLLKALVRQQLPEKYKEIFFDQSKNGYAGYIDGGASQEEFYKFIKPILEKMDGTEELLVKLNREDLLRKQRTFDNGSIPHQIHLGELHAILRRQEDFYPFLKDNREKIEKILTFRIPYYVGPLARGNSRFAWMTRKSEETITPWNFEEVVDKGASAQSFIERMTNFDKNLPNEKVLPKHSLLYEYFTVYNELTKVKYVTEGMRKPAFLSGEQKKAIVDLLFKTNRKVTVKQLKEDYFKKIECFDSVEISGVEDRFNASLGTYHDLLKIIKDKDFLDNEENEDILEDIVLTLTLFEDREMIEERLKTYAHLFDDKVMKQLKRRRYTGWGRLSRKLINGIRDKQSGKTILDFLKSDGFANRNFMQLIHDDSLTFKEDIQKAQVSGQGDSLHEHIANLAGSPAIKKGILQTVKVVDELVKVMGRHKPENIVIEMARENQTTQKGQKNSRERMKRIEEGIKELGSQILKEHPVENTQLQNEKLYLYYLQNGRDMYVDQELDINRLSDYDVDHIVPQSFLKDDSIDNKVLTRSDKARGKSDNVPSEEVVKKMKNYWRQLLNAKLITQRKFDNLTKAERGGLSELDKAGFIKRQLVETRQITKHVAQILDSRMNTKYDENDKLIREVKVITLKSKLVSDFRKDFQFYKVREINNYHHAHDAYLNAVVGTALIKKYPKLESEFVYGDYKVYDVRKMIAKSEQEIGKATAKYFFYSNIMNFFKTEITLANGEIRKRPLIETNGETGEIVWDKGRDFATVRKVLSMPQVNIVKKTEVQTGGFSKESILPKRNSDKLIARKKDWDPKKYGGFDSPTVAYSVLVVAKVEKGKSKKLKSVKELLGITIMERSSFEKNPIDFLEAKGYKEVKKDLIIKLPKYSLFELENGRKRMLASAGELQKGNELALPSKYVNFLYLASHYEKLKGSPEDNEQKQLFVEQHKHYLDEIIEQISEFSKRVILADANLDKVLSAYNKHRDKPIREQAENIIHLFTLTNLGAPAAFKYFDTTIDRKRYTSTKEVLDATLIHQSITGLYETRIDLSQLGGDGGGGGGGGTLNIEDEYRLHETSKEPDVSLGSTWLSDFPQAWAETGGMGLAVRQAPLIIPLKATSTPVSIKQYPMSQEARLGIKPHIQRLLDQGILVPCQSPWNTPLLPVKKPGTNDYRPVQDLREVNKRVEDIHPTVPNPYNLLSGLPPSHQWYTVLDLKDAFFCLRLHPTSQPLFAFEWRDPEMGISGQLTWTRLPQGFKNSPTLFNEALHRDLAGFRIQHPDLILLQYVDDLLLAATSELDCQQGTRALLQTLGDLGYRASAKKAQICQKQVKYLGYLLKEGQRWLTEARKETVMGQPIPKTPRQLREFLGKAGFCRLFIPGFAEMAAPLYPLTKPGTLFNWGPDQQKAFQEIKQALLTAPALGLPDLTKPFELFVDEKQGYAKGVLTQKLGPWRRPVAYLSKKLDPVAAGWPPCLRMVAAIAVLTKDAGKLTMGQPLVILAPHAVEALVKQPPDRWLSNARMTHYQALLLDTDRVQFGPVVALNPATLLPLPEEGLQHDCLDILAEAHGTRSDLMDQPLPDADHTWYTDGSSFLQEGQRKAGAAVTTETEVIWARALPAGTSAQRAELIALTQALKMAEGKKLNVYTDSRYAFATAHIHGEIYRRRGWLTSEGKEIKNKDEILALLKALFLPKRLSIIHCPGHQKGNSAEARGNRMADQAAREVATRETPETSTLLAGKRTADGSEFEKRTADGSEFESPKKKAKVE

SEQ ID NO: 2416 - protein, 2094 aa, synthetic construct
  source 1..2094: note = Description of Artificial Sequence: Synthetic polypeptide
MPAAKRVKLDGGDKKYSIGLDIGTNSVGWAVITDEYKVPSKKFKVLGNTDRHSIKKNLIGALLFDSGETAEATRLKRTARRRYTRRKNRICYLQEIFSNEMAKVDDSFFHRLEESFLVEEDKKHERHPIFGNIVDEVAYHEKYPTIYHLRKKLVDSTDKADLRLIYLALAHMIKFRGHFLIEGDLNPDNSDVDKLFIQLVQTYNQLFEENPINASGVDAKAILSARLSKSRRLENLIAQLPGEKKNGLFGNLIALSLGLTPNFKSNFDLAEDAKLQLSKDTYDDDLDNLLAQIGDQYADLFLAAKNLSDAILLSDILRVNTEITKAPLSASMIKRYDEHHQDLTLLKALVRQQLPEKYKEIFFDQSKNGYAGYIDGGASQEEFYKFIKPILEKMDGTEELLVKLNREDLLRKQRTFDNGSIPHQIHLGELHAILRRQEDFYPFLKDNREKIEKILTFRIPYYVGPLARGNSRFAWMTRKSEETITPWNFEEVVDKGASAQSFIERMTNFDKNLPNEKVLPKHSLLYEYFTVYNELTKVKYVTEGMRKPAFLSGEQKKAIVDLLFKTNRKVTVKQLKEDYFKKIECFDSVEISGVEDRFNASLGTYHDLLKIIKDKDFLDNEENEDILEDIVLTLTLFEDREMIEERLKTYAHLFDDKVMKQLKRRRYTGWGRLSRKLINGIRDKQSGKTILDFLKSDGFANRNFMQLIHDDSLTFKEDIQKAQVSGQGDSLHEHIANLAGSPAIKKGILQTVKVVDELVKVMGRHKPENIVIEMARENQTTQKGQKNSRERMKRIEEGIKELGSQILKEHPVENTQLQNEKLYLYYLQNGRDMYVDQELDINRLSDYDVDHIVPQSFLKDDSIDNKVLTRSDKARGKSDNVPSEEVVKKMKNYWRQLLNAKLITQRKFDNLTKAERGGLSELDKAGFIKRQLVETRQITKHVAQILDSRMNTKYDENDKLIREVKVITLKSKLVSDFRKDFQFYKVREINNYHHAHDAYLNAVVGTALIKKYPKLESEFVYGDYKVYDVRKMIAKSEQEIGKATAKYFFYSNIMNFFKTEITLANGEIRKRPLIETNGETGEIVWDKGRDFATVRKVLSMPQVNIVKKTEVQTGGFSKESILPKRNSDKLIARKKDWDPKKYGGFDSPTVAYSVLVVAKVEKGKSKKLKSVKELLGITIMERSSFEKNPIDFLEAKGYKEVKKDLIIKLPKYSLFELENGRKRMLASAGELQKGNELALPSKYVNFLYLASHYEKLKGSPEDNEQKQLFVEQHKHYLDEIIEQISEFSKRVILADANLDKVLSAYNKHRDKPIREQAENIIHLFTLTNLGAPAAFKYFDTTIDRKRYTSTKEVLDATLIHQSITGLYETRIDLSQLGGDGGGGGGGSPAPGGTLNIEDEYRLHETSKEPDVSLGSTWLSDFPQAWAETGGMGLAVRQAPLIIPLKATSTPVSIKQYPMSQEARLGIKPHIQRLLDQGILVPCQSPWNTPLLPVKKPGTNDYRPVQDLREVNKRVEDIHPTVPNPYNLLSGLPPSHQWYTVLDLKDAFFCLRLHPTSQPLFAFEWRDPEMGISGQLTWTRLPQGFKNSPTLFNEALHRDLAGFRIQHPDLILLQYVDDLLLAATSELDCQQGTRALLQTLGDLGYRASAKKAQICQKQVKYLGYLLKEGQRWLTEARKETVMGQPIPKTPRQLREFLGKAGFCRLFIPGFAEMAAPLYPLTKPGTLFNWGPDQQKAFQEIKQALLTAPALGLPDLTKPFELFVDEKQGYAKGVLTQKLGPWRRPVAYLSKKLDPVAAGWPPCLRMVAAIAVLTKDAGKLTMGQPLVILAPHAVEALVKQPPDRWLSNARMTHYQALLLDTDRVQFGPVVALNPATLLPLPEEGLQHDCLDILAEAHGTRSDLMDQPLPDADHTWYTDGSSFLQEGQRKAGAAVTTETEVIWARALPAGTSAQRAELIALTQALKMAEGKKLNVYTDSRYAFATAHIHGEIYRRRGWLTSEGKEIKNKDEILALLKALFLPKRLSIIHCPGHQKGNSAEARGNRMADQAAREVATRETPETSTLLAGKRTADGSEFEKRTADGSEFESPKKKAKVE

SEQ ID NO: 2417 - protein, 2100 aa, synthetic construct
  source 1..2100: note = Description of Artificial Sequence: Synthetic polypeptide
MPAAKRVKLDGGDKKYSIGLDIGTNSVGWAVITDEYKVPSKKFKVLGNTDRHSIKKNLIGALLFDSGETAEATRLKRTARRRYTRRKNRICYLQEIFSNEMAKVDDSFFHRLEESFLVEEDKKHERHPIFGNIVDEVAYHEKYPTIYHLRKKLVDSTDKADLRLIYLALAHMIKFRGHFLIEGDLNPDNSDVDKLFIQLVQTYNQLFEENPINASGVDAKAILSARLSKSRRLENLIAQLPGEKKNGLFGNLIALSLGLTPNFKSNFDLAEDAKLQLSKDTYDDDLDNLLAQIGDQYADLFLAAKNLSDAILLSDILRVNTEITKAPLSASMIKRYDEHHQDLTLLKALVRQQLPEKYKEIFFDQSKNGYAGYIDGGASQEEFYKFIKPILEKMDGTEELLVKLNREDLLRKQRTFDNGSIPHQIHLGELHAILRRQEDFYPFLKDNREKIEKILTFRIPYYVGPLARGNSRFAWMTRKSEETITPWNFEEVVDKGASAQSFIERMTNFDKNLPNEKVLPKHSLLYEYFTVYNELTKVKYVTEGMRKPAFLSGEQKKAIVDLLFKTNRKVTVKQLKEDYFKKIECFDSVEISGVEDRFNASLGTYHDLLKIIKDKDFLDNEENEDILEDIVLTLTLFEDREMIEERLKTYAHLFDDKVMKQLKRRRYTGWGRLSRKLINGIRDKQSGKTILDFLKSDGFANRNFMQLIHDDSLTFKEDIQKAQVSGQGDSLHEHIANLAGSPAIKKGILQTVKVVDELVKVMGRHKPENIVIEMARENQTTQKGQKNSRERMKRIEEGIKELGSQILKEHPVENTQLQNEKLYLYYLQNGRDMYVDQELDINRLSDYDVDHIVPQSFLKDDSIDNKVLTRSDKARGKSDNVPSEEVVKKMKNYWRQLLNAKLITQRKFDNLTKAERGGLSELDKAGFIKRQLVETRQITKHVAQILDSRMNTKYDENDKLIREVKVITLKSKLVSDFRKDFQFYKVREINNYHHAHDAYLNAVVGTALIKKYPKLESEFVYGDYKVYDVRKMIAKSEQEIGKATAKYFFYSNIMNFFKTEITLANGEIRKRPLIETNGETGEIVWDKGRDFATVRKVLSMPQVNIVKKTEVQTGGFSKESILPKRNSDKLIARKKDWDPKKYGGFDSPTVAYSVLVVAKVEKGKSKKLKSVKELLGITIMERSSFEKNPIDFLEAKGYKEVKKDLIIKLPKYSLFELENGRKRMLASAGELQKGNELALPSKYVNFLYLASHYEKLKGSPEDNEQKQLFVEQHKHYLDEIIEQISEFSKRVILADANLDKVLSAYNKHRDKPIREQAENIIHLFTLTNLGAPAAFKYFDTTIDRKRYTSTKEVLDATLIHQSITGLYETRIDLSQLGGDGGGGSGGSGGSGGSGGSGGTLNIEDEYRLHETSKGPDVPLGSTWLSDFPQAWAETGGMGLAFRQAPLIISLKATSTPVSIKQYPMSQEARLGIKPHIQRLLDQGILVPCQSPWNTPLLPVKKPGTNDYRPVQDLREVNKRVEDIHPTVPNPYNLLSGLPPSHQWYTVLDLKDAFFCLRLHPTSQSLFAFEWKDPEMGISGQLTWTRLPQGFKNSPTLFDEALHRDLADFRIQHPDLILLQYVDDLLLAATSELDCQQGTRALLQTLGDLGYRASAKKAQICQKQVKYLGYLLKEGQRWLTEARKETVMGQPTPKTPRQLREFLGTAGLCRLWIPGFAEMAAPLYPLTKTGTLFKWGPDQQKAYQEIKQALLTAPALGLPDLTKPFELFVDEKQGYAKGVLTQKLGPWRRPVAYLSKKLDPVAAGWPPCLRMVAAIAVLTKDVGKLTMGQPLVILAPHAVEALVKQPPDRWLSNARMTHYQALLLDTDRVQFGPIVALNPATLLPLPEEGLQHDCLDILAEAHGTRPDLTDQPLPDADHTWYTDGSSFLQEGQRRAGAAVTTETEVIWAKALPAGTSAQRAELIALTQALKMAAGKKLNVYTDSRYAFATAHIHGEIYRRRGLLTSEGKEIKNKDEILALLKALFLPKRLSIIHCPGHQKGNHAEARGNRMADQAAREVATRETPETSTLLAGKRTADGSEFEKRTADGSEFESPKKKAKVE

SEQ ID NO: 2418 - protein, 2096 aa, synthetic construct
  source 1..2096: note = Description of Artificial Sequence: Synthetic polypeptide
MPAAKRVKLDGGDKKYSIGLDIGTNSVGWAVITDEYKVPSKKFKVLGNTDRHSIKKNLIGALLFDSGETAEATRLKRTARRRYTRRKNRICYLQEIFSNEMAKVDDSFFHRLEESFLVEEDKKHERHPIFGNIVDEVAYHEKYPTIYHLRKKLVDSTDKADLRLIYLALAHMIKFRGHFLIEGDLNPDNSDVDKLFIQLVQTYNQLFEENPINASGVDAKAILSARLSKSRRLENLIAQLPGEKKNGLFGNLIALSLGLTPNFKSNFDLAEDAKLQLSKDTYDDDLDNLLAQIGDQYADLFLAAKNLSDAILLSDILRVNTEITKAPLSASMIKRYDEHHQDLTLLKALVRQQLPEKYKEIFFDQSKNGYAGYIDGGASQEEFYKFIKPILEKMDGTEELLVKLNREDLLRKQRTFDNGSIPHQIHLGELHAILRRQEDFYPFLKDNREKIEKILTFRIPYYVGPLARGNSRFAWMTRKSEETITPWNFEEVVDKGASAQSFIERMTNFDKNLPNEKVLPKHSLLYEYFTVYNELTKVKYVTEGMRKPAFLSGEQKKAIVDLLFKTNRKVTVKQLKEDYFKKIECFDSVEISGVEDRFNASLGTYHDLLKIIKDKDFLDNEENEDILEDIVLTLTLFEDREMIEERLKTYAHLFDDKVMKQLKRRRYTGWGRLSRKLINGIRDKQSGKTILDFLKSDGFANRNFMQLIHDDSLTFKEDIQKAQVSGQGDSLHEHIANLAGSPAIKKGILQTVKVVDELVKVMGRHKPENIVIEMARENQTTQKGQKNSRERMKRIEEGIKELGSQILKEHPVENTQLQNEKLYLYYLQNGRDMYVDQELDINRLSDYDVDHIVPQSFLKDDSIDNKVLTRSDKARGKSDNVPSEEVVKKMKNYWRQLLNAKLITQRKFDNLTKAERGGLSELDKAGFIKRQLVETRQITKHVAQILDSRMNTKYDENDKLIREVKVITLKSKLVSDFRKDFQFYKVREINNYHHAHDAYLNAVVGTALIKKYPKLESEFVYGDYKVYDVRKMIAKSEQEIGKATAKYFFYSNIMNFFKTEITLANGEIRKRPLIETNGETGEIVWDKGRDFATVRKVLSMPQVNIVKKTEVQTGGFSKESILPKRNSDKLIARKKDWDPKKYGGFDSPTVAYSVLVVAKVEKGKSKKLKSVKELLGITIMERSSFEKNPIDFLEAKGYKEVKKDLIIKLPKYSLFELENGRKRMLASAGELQKGNELALPSKYVNFLYLASHYEKLKGSPEDNEQKQLFVEQHKHYLDEIIEQISEFSKRVILADANLDKVLSAYNKHRDKPIREQAENIIHLFTLTNLGAPAAFKYFDTTIDRKRYTSTKEVLDATLIHQSITGLYETRIDLSQLGGDGGEAAAKGGGPAPGGTLNIEDEYRLHETSKGPDVPLGSTWLSDFPQAWAETGGMGLAFRQAPLIISLKATSTPVSIKQYPMSQEARLGIKPHIQRLLDQGILVPCQSPWNTPLLPVKKPGTNDYRPVQDLREVNKRVEDIHPTVPNPYNLLSGLPPSHQWYTVLDLKDAFFCLRLHPTSQSLFAFEWKDPEMGISGQLTWTRLPQGFKNSPTLFDEALHRDLADFRIQHPDLILLQYVDDLLLAATSELDCQQGTRALLQTLGDLGYRASAKKAQICQKQVKYLGYLLKEGQRWLTEARKETVMGQPTPKTPRQLREFLGTAGLCRLWIPGFAEMAAPLYPLTKTGTLFKWGPDQQKAYQEIKQALLTAPALGLPDLTKPFELFVDEKQGYAKGVLTQKLGPWRRPVAYLSKKLDPVAAGWPPCLRMVAAIAVLTKDVGKLTMGQPLVILAPHAVEALVKQPPDRWLSNARMTHYQALLLDTDRVQFGPIVALNPATLLPLPEEGLQHDCLDILAEAHGTRPDLTDQPLPDADHTWYTDGSSFLQEGQRRAGAAVTTETEVIWAKALPAGTSAQRAELIALTQALKMAAGKKLNVYTDSRYAFATAHIHGEIYRRRGLLTSEGKEIKNKDEILALLKALFLPKRLSIIHCPGHQKGNHAEARGNRMADQAAREVATRETPETSTLLAGKRTADGSEFEKRTADGSEFESPKKKAKVE

SEQ ID NO: 2419 - protein, 2094 aa, synthetic construct
  source 1..2094: note = Description of Artificial Sequence: Synthetic polypeptide
MPAAKRVKLDGGDKKYSIGLDIGTNSVGWAVITDEYKVPSKKFKVLGNTDRHSIKKNLIGALLFDSGETAEATRLKRTARRRYTRRKNRICYLQEIFSNEMAKVDDSFFHRLEESFLVEEDKKHERHPIFGNIVDEVAYHEKYPTIYHLRKKLVDSTDKADLRLIYLALAHMIKFRGHFLIEGDLNPDNSDVDKLFIQLVQTYNQLFEENPINASGVDAKAILSARLSKSRRLENLIAQLPGEKKNGLFGNLIALSLGLTPNFKSNFDLAEDAKLQLSKDTYDDDLDNLLAQIGDQYADLFLAAKNLSDAILLSDILRVNTEITKAPLSASMIKRYDEHHQDLTLLKALVRQQLPEKYKEIFFDQSKNGYAGYIDGGASQEEFYKFIKPILEKMDGTEELLVKLNREDLLRKQRTFDNGSIPHQIHLGELHAILRRQEDFYPFLKDNREKIEKILTFRIPYYVGPLARGNSRFAWMTRKSEETITPWNFEEVVDKGASAQSFIERMTNFDKNLPNEKVLPKHSLLYEYFTVYNELTKVKYVTEGMRKPAFLSGEQKKAIVDLLFKTNRKVTVKQLKEDYFKKIECFDSVEISGVEDRFNASLGTYHDLLKIIKDKDFLDNEENEDILEDIVLTLTLFEDREMIEERLKTYAHLFDDKVMKQLKRRRYTGWGRLSRKLINGIRDKQSGKTILDFLKSDGFANRNFMQLIHDDSLTFKEDIQKAQVSGQGDSLHEHIANLAGSPAIKKGILQTVKVVDELVKVMGRHKPENIVIEMARENQTTQKGQKNSRERMKRIEEGIKELGSQILKEHPVENTQLQNEKLYLYYLQNGRDMYVDQELDINRLSDYDVDHIVPQSFLKDDSIDNKVLTRSDKARGKSDNVPSEEVVKKMKNYWRQLLNAKLITQRKFDNLTKAERGGLSELDKAGFIKRQLVETRQITKHVAQILDSRMNTKYDENDKLIREVKVITLKSKLVSDFRKDFQFYKVREINNYHHAHDAYLNAVVGTALIKKYPKLESEFVYGDYKVYDVRKMIAKSEQEIGKATAKYFFYSNIMNFFKTEITLANGEIRKRPLIETNGETGEIVWDKGRDFATVRKVLSMPQVNIVKKTEVQTGGFSKESILPKRNSDKLIARKKDWDPKKYGGFDSPTVAYSVLVVAKVEKGKSKKLKSVKELLGITIMERSSFEKNPIDFLEAKGYKEVKKDLIIKLPKYSLFELENGRKRMLASAGELQKGNELALPSKYVNFLYLASHYEKLKGSPEDNEQKQLFVEQHKHYLDEIIEQISEFSKRVILADANLDKVLSAYNKHRDKPIREQAENIIHLFTLTNLGAPAAFKYFDTTIDRKRYTSTKEVLDATLIHQSITGLYETRIDLSQLGGDGGGSSGGSGGGGGTLNIEDEYRLHETSKGPDVPLGSTWLSDFPQAWAETGGMGLAFRQAPLIISLKATSTPVSIKQYPMSQEARLGIKPHIQRLLDQGILVPCQSPWNTPLLPVKKPGTNDYRPVQDLREVNKRVEDIHPTVPNPYNLLSGLPPSHQWYTVLDLKDAFFCLRLHPTSQSLFAFEWKDPEMGISGQLTWTRLPQGFKNSPTLFDEALHRDLADFRIQHPDLILLQYVDDLLLAATSELDCQQGTRALLQTLGDLGYRASAKKAQICQKQVKYLGYLLKEGQRWLTEARKETVMGQPTPKTPRQLREFLGTAGLCRLWIPGFAEMAAPLYPLTKTGTLFKWGPDQQKAYQEIKQALLTAPALGLPDLTKPFELFVDEKQGYAKGVLTQKLGPWRRPVAYLSKKLDPVAAGWPPCLRMVAAIAVLTKDVGKLTMGQPLVILAPHAVEALVKQPPDRWLSNARMTHYQALLLDTDRVQFGPIVALNPATLLPLPEEGLQHDCLDILAEAHGTRPDLTDQPLPDADHTWYTDGSSFLQEGQRRAGAAVTTETEVIWAKALPAGTSAQRAELIALTQALKMAAGKKLNVYTDSRYAFATAHIHGEIYRRRGLLTSEGKEIKNKDEILALLKALFLPKRLSIIHCPGHQKGNHAEARGNRMADQAAREVATRETPETSTLLAGKRTADGSEFEKRTADGSEFESPKKKAKVE

SEQ ID NO: 2420 - protein, 2096 aa, synthetic construct
  source 1..2096: note = Description of Artificial Sequence: Synthetic polypeptide
MPAAKRVKLDGGDKKYSIGLDIGTNSVGWAVITDEYKVPSKKFKVLGNTDRHSIKKNLIGALLFDSGETAEATRLKRTARRRYTRRKNRICYLQEIFSNEMAKVDDSFFHRLEESFLVEEDKKHERHPIFGNIVDEVAYHEKYPTIYHLRKKLVDSTDKADLRLIYLALAHMIKFRGHFLIEGDLNPDNSDVDKLFIQLVQTYNQLFEENPINASGVDAKAILSARLSKSRRLENLIAQLPGEKKNGLFGNLIALSLGLTPNFKSNFDLAEDAKLQLSKDTYDDDLDNLLAQIGDQYADLFLAAKNLSDAILLSDILRVNTEITKAPLSASMIKRYDEHHQDLTLLKALVRQQLPEKYKEIFFDQSKNGYAGYIDGGASQEEFYKFIKPILEKMDGTEELLVKLNREDLLRKQRTFDNGSIPHQIHLGELHAILRRQEDFYPFLKDNREKIEKILTFRIPYYVGPLARGNSRFAWMTRKSEETITPWNFEEVVDKGASAQSFIERMTNFDKNLPNEKVLPKHSLLYEYFTVYNELTKVKYVTEGMRKPAFLSGEQKKAIVDLLFKTNRKVTVKQLKEDYFKKIECFDSVEISGVEDRFNASLGTYHDLLKIIKDKDFLDNEENEDILEDIVLTLTLFEDREMIEERLKTYAHLFDDKVMKQLKRRRYTGWGRLSRKLINGIRDKQSGKTILDFLKSDGFANRNFMQLIHDDSLTFKEDIQKAQVSGQGDSLHEHIANLAGSPAIKKGILQTVKVVDELVKVMGRHKPENIVIEMARENQTTQKGQKNSRERMKRIEEGIKELGSQILKEHPVENTQLQNEKLYLYYLQNGRDMYVDQELDINRLSDYDVDHIVPQSFLKDDSIDNKVLTRSDKARGKSDNVPSEEVVKKMKNYWRQLLNAKLITQRKFDNLTKAERGGLSELDKAGFIKRQLVETRQITKHVAQILDSRMNTKYDENDKLIREVKVITLKSKLVSDFRKDFQFYKVREINNYHHAHDAYLNAVVGTALIKKYPKLESEFVYGDYKVYDVRKMIAKSEQEIGKATAKYFFYSNIMNFFKTEITLANGEIRKRPLIETNGETGEIVWDKGRDFATVRKVLSMPQVNIVKKTEVQTGGFSKESILPKRNSDKLIARKKDWDPKKYGGFDSPTVAYSVLVVAKVEKGKSKKLKSVKELLGITIMERSSFEKNPIDFLEAKGYKEVKKDLIIKLPKYSLFELENGRKRMLASAGELQKGNELALPSKYVNFLYLASHYEKLKGSPEDNEQKQLFVEQHKHYLDEIIEQISEFSKRVILADANLDKVLSAYNKHRDKPIREQAENIIHLFTLTNLGAPAAFKYFDTTIDRKRYTSTKEVLDATLIHQSITGLYETRIDLSQLGGDGGPAPEAAAKGGGGGTLNIEDEYRLHETSKGPDVPLGSTWLSDFPQAWAETGGMGLAFRQAPLIISLKATSTPVSIKQYPMSQEARLGIKPHIQRLLDQGILVPCQSPWNTPLLPVKKPGTNDYRPVQDLREVNKRVEDIHPTVPNPYNLLSGLPPSHQWYTVLDLKDAFFCLRLHPTSQSLFAFEWKDPEMGISGQLTWTRLPQGFKNSPTLFDEALHRDLADFRIQHPDLILLQYVDDLLLAATSELDCQQGTRALLQTLGDLGYRASAKKAQICQKQVKYLGYLLKEGQRWLTEARKETVMGQPTPKTPRQLREFLGTAGLCRLWIPGFAEMAAPLYPLTKTGTLFKWGPDQQKAYQEIKQALLTAPALGLPDLTKPFELFVDEKQGYAKGVLTQKLGPWRRPVAYLSKKLDPVAAGWPPCLRMVAAIAVLTKDVGKLTMGQPLVILAPHAVEALVKQPPDRWLSNARMTHYQALLLDTDRVQFGPIVALNPATLLPLPEEGLQHDCLDILAEAHGTRPDLTDQPLPDADHTWYTDGSSFLQEGQRRAGAAVTTETEVIWAKALPAGTSAQRAELIALTQALKMAAGKKLNVYTDSRYAFATAHIHGEIYRRRGLLTSEGKEIKNKDEILALLKALFLPKRLSIIHCPGHQKGNHAEARGNRMADQAAREVATRETPETSTLLAGKRTADGSEFEKRTADGSEFESPKKKAKVE

SEQ ID NO: 2421 - protein, 2008 aa, synthetic construct
  source 1..2008: note = Description of Artificial Sequence: Synthetic polypeptide
MPAAKRVKLDGGDKKYSIGLDIGTNSVGWAVITDEYKVPSKKFKVLGNTDRHSIKKNLIGALLFDSGETAEATRLKRTARRRYTRRKNRICYLQEIFSNEMAKVDDSFFHRLEESFLVEEDKKHERHPIFGNIVDEVAYHEKYPTIYHLRKKLVDSTDKADLRLIYLALAHMIKFRGHFLIEGDLNPDNSDVDKLFIQLVQTYNQLFEENPINASGVDAKAILSARLSKSRRLENLIAQLPGEKKNGLFGNLIALSLGLTPNFKSNFDLAEDAKLQLSKDTYDDDLDNLLAQIGDQYADLFLAAKNLSDAILLSDILRVNTEITKAPLSASMIKRYDEHHQDLTLLKALVRQQLPEKYKEIFFDQSKNGYAGYIDGGASQEEFYKFIKPILEKMDGTEELLVKLNREDLLRKQRTFDNGSIPHQIHLGELHAILRRQEDFYPFLKDNREKIEKILTFRIPYYVGPLARGNSRFAWMTRKSEETITPWNFEEVVDKGASAQSFIERMTNFDKNLPNEKVLPKHSLLYEYFTVYNELTKVKYVTEGMRKPAFLSGEQKKAIVDLLFKTNRKVTVKQLKEDYFKKIECFDSVEISGVEDRFNASLGTYHDLLKIIKDKDFLDNEENEDILEDIVLTLTLFEDREMIEERLKTYAHLFDDKVMKQLKRRRYTGWGRLSRKLINGIRDKQSGKTILDFLKSDGFANRNFMQLIHDDSLTFKEDIQKAQVSGQGDSLHEHIANLAGSPAIKKGILQTVKVVDELVKVMGRHKPENIVIEMARENQTTQKGQKNSRERMKRIEEGIKELGSQILKEHPVENTQLQNEKLYLYYLQNGRDMYVDQELDINRLSDYDVDHIVPQSFLKDDSIDNKVLTRSDKARGKSDNVPSEEVVKKMKNYWRQLLNAKLITQRKFDNLTKAERGGLSELDKAGFIKRQLVETRQITKHVAQILDSRMNTKYDENDKLIREVKVITLKSKLVSDFRKDFQFYKVREINNYHHAHDAYLNAVVGTALIKKYPKLESEFVYGDYKVYDVRKMIAKSEQEIGKATAKYFFYSNIMNFFKTEITLANGEIRKRPLIETNGETGEIVWDKGRDFATVRKVLSMPQVNIVKKTEVQTGGFSKESILPKRNSDKLIARKKDWDPKKYGGFDSPTVAYSVLVVAKVEKGKSKKLKSVKELLGITIMERSSFEKNPIDFLEAKGYKEVKKDLIIKLPKYSLFELENGRKRMLASAGELQKGNELALPSKYVNFLYLASHYEKLKGSPEDNEQKQLFVEQHKHYLDEIIEQISEFSKRVILADANLDKVLSAYNKHRDKPIREQAENIIHLFTLTNLGAPAAFKYFDTTIDRKRYTSTKEVLDATLIHQSITGLYETRIDLSQLGGDGGGGSGGSGGSGGSGGSGGSGGGVLDAPPSHIGLEHLPPPPEVPQFPLNLERLQALQDLVHRSLEAGYISPWDGPGNNPVFPVRKPNGAWRFVHDLRVTNALTKPIPALSPGPPDLTAIPTHLPHIICLDLKDAFFQIPVEDRFRSYFAFTLPTPGGLQPHRRFAWRVLPQGFINSPALFERALQEPLRQVSAAFSQSLLVSYMDDILYVSPTEEQRLQCYQTMAAHLRDLGFQVASEKTRQTPSPVPFLGQMVHERMVTYQSLPTLQISSPISLHQLQTVLGDLQWVSRGTPTTRRPLQLLYSSLKGIDDPRAIIHLSPEQQQGIAELRQALSHNARSRYNEQEPLLAYVHLTRAGSTLVLFQKGAQFPLAYFQTPLTDNQASPWGLLLLLGCQYLQAQALSSYAKTILKYYHNLPKTSLDNWIQSSEDPRVQELLQLWPQISSQGIQPPGPWKTLVTRAEVFLTPQFSPEPIPAALCLFSDGAARRGAYCLWKDHLLDFQAVPAPESAQKGELAGLLAGLAAAPPEPLNIWVDSKYLYSLLRTLVLGAWLQPDPVPSYALLYKSLLRHPAIFVGHVRSHSSASHPIASLNNYVDQLAGKRTADGSEFEKRTADGSEFESPKKKAKVE

SEQ ID NO: 2422 - protein, 2093 aa, synthetic construct
  source 1..2093: note = Description of Artificial Sequence: Synthetic polypeptide
MPAAKRVKLDGGDKKYSIGLDIGTNSVGWAVITDEYKVPSKKFKVLGNTDRHSIKKNLIGALLFDSGETAEATRLKRTARRRYTRRKNRICYLQEIFSNEMAKVDDSFFHRLEESFLVEEDKKHERHPIFGNIVDEVAYHEKYPTIYHLRKKLVDSTDKADLRLIYLALAHMIKFRGHFLIEGDLNPDNSDVDKLFIQLVQTYNQLFEENPINASGVDAKAILSARLSKSRRLENLIAQLPGEKKNGLFGNLIALSLGLTPNFKSNFDLAEDAKLQLSKDTYDDDLDNLLAQIGDQYADLFLAAKNLSDAILLSDILRVNTEITKAPLSASMIKRYDEHHQDLTLLKALVRQQLPEKYKEIFFDQSKNGYAGYIDGGASQEEFYKFIKPILEKMDGTEELLVKLNREDLLRKQRTFDNGSIPHQIHLGELHAILRRQEDFYPFLKDNREKIEKILTFRIPYYVGPLARGNSRFAWMTRKSEETITPWNFEEVVDKGASAQSFIERMTNFDKNLPNEKVLPKHSLLYEYFTVYNELTKVKYVTEGMRKPAFLSGEQKKAIVDLLFKTNRKVTVKQLKEDYFKKIECFDSVEISGVEDRFNASLGTYHDLLKIIKDKDFLDNEENEDILEDIVLTLTLFEDREMIEERLKTYAHLFDDKVMKQLKRRRYTGWGRLSRKLINGIRDKQSGKTILDFLKSDGFANRNFMQLIHDDSLTFKEDIQKAQVSGQGDSLHEHIANLAGSPAIKKGILQTVKVVDELVKVMGRHKPENIVIEMARENQTTQKGQKNSRERMKRIEEGIKELGSQILKEHPVENTQLQNEKLYLYYLQNGRDMYVDQELDINRLSDYDVDHIVPQSFLKDDSIDNKVLTRSDKARGKSDNVPSEEVVKKMKNYWRQLLNAKLITQRKFDNLTKAERGGLSELDKAGFIKRQLVETRQITKHVAQILDSRMNTKYDENDKLIREVKVITLKSKLVSDFRKDFQFYKVREINNYHHAHDAYLNAVVGTALIKKYPKLESEFVYGDYKVYDVRKMIAKSEQEIGKATAKYFFYSNIMNFFKTEITLANGEIRKRPLIETNGETGEIVWDKGRDFATVRKVLSMPQVNIVKKTEVQTGGFSKESILPKRNSDKLIARKKDWDPKKYGGFDSPTVAYSVLVVAKVEKGKSKKLKSVKELLGITIMERSSFEKNPIDFLEAKGYKEVKKDLIIKLPKYSLFELENGRKRMLASAGELQKGNELALPSKYVNFLYLASHYEKLKGSPEDNEQKQLFVEQHKHYLDEIIEQISEFSKRVILADANLDKVLSAYNKHRDKPIREQAENIIHLFTLTNLGAPAAFKYFDTTIDRKRYTSTKEVLDATLIHQSITGLYETRIDLSQLGGDGGEAAAKPAPGGTLNIEDEYRLHETSKGPDVPLGSTWLSDFPQAWAETGGMGLAFRQAPLIISLKATSTPVSIKQYPMSQEARLGIKPHIQRLLDQGILVPCQSPWNTPLLPVKKPGTNDYRPVQDLREVNKRVEDIHPTVPNPYNLLSGLPPSHQWYTVLDLKDAFFCLRLHPTSQSLFAFEWKDPEMGISGQLTWTRLPQGFKNSPTLFNEALHRDLADFRIQHPDLILLQYVDDLLLAATSELDCQQGTRALLQTLGDLGYRASAKKAQICQKQVKYLGYLLKEGQRWLTEARKETVMGQPTPKTPRQLREFLGTAGLCRLWIPGFAEMAAPLYPLTKPGTLFKWGPDQQKAYQEIKQALLTAPALGLPDLTKPFELFVDEKQGYAKGVLTQKLGPWRRPVAYLSKKLDPVAAGWPPCLRMVAAIAVLTKDVGKLTMGQPLVILAPHAVEALVKQPPDRWLSNARMTHYQALLLDTDRVQFGPIVALNPATLLPLPEEGLQHDCLDILAEAHGTRPDLTDQPLPDADHTWYTDGSSFLQEGQRRAGAAVTTETEVIWAKALPAGTSAQRAELIALTQALKMAAGKKLNVYTDSRYAFATAHIHGEIYRRRGWLTSEGKEIKNKDEILALLKALFLPKRLSIIHCPGHQKGNHAEARGNRMADQAAREVATRETPETSTLLAGKRTADGSEFEKRTADGSEFESPKKKAKVE

SEQ ID NO: 2423 - protein, 2096 aa, synthetic construct
  source 1..2096: note = Description of Artificial Sequence: Synthetic polypeptide
MPAAKRVKLDGGDKKYSIGLDIGTNSVGWAVITDEYKVPSKKFKVLGNTDRHSIKKNLIGALLFDSGETAEATRLKRTARRRYTRRKNRICYLQEIFSNEMAKVDDSFFHRLEESFLVEEDKKHERHPIFGNIVDEVAYHEKYPTIYHLRKKLVDSTDKADLRLIYLALAHMIKFRGHFLIEGDLNPDNSDVDKLFIQLVQTYNQLFEENPINASGVDAKAILSARLSKSRRLENLIAQLPGEKKNGLFGNLIALSLGLTPNFKSNFDLAEDAKLQLSKDTYDDDLDNLLAQIGDQYADLFLAAKNLSDAILLSDILRVNTEITKAPLSASMIKRYDEHHQDLTLLKALVRQQLPEKYKEIFFDQSKNGYAGYIDGGASQEEFYKFIKPILEKMDGTEELLVKLNREDLLRKQRTFDNGSIPHQIHLGELHAILRRQEDFYPFLKDNREKIEKILTFRIPYYVGPLARGNSRFAWMTRKSEETITPWNFEEVVDKGASAQSFIERMTNFDKNLPNEKVLPKHSLLYEYFTVYNELTKVKYVTEGMRKPAFLSGEQKKAIVDLLFKTNRKVTVKQLKEDYFKKIECFDSVEISGVEDRFNASLGTYHDLLKIIKDKDFLDNEENEDILEDIVLTLTLFEDREMIEERLKTYAHLFDDKVMKQLKRRRYTGWGRLSRKLINGIRDKQSGKTILDFLKSDGFANRNFMQLIHDDSLTFKEDIQKAQVSGQGDSLHEHIANLAGSPAIKKGILQTVKVVDELVKVMGRHKPENIVIEMARENQTTQKGQKNSRERMKRIEEGIKELGSQILKEHPVENTQLQNEKLYLYYLQNGRDMYVDQELDINRLSDYDVDHIVPQSFLKDDSIDNKVLTRSDKARGKSDNVPSEEVVKKMKNYWRQLLNAKLITQRKFDNLTKAERGGLSELDKAGFIKRQLVETRQITKHVAQILDSRMNTKYDENDKLIREVKVITLKSKLVSDFRKDFQFYKVREINNYHHAHDAYLNAVVGTALIKKYPKLESEFVYGDYKVYDVRKMIAKSEQEIGKATAKYFFYSNIMNFFKTEITLANGEIRKRPLIETNGETGEIVWDKGRDFATVRKVLSMPQVNIVKKTEVQTGGFSKESILPKRNSDKLIARKKDWDPKKYGGFDSPTVAYSVLVVAKVEKGKSKKLKSVKELLGITIMERSSFEKNPIDFLEAKGYKEVKKDLIIKLPKYSLFELENGRKRMLASAGELQKGNELALPSKYVNFLYLASHYEKLKGSPEDNEQKQLFVEQHKHYLDEIIEQISEFSKRVILADANLDKVLSAYNKHRDKPIREQAENIIHLFTLTNLGAPAAFKYFDTTIDRKRYTSTKEVLDATLIHQSITGLYETRIDLSQLGGDGGPAPAPAPAPAPGGTLNIEDEYRLHETSKGPDVPLGSTWLSDFPQAWAETGGMGLAFRQAPLIISLKATSTPVSIKQYPMSQEARLGIKPHIQRLLDQGILVPCQSPWNTPLLPVKKPGTNDYRPVQDLREVNKRVEDIHPTVPNPYNLLSGLPPSHQWYTVLDLKDAFFCLRLHPTSQSLFAFEWKDPEMGISGQLTWTRLPQGFKNSPTLFNEALHRDLADFRIQHPDLILLQYVDDLLLAATSELDCQQGTRALLQTLGDLGYRASAKKAQICQKQVKYLGYLLKEGQRWLTEARKETVMGQPTPKTPRQLREFLGTAGLCRLWIPGFAEMAAPLYPLTKPGTLFKWGPDQQKAYQEIKQALLTAPALGLPDLTKPFELFVDEKQGYAKGVLTQKLGPWRRPVAYLSKKLDPVAAGWPPCLRMVAAIAVLTKDVGKLTMGQPLVILAPHAVEALVKQPPDRWLSNARMTHYQALLLDTDRVQFGPIVALNPATLLPLPEEGLQHDCLDILAEAHGTRPDLTDQPLPDADHTWYTDGSSFLQEGQRRAGAAVTTETEVIWAKALPAGTSAQRAELIALTQALKMAAGKKLNVYTDSRYAFATAHIHGEIYRRRGWLTSEGKEIKNKDEILALLKALFLPKRLSIIHCPGHQKGNHAEARGNRMADQAAREVATRETPETSTLLAGKRTADGSEFEKRTADGSEFESPKKKAKVE

SEQ ID NO: 2424 - protein, 2089 aa, synthetic construct
  source 1..2089: note = Description of Artificial Sequence: Synthetic polypeptide
MPAAKRVKLDGGDKKYSIGLDIGTNSVGWAVITDEYKVPSKKFKVLGNTDRHSIKKNLIGALLFDSGETAEATRLKRTARRRYTRRKNRICYLQEIFSNEMAKVDDSFFHRLEESFLVEEDKKHERHPIFGNIVDEVAYHEKYPTIYHLRKKLVDSTDKADLRLIYLALAHMIKFRGHFLIEGDLNPDNSDVDKLFIQLVQTYNQLFEENPINASGVDAKAILSARLSKSRRLENLIAQLPGEKKNGLFGNLIALSLGLTPNFKSNFDLAEDAKLQLSKDTYDDDLDNLLAQIGDQYADLFLAAKNLSDAILLSDILRVNTEITKAPLSASMIKRYDEHHQDLTLLKALVRQQLPEKYKEIFFDQSKNGYAGYIDGGASQEEFYKFIKPILEKMDGTEELLVKLNREDLLRKQRTFDNGSIPHQIHLGELHAILRRQEDFYPFLKDNREKIEKILTFRIPYYVGPLARGNSRFAWMTRKSEETITPWNFEEVVDKGASAQSFIERMTNFDKNLPNEKVLPKHSLLYEYFTVYNELTKVKYVTEGMRKPAFLSGEQKKAIVDLLFKTNRKVTVKQLKEDYFKKIECFDSVEISGVEDRFNASLGTYHDLLKIIKDKDFLDNEENEDILEDIVLTLTLFEDREMIEERLKTYAHLFDDKVMKQLKRRRYTGWGRLSRKLINGIRDKQSGKTILDFLKSDGFANRNFMQLIHDDSLTFKEDIQKAQVSGQGDSLHEHIANLAGSPAIKKGILQTVKVVDELVKVMGRHKPENIVIEMARENQTTQKGQKNSRERMKRIEEGIKELGSQILKEHPVENTQLQNEKLYLYYLQNGRDMYVDQELDINRLSDYDVDHIVPQSFLKDDSIDNKVLTRSDKARGKSDNVPSEEVVKKMKNYWRQLLNAKLITQRKFDNLTKAERGGLSELDKAGFIKRQLVETRQITKHVAQILDSRMNTKYDENDKLIREVKVITLKSKLVSDFRKDFQFYKVREINNYHHAHDAYLNAVVGTALIKKYPKLESEFVYGDYKVYDVRKMIAKSEQEIGKATAKYFFYSNIMNFFKTEITLANGEIRKRPLIETNGETGEIVWDKGRDFATVRKVLSMPQVNIVKKTEVQTGGFSKESILPKRNSDKLIARKKDWDPKKYGGFDSPTVAYSVLVVAKVEKGKSKKLKSVKELLGITIMERSSFEKNPIDFLEAKGYKEVKKDLIIKLPKYSLFELENGRKRMLASAGELQKGNELALPSKYVNFLYLASHYEKLKGSPEDNEQKQLFVEQHKHYLDEIIEQISEFSKRVILADANLDKVLSAYNKHRDKPIREQAENIIHLFTLTNLGAPAAFKYFDTTIDRKRYTSTKEVLDATLIHQSITGLYETRIDLSQLGGDGGGGGGGGTLNIEDEYRLHETSKGPDVPLGSTWLSDFPQAWAETGGMGLAFRQAPLIISLKATSTPVSIKQYPMSQEARLGIKPHIQRLLDQGILVPCQSPWNTPLLPVKKPGTNDYRPVQDLREVNKRVEDIHPTVPNPYNLLSGLPPSHQWYTVLDLKDAFFCLRLHPTSQSLFAFEWKDPEMGISGQLTWTRLPQGFKNSPTLFNEALHRDLADFRIQHPDLILLQYVDDLLLAATSELDCQQGTRALLQTLGDLGYRASAKKAQICQKQVKYLGYLLKEGQRWLTEARKETVMGQPTPKTPRQLREFLGTAGLCRLWIPGFAEMAAPLYPLTKPGTLFKWGPDQQKAYQEIKQALLTAPALGLPDLTKPFELFVDEKQGYAKGVLTQKLGPWRRPVAYLSKKLDPVAAGWPPCLRMVAAIAVLTKDVGKLTMGQPLVILAPHAVEALVKQPPDRWLSNARMTHYQALLLDTDRVQFGPIVALNPATLLPLPEEGLQHDCLDILAEAHGTRPDLTDQPLPDADHTWYTDGSSFLQEGQRRAGAAVTTETEVIWAKALPAGTSAQRAELIALTQALKMAAGKKLNVYTDSRYAFATAHIHGEIYRRRGWLTSEGKEIKNKDEILALLKALFLPKRLSIIHCPGHQKGNHAEARGNRMADQAAREVATRETPETSTLLAGKRTADGSEFEKRTADGSEFESPKKKAKVE

SEQ ID NO: 2425 - protein, 2094 aa, synthetic construct
  source 1..2094: note = Description of Artificial Sequence: Synthetic polypeptide
MPAAKRVKLDGGDKKYSIGLDIGTNSVGWAVITDEYKVPSKKFKVLGNTDRHSIKKNLIGALLFDSGETAEATRLKRTARRRYTRRKNRICYLQEIFSNEMAKVDDSFFHRLEESFLVEEDKKHERHPIFGNIVDEVAYHEKYPTIYHLRKKLVDSTDKADLRLIYLALAHMIKFRGHFLIEGDLNPDNSDVDKLFIQLVQTYNQLFEENPINASGVDAKAILSARLSKSRRLENLIAQLPGEKKNGLFGNLIALSLGLTPNFKSNFDLAEDAKLQLSKDTYDDDLDNLLAQIGDQYADLFLAAKNLSDAILLSDILRVNTEITKAPLSASMIKRYDEHHQDLTLLKALVRQQLPEKYKEIFFDQSKNGYAGYIDGGASQEEFYKFIKPILEKMDGTEELLVKLNREDLLRKQRTFDNGSIPHQIHLGELHAILRRQEDFYPFLKDNREKIEKILTFRIPYYVGPLARGNSRFAWMTRKSEETITPWNFEEVVDKGASAQSFIERMTNFDKNLPNEKVLPKHSLLYEYFTVYNELTKVKYVTEGMRKPAFLSGEQKKAIVDLLFKTNRKVTVKQLKEDYFKKIECFDSVEISGVEDRFNASLGTYHDLLKIIKDKDFLDNEENEDILEDIVLTLTLFEDREMIEERLKTYAHLFDDKVMKQLKRRRYTGWGRLSRKLINGIRDKQSGKTILDFLKSDGFANRNFMQLIHDDSLTFKEDIQKAQVSGQGDSLHEHIANLAGSPAIKKGILQTVKVVDELVKVMGRHKPENIVIEMARENQTTQKGQKNSRERMKRIEEGIKELGSQILKEHPVENTQLQNEKLYLYYLQNGRDMYVDQELDINRLSDYDVDHIVPQSFLKDDSIDNKVLTRSDKARGKSDNVPSEEVVKKMKNYWRQLLNAKLITQRKFDNLTKAERGGLSELDKAGFIKRQLVETRQITKHVAQILDSRMNTKYDENDKLIREVKVITLKSKLVSDFRKDFQFYKVREINNYHHAHDAYLNAVVGTALIKKYPKLESEFVYGDYKVYDVRKMIAKSEQEIGKATAKYFFYSNIMNFFKTEITLANGEIRKRPLIETNGETGEIVWDKGRDFATVRKVLSMPQVNIVKKTEVQTGGFSKESILPKRNSDKLIARKKDWDPKKYGGFDSPTVAYSVLVVAKVEKGKSKKLKSVKELLGITIMERSSFEKNPIDFLEAKGYKEVKKDLIIKLPKYSLFELENGRKRMLASAGELQKGNELALPSKYVNFLYLASHYEKLKGSPEDNEQKQLFVEQHKHYLDEIIEQISEFSKRVILADANLDKVLSAYNKHRDKPIREQAENIIHLFTLTNLGAPAAFKYFDTTIDRKRYTSTKEVLDATLIHQSITGLYETRIDLSQLGGDGGGSSGGGGGSGGTLNIEDEYRLHETSKGPDVPLGSTWLSDFPQAWAETGGMGLAFRQAPLIISLKATSTPVSIKQYPMSQEARLGIKPHIQRLLDQGILVPCQSPWNTPLLPVKKPGTNDYRPVQDLREVNKRVEDIHPTVPNPYNLLSGLPPSHQWYTVLDLKDAFFCLRLHPTSQSLFAFEWKDPEMGISGQLTWTRLPQGFKNSPTLFNEALHRDLADFRIQHPDLILLQYVDDLLLAATSELDCQQGTRALLQTLGDLGYRASAKKAQICQKQVKYLGYLLKEGQRWLTEARKETVMGQPTPKTPRQLREFLGTAGLCRLWIPGFAEMAAPLYPLTKPGTLFKWGPDQQKAYQEIKQALLTAPALGLPDLTKPFELFVDEKQGYAKGVLTQKLGPWRRPVAYLSKKLDPVAAGWPPCLRMVAAIAVLTKDVGKLTMGQPLVILAPHAVEALVKQPPDRWLSNARMTHYQALLLDTDRVQFGPIVALNPATLLPLPEEGLQHDCLDILAEAHGTRPDLTDQPLPDADHTWYTDGSSFLQEGQRRAGAAVTTETEVIWAKALPAGTSAQRAELIALTQALKMAAGKKLNVYTDSRYAFATAHIHGEIYRRRGWLTSEGKEIKNKDEILALLKALFLPKRLSIIHCPGHQKGNHAEARGNRMADQAAREVATRETPETSTLLAGKRTADGSEFEKRTADGSEFESPKKKAKVE

SEQ ID NO: 2426 - protein, 2093 aa, synthetic construct
  source 1..2093: note = Description of Artificial Sequence: Synthetic polypeptide
MPAAKRVKLDGGDKKYSIGLDIGTNSVGWAVITDEYKVPSKKFKVLGNTDRHSIKKNLIGALLFDSGETAEATRLKRTARRRYTRRKNRICYLQEIFSNEMAKVDDSFFHRLEESFLVEEDKKHERHPIFGNIVDEVAYHEKYPTIYHLRKKLVDSTDKADLRLIYLALAHMIKFRGHFLIEGDLNPDNSDVDKLFIQLVQTYNQLFEENPINASGVDAKAILSARLSKSRRLENLIAQLPGEKKNGLFGNLIALSLGLTPNFKSNFDLAEDAKLQLSKDTYDDDLDNLLAQIGDQYADLFLAAKNLSDAILLSDILRVNTEITKAPLSASMIKRYDEHHQDLTLLKALVRQQLPEKYKEIFFDQSKNGYAGYIDGGASQEEFYKFIKPILEKMDGTEELLVKLNREDLLRKQRTFDNGSIPHQIHLGELHAILRRQEDFYPFLKDNREKIEKILTFRIPYYVGPLARGNSRFAWMTRKSEETITPWNFEEVVDKGASAQSFIERMTNFDKNLPNEKVLPKHSLLYEYFTVYNELTKVKYVTEGMRKPAFLSGEQKKAIVDLLFKTNRKVTVKQLKEDYFKKIECFDSVEISGVEDRFNASLGTYHDLLKIIKDKDFLDNEENEDILEDIVLTLTLFEDREMIEERLKTYAHLFDDKVMKQLKRRRYTGWGRLSRKLINGIRDKQSGKTILDFLKSDGFANRNFMQLIHDDSLTFKEDIQKAQVSGQGDSLHEHIANLAGSPAIKKGILQTVKVVDELVKVMGRHKPENIVIEMARENQTTQKGQKNSRERMKRIEEGIKELGSQILKEHPVENTQLQNEKLYLYYLQNGRDMYVDQELDINRLSDYDVDHIVPQSFLKDDSIDNKVLTRSDKARGKSDNVPSEEVVKKMKNYWRQLLNAKLITQRKFDNLTKAERGGLSELDKAGFIKRQLVETRQITKHVAQILDSRMNTKYDENDKLIREVKVITLKSKLVSDFRKDFQFYKVREINNYHHAHDAYLNAVVGTALIKKYPKLESEFVYGDYKVYDVRKMIAKSEQEIGKATAKYFFYSNIMNFFKTEITLANGEIRKRPLIETNGETGEIVWDKGRDFATVRKVLSMPQVNIVKKTEVQTGGFSKESILPKRNSDKLIARKKDWDPKKYGGFDSPTVAYSVLVVAKVEKGKSKKLKSVKELLGITIMERSSFEKNPIDFLEAKGYKEVKKDLIIKLPKYSLFELENGRKRMLASAGELQKGNELALPSKYVNFLYLASHYEKLKGSPEDNEQKQLFVEQHKHYLDEIIEQISEFSKRVILADANLDKVLSAYNKHRDKPIREQAENIIHLFTLTNLGAPAAFKYFDTTIDRKRYTSTKEVLDATLIHQSITGLYETRIDLSQLGGDGGEAAAKGGSGGTLNIEDEYRLHETSKGPDVPLGSTWLSDFPQAWAETGGMGLAFRQAPLIISLKATSTPVSIKQYPMSQEARLGIKPHIQRLLDQGILVPCQSPWNTPLLPVKKPGTNDYRPVQDLREVNKRVEDIHPTVPNPYNLLSGLPPSHQWYTVLDLKDAFFCLRLHPTSQSLFAFEWKDPEMGISGQLTWTRLPQGFKNSPTLFNEALHRDLADFRIQHPDLILLQYVDDLLLAATSELDCQQGTRALLQTLGDLGYRASAKKAQICQKQVKYLGYLLKEGQRWLTEARKETVMGQPTPKTPRQLREFLGTAGLCRLWIPGFAEMAAPLYPLTKPGTLFKWGPDQQKAYQEIKQALLTAPALGLPDLTKPFELFVDEKQGYAKGVLTQKLGPWRRPVAYLSKKLDPVAAGWPPCLRMVAAIAVLTKDVGKLTMGQPLVILAPHAVEALVKQPPDRWLSNARMTHYQALLLDTDRVQFGPIVALNPATLLPLPEEGLQHDCLDILAEAHGTRPDLTDQPLPDADHTWYTDGSSFLQEGQRRAGAAVTTETEVIWAKALPAGTSAQRAELIALTQALKMAAGKKLNVYTDSRYAFATAHIHGEIYRRRGWLTSEGKEIKNKDEILALLKALFLPKRLSIIHCPGHQKGNHAEARGNRMADQAAREVATRETPETSTLLAGKRTADGSEFEKRTADGSEFESPKKKAKVE

SEQ ID NO: 2427 - protein, 2088 aa, synthetic construct
  source 1..2088: note = Description of Artificial Sequence: Synthetic polypeptide
MPAAKRVKLDGGDKKYSIGLDIGTNSVGWAVITDEYKVPSKKFKVLGNTDRHSIKKNLIGALLFDSGETAEATRLKRTARRRYTRRKNRICYLQEIFSNEMAKVDDSFFHRLEESFLVEEDKKHERHPIFGNIVDEVAYHEKYPTIYHLRKKLVDSTDKADLRLIYLALAHMIKFRGHFLIEGDLNPDNSDVDKLFIQLVQTYNQLFEENPINASGVDAKAILSARLSKSRRLENLIAQLPGEKKNGLFGNLIALSLGLTPNFKSNFDLAEDAKLQLSKDTYDDDLDNLLAQIGDQYADLFLAAKNLSDAILLSDILRVNTEITKAPLSASMIKRYDEHHQDLTLLKALVRQQLPEKYKEIFFDQSKNGYAGYIDGGASQEEFYKFIKPILEKMDGTEELLVKLNREDLLRKQRTFDNGSIPHQIHLGELHAILRRQEDFYPFLKDNREKIEKILTFRIPYYVGPLARGNSRFAWMTRKSEETITPWNFEEVVDKGASAQSFIERMTNFDKNLPNEKVLPKHSLLYEYFTVYNELTKVKYVTEGMRKPAFLSGEQKKAIVDLLFKTNRKVTVKQLKEDYFKKIECFDSVEISGVEDRFNASLGTYHDLLKIIKDKDFLDNEENEDILEDIVLTLTLFEDREMIEERLKTYAHLFDDKVMKQLKRRRYTGWGRLSRKLINGIRDKQSGKTILDFLKSDGFANRNFMQLIHDDSLTFKEDIQKAQVSGQGDSLHEHIANLAGSPAIKKGILQTVKVVDELVKVMGRHKPENIVIEMARENQTTQKGQKNSRERMKRIEEGIKELGSQILKEHPVENTQLQNEKLYLYYLQNGRDMYVDQELDINRLSDYDVDHIVPQSFLKDDSIDNKVLTRSDKARGKSDNVPSEEVVKKMKNYWRQLLNAKLITQRKFDNLTKAERGGLSELDKAGFIKRQLVETRQITKHVAQILDSRMNTKYDENDKLIREVKVITLKSKLVSDFRKDFQFYKVREINNYHHAHDAYLNAVVGTALIKKYPKLESEFVYGDYKVYDVRKMIAKSEQEIGKATAKYFFYSNIMNFFKTEITLANGEIRKRPLIETNGETGEIVWDKGRDFATVRKVLSMPQVNIVKKTEVQTGGFSKESILPKRNSDKLIARKKDWDPKKYGGFDSPTVAYSVLVVAKVEKGKSKKLKSVKELLGITIMERSSFEKNPIDFLEAKGYKEVKKDLIIKLPKYSLFELENGRKRMLASAGELQKGNELALPSKYVNFLYLASHYEKLKGSPEDNEQKQLFVEQHKHYLDEIIEQISEFSKRVILADANLDKVLSAYNKHRDKPIREQAENIIHLFTLTNLGAPAAFKYFDTTIDRKRYTSTKEVLDATLIHQSITGLYETRIDLSQLGGDGGPAPGGTLNIEDEYRLHETSKGPDVPLGSTWLSDFPQAWAETGGMGLAFRQAPLIISLKATSTPVSIKQYPMSQEARLGIKPHIQRLLDQGILVPCQSPWNTPLLPVKKPGTNDYRPVQDLREVNKRVEDIHPTVPNPYNLLSGLPPSHQWYTVLDLKDAFFCLRLHPTSQSLFAFEWKDPEMGISGQLTWTRLPQGFKNSPTLFNEALHRDLADFRIQHPDLILLQYVDDLLLAATSELDCQQGTRALLQTLGDLGYRASAKKAQICQKQVKYLGYLLKEGQRWLTEARKETVMGQPTPKTPRQLREFLGTAGLCRLWIPGFAEMAAPLYPLTKPGTLFKWGPDQQKAYQEIKQALLTAPALGLPDLTKPFELFVDEKQGYAKGVLTQKLGPWRRPVAYLSKKLDPVAAGWPPCLRMVAAIAVLTKDVGKLTMGQPLVILAPHAVEALVKQPPDRWLSNARMTHYQALLLDTDRVQFGPIVALNPATLLPLPEEGLQHDCLDILAEAHGTRPDLTDQPLPDADHTWYTDGSSFLQEGQRRAGAAVTTETEVIWAKALPAGTSAQRAELIALTQALKMAAGKKLNVYTDSRYAFATAHIHGEIYRRRGWLTSEGKEIKNKDEILALLKALFLPKRLSIIHCPGHQKGNHAEARGNRMADQAAREVATRETPETSTLLAGKRTADGSEFEKRTADGSEFESPKKKAKVE

SEQ ID NO: 2428 - protein, 2096 aa, synthetic construct
  source 1..2096: note = Description of Artificial Sequence: Synthetic polypeptide
MPAAKRVKLDGGDKKYSIGLDIGTNSVGWAVITDEYKVPSKKFKVLGNTDRHSIKKNLIGALLFDSGETAEATRLKRTARRRYTRRKNRICYLQEIFSNEMAKVDDSFFHRLEESFLVEEDKKHERHPIFGNIVDEVAYHEKYPTIYHLRKKLVDSTDKADLRLIYLALAHMIKFRGHFLIEGDLNPDNSDVDKLFIQLVQTYNQLFEENPINASGVDAKAILSARLSKSRRLENLIAQLPGEKKNGLFGNLIALSLGLTPNFKSNFDLAEDAKLQLSKDTYDDDLDNLLAQIGDQYADLFLAAKNLSDAILLSDILRVNTEITKAPLSASMIKRYDEHHQDLTLLKALVRQQLPEKYKEIFFDQSKNGYAGYIDGGASQEEFYKFIKPILEKMDGTEELLVKLNREDLLRKQRTFDNGSIPHQIHLGELHAILRRQEDFYPFLKDNREKIEKILTFRIPYYVGPLARGNSRFAWMTRKSEETITPWNFEEVVDKGASAQSFIERMTNFDKNLPNEKVLPKHSLLYEYFTVYNELTKVKYVTEGMRKPAFLSGEQKKAIVDLLFKTNRKVTVKQLKEDYFKKIECFDSVEISGVEDRFNASLGTYHDLLKIIKDKDFLDNEENEDILEDIVLTLTLFEDREMIEERLKTYAHLFDDKVMKQLKRRRYTGWGRLSRKLINGIRDKQSGKTILDFLKSDGFANRNFMQLIHDDSLTFKEDIQKAQVSGQGDSLHEHIANLAGSPAIKKGILQTVKVVDELVKVMGRHKPENIVIEMARENQTTQKGQKNSRERMKRIEEGIKELGSQILKEHPVENTQLQNEKLYLYYLQNGRDMYVDQELDINRLSDYDVDHIVPQSFLKDDSIDNKVLTRSDKARGKSDNVPSEEVVKKMKNYWRQLLNAKLITQRKFDNLTKAERGGLSELDKAGFIKRQLVETRQITKHVAQILDSRMNTKYDENDKLIREVKVITLKSKLVSDFRKDFQFYKVREINNYHHAHDAYLNAVVGTALIKKYPKLESEFVYGDYKVYDVRKMIAKSEQEIGKATAKYFFYSNIMNFFKTEITLANGEIRKRPLIETNGETGEIVWDKGRDFATVRKVLSMPQVNIVKKTEVQTGGFSKESILPKRNSDKLIARKKDWDPKKYGGFDSPTVAYSVLVVAKVEKGKSKKLKSVKELLGITIMERSSFEKNPIDFLEAKGYKEVKKDLIIKLPKYSLFELENGRKRMLASAGELQKGNELALPSKYVNFLYLASHYEKLKGSPEDNEQKQLFVEQHKHYLDEIIEQISEFSKRVILADANLDKVLSAYNKHRDKPIREQAENIIHLFTLTNLGAPAAFKYFDTTIDRKRYTSTKEVLDATLIHQSITGLYETRIDLSQLGGDGGPAPGSSEAAAKGGTLNIEDEYRLHETSKGPDVPLGSTWLSDFPQAWAETGGMGLAFRQAPLIISLKATSTPVSIKQYPMSQEARLGIKPHIQRLLDQGILVPCQSPWNTPLLPVKKPGTNDYRPVQDLREVNKRVEDIHPTVPNPYNLLSGLPPSHQWYTVLDLKDAFFCLRLHPTSQSLFAFEWKDPEMGISGQLTWTRLPQGFKNSPTLFNEALHRDLADFRIQHPDLILLQYVDDLLLAATSELDCQQGTRALLQTLGDLGYRASAKKAQICQKQVKYLGYLLKEGQRWLTEARKETVMGQPTPKTPRQLREFLGTAGLCRLWIPGFAEMAAPLYPLTKPGTLFKWGPDQQKAYQEIKQALLTAPALGLPDLTKPFELFVDEKQGYAKGVLTQKLGPWRRPVAYLSKKLDPVAAGWPPCLRMVAAIAVLTKDVGKLTMGQPLVILAPHAVEALVKQPPDRWLSNARMTHYQALLLDTDRVQFGPIVALNPATLLPLPEEGLQHDCLDILAEAHGTRPDLTDQPLPDADHTWYTDGSSFLQEGQRRAGAAVTTETEVIWAKALPAGTSAQRAELIALTQALKMAAGKKLNVYTDSRYAFATAHIHGEIYRRRGWLTSEGKEIKNKDEILALLKALFLPKRLSIIHCPGHQKGNHAEARGNRMADQAAREVATRETPETSTLLAGKRTADGSEFEKRTADGSEFESPKKKAKVE

SEQ ID NO: 2429 - protein, 2115 aa, synthetic construct
  source 1..2115: note = Description of Artificial Sequence: Synthetic polypeptide
MPAAKRVKLDGGDKKYSIGLDIGTNSVGWAVITDEYKVPSKKFKVLGNTDRHSIKKNLIGALLFDSGETAEATRLKRTARRRYTRRKNRICYLQEIFSNEMAKVDDSFFHRLEESFLVEEDKKHERHPIFGNIVDEVAYHEKYPTIYHLRKKLVDSTDKADLRLIYLALAHMIKFRGHFLIEGDLNPDNSDVDKLFIQLVQTYNQLFEENPINASGVDAKAILSARLSKSRRLENLIAQLPGEKKNGLFGNLIALSLGLTPNFKSNFDLAEDAKLQLSKDTYDDDLDNLLAQIGDQYADLFLAAKNLSDAILLSDILRVNTEITKAPLSASMIKRYDEHHQDLTLLKALVRQQLPEKYKEIFFDQSKNGYAGYIDGGASQEEFYKFIKPILEKMDGTEELLVKLNREDLLRKQRTFDNGSIPHQIHLGELHAILRRQEDFYPFLKDNREKIEKILTFRIPYYVGPLARGNSRFAWMTRKSEETITPWNFEEVVDKGASAQSFIERMTNFDKNLPNEKVLPKHSLLYEYFTVYNELTKVKYVTEGMRKPAFLSGEQKKAIVDLLFKTNRKVTVKQLKEDYFKKIECFDSVEISGVEDRFNASLGTYHDLLKIIKDKDFLDNEENEDILEDIVLTLTLFEDREMIEERLKTYAHLFDDKVMKQLKRRRYTGWGRLSRKLINGIRDKQSGKTILDFLKSDGFANRNFMQLIHDDSLTFKEDIQKAQVSGQGDSLHEHIANLAGSPAIKKGILQTVKVVDELVKVMGRHKPENIVIEMARENQTTQKGQKNSRERMKRIEEGIKELGSQILKEHPVENTQLQNEKLYLYYLQNGRDMYVDQELDINRLSDYDVDHIVPQSFLKDDSIDNKVLTRSDKARGKSDNVPSEEVVKKMKNYWRQLLNAKLITQRKFDNLTKAERGGLSELDKAGFIKRQLVETRQITKHVAQILDSRMNTKYDENDKLIREVKVITLKSKLVSDFRKDFQFYKVREINNYHHAHDAYLNAVVGTALIKKYPKLESEFVYGDYKVYDVRKMIAKSEQEIGKATAKYFFYSNIMNFFKTEITLANGEIRKRPLIETNGETGEIVWDKGRDFATVRKVLSMPQVNIVKKTEVQTGGFSKESILPKRNSDKLIARKKDWDPKKYGGFDSPTVAYSVLVVAKVEKGKSKKLKSVKELLGITIMERSSFEKNPIDFLEAKGYKEVKKDLIIKLPKYSLFELENGRKRMLASAGELQKGNELALPSKYVNFLYLASHYEKLKGSPEDNEQKQLFVEQHKHYLDEIIEQISEFSKRVILADANLDKVLSAYNKHRDKPIREQAENIIHLFTLTNLGAPAAFKYFDTTIDRKRYTSTKEVLDATLIHQSITGLYETRIDLSQLGGDGGGGGGSGGGGSGGGGSGGGGSGGGGSGGGGSGGTLNIEDEYRLHETSKGPDVPLGSTWLSDFPQAWAETGGMGLAFRQAPLIISLKATSTPVSIKQYPMSQEARLGIKPHIQRLLDQGILVPCQSPWNTPLLPVKKPGTNDYRPVQDLREVNKRVEDIHPTVPNPYNLLSGLPPSHQWYTVLDLKDAFFCLRLHPTSQSLFAFEWKDPEMGISGQLTWTRLPQGFKNSPTLFNEALHRDLADFRIQHPDLILLQYVDDLLLAATSELDCQQGTRALLQTLGDLGYRASAKKAQICQKQVKYLGYLLKEGQRWLTEARKETVMGQPTPKTPRQLREFLGTAGLCRLWIPGFAEMAAPLYPLTKPGTLFKWGPDQQKAYQEIKQALLTAPALGLPDLTKPFELFVDEKQGYAKGVLTQKLGPWRRPVAYLSKKLDPVAAGWPPCLRMVAAIAVLTKDVGKLTMGQPLVILAPHAVEALVKQPPDRWLSNARMTHYQALLLDTDRVQFGPIVALNPATLLPLPEEGLQHDCLDILAEAHGTRPDLTDQPLPDADHTWYTDGSSFLQEGQRRAGAAVTTETEVIWAKALPAGTSAQRAELIALTQALKMAAGKKLNVYTDSRYAFATAHIHGEIYRRRGWLTSEGKEIKNKDEILALLKALFLPKRLSIIHCPGHQKGNHAEARGNRMADQAAREVATRETPETSTLLAGKRTADGSEFEKRTADGSEFESPKKKAKVE

SEQ ID NO: 2430 - protein, 2098 aa, synthetic construct
  source 1..2098: note = Description of Artificial Sequence: Synthetic polypeptide
MPAAKRVKLDGGDKKYSIGLDIGTNSVGWAVITDEYKVPSKKFKVLGNTDRHSIKKNLIGALLFDSGETAEATRLKRTARRRYTRRKNRICYLQEIFSNEMAKVDDSFFHRLEESFLVEEDKKHERHPIFGNIVDEVAYHEKYPTIYHLRKKLVDSTDKADLRLIYLALAHMIKFRGHFLIEGDLNPDNSDVDKLFIQLVQTYNQLFEENPINASGVDAKAILSARLSKSRRLENLIAQLPGEKKNGLFGNLIALSLGLTPNFKSNFDLAEDAKLQLSKDTYDDDLDNLLAQIGDQYADLFLAAKNLSDAILLSDILRVNTEITKAPLSASMIKRYDEHHQDLTLLKALVRQQLPEKYKEIFFDQSKNGYAGYIDGGASQEEFYKFIKPILEKMDGTEELLVKLNREDLLRKQRTFDNGSIPHQIHLGELHAILRRQEDFYPFLKDNREKIEKILTFRIPYYVGPLARGNSRFAWMTRKSEETITPWNFEEVVDKGASAQSFIERMTNFDKNLPNEKVLPKHSLLYEYFTVYNELTKVKYVTEGMRKPAFLSGEQKKAIVDLLFKTNRKVTVKQLKEDYFKKIECFDSVEISGVEDRFNASLGTYHDLLKIIKDKDFLDNEENEDILEDIVLTLTLFEDREMIEERLKTYAHLFDDKVMKQLKRRRYTGWGRLSRKLINGIRDKQSGKTILDFLKSDGFANRNFMQLIHDDSLTFKEDIQKAQVSGQGDSLHEHIANLAGSPAIKKGILQTVKVVDELVKVMGRHKPENIVIEMARENQTTQKGQKNSRERMKRIEEGIKELGSQILKEHPVENTQLQNEKLYLYYLQNGRDMYVDQELDINRLSDYDVDHIVPQSFLKDDSIDNKVLTRSDKARGKSDNVPSEEVVKKMKNYWRQLLNAKLITQRKFDNLTKAERGGLSELDKAGFIKRQLVETRQITKHVAQILDSRMNTKYDENDKLIREVKVITLKSKLVSDFRKDFQFYKVREINNYHHAHDAYLNAVVGTALIKKYPKLESEFVYGDYKVYDVRKMIAKSEQEIGKATAKYFFYSNIMNFFKTEITLANGEIRKRPLIETNGETGEIVWDKGRDFATVRKVLSMPQVNIVKKTEVQTGGFSKESILPKRNSDKLIARKKDWDPKKYGGFDSPTVAYSVLVVAKVEKGKSKKLKSVKELLGITIMERSSFEKNPIDFLEAKGYKEVKKDLIIKLPKYSLFELENGRKRMLASAGELQKGNELALPSKYVNFLYLASHYEKLKGSPEDNEQKQLFVEQHKHYLDEIIEQISEFSKRVILADANLDKVLSAYNKHRDKPIREQAENIIHLFTLTNLGAPAAFKYFDTTIDRKRYTSTKEVLDATLIHQSITGLYETRIDLSQLGGDGGPAPAPAPAPAPAPGGTLNIEDEYRLHETSKGPDVPLGSTWLSDFPQAWAETGGMGLAFRQAPLIISLKATSTPVSIKQYPMSQEARLGIKPHIQRLLDQGILVPCQSPWNTPLLPVKKPGTNDYRPVQDLREVNKRVEDIHPTVPNPYNLLSGLPPSHQWYTVLDLKDAFFCLRLHPTSQSLFAFEWKDPEMGISGQLTWTRLPQGFKNSPTLFNEALHRDLADFRIQHPDLILLQYVDDLLLAATSELDCQQGTRALLQTLGDLGYRASAKKAQICQKQVKYLGYLLKEGQRWLTEARKETVMGQPTPKTPRQLREFLGKAGLCRLFIPGFAEMAAPLYPLTKPGTLFKWGPDQQKAYQEIKQALLTAPALGLPDLTKPFELFVDEKQGYAKGVLTQKLGPWRRPVAYLSKKLDPVAAGWPPCLRMVAAIAVLTKDVGKLTMGQPLVILAPHAVEALVKQPPDRWLSNARMTHYQALLLDTDRVQFGPIVALNPATLLPLPEEGLQHDCLDILAEAHGTRPDLTDQPLPDADHTWYTDGSSFLQEGQRRAGAAVTTETEVIWAKALPAGTSAQRAELIALTQALKMAAGKKLNVYTDSRYAFATAHIHGEIYRRRGWLTSEGKEIKNKDEILALLKALFLPKRLSIIHCPGHQKGNHAEARGNRMADQAAREVATRETPETSTLLAGKRTADGSEFEKRTADGSEFESPKKKAKVE

SEQ ID NO: 2431 - protein, 2096 aa, synthetic construct
  source 1..2096: note = Description of Artificial Sequence: Synthetic polypeptide
MPAAKRVKLDGGDKKYSIGLDIGTNSVGWAVITDEYKVPSKKFKVLGNTDRHSIKKNLIGALLFDSGETAEATRLKRTARRRYTRRKNRICYLQEIFSNEMAKVDDSFFHRLEESFLVEEDKKHERHPIFGNIVDEVAYHEKYPTIYHLRKKLVDSTDKADLRLIYLALAHMIKFRGHFLIEGDLNPDNSDVDKLFIQLVQTYNQLFEENPINASGVDAKAILSARLSKSRRLENLIAQLPGEKKNGLFGNLIALSLGLTPNFKSNFDLAEDAKLQLSKDTYDDDLDNLLAQIGDQYADLFLAAKNLSDAILLSDILRVNTEITKAPLSASMIKRYDEHHQDLTLLKALVRQQLPEKYKEIFFDQSKNGYAGYIDGGASQEEFYKFIKPILEKMDGTEELLVKLNREDLLRKQRTFDNGSIPHQIHLGELHAILRRQEDFYPFLKDNREKIEKILTFRIPYYVGPLARGNSRFAWMTRKSEETITPWNFEEVVDKGASAQSFIERMTNFDKNLPNEKVLPKHSLLYEYFTVYNELTKVKYVTEGMRKPAFLSGEQKKAIVDLLFKTNRKVTVKQLKEDYFKKIECFDSVEISGVEDRFNASLGTYHDLLKIIKDKDFLDNEENEDILEDIVLTLTLFEDREMIEERLKTYAHLFDDKVMKQLKRRRYTGWGRLSRKLINGIRDKQSGKTILDFLKSDGFANRNFMQLIHDDSLTFKEDIQKAQVSGQGDSLHEHIANLAGSPAIKKGILQTVKVVDELVKVMGRHKPENIVIEMARENQTTQKGQKNSRERMKRIEEGIKELGSQILKEHPVENTQLQNEKLYLYYLQNGRDMYVDQELDINRLSDYDVDHIVPQSFLKDDSIDNKVLTRSDKARGKSDNVPSEEVVKKMKNYWRQLLNAKLITQRKFDNLTKAERGGLSELDKAGFIKRQLVETRQITKHVAQILDSRMNTKYDENDKLIREVKVITLKSKLVSDFRKDFQFYKVREINNYHHAHDAYLNAVVGTALIKKYPKLESEFVYGDYKVYDVRKMIAKSEQEIGKATAKYFFYSNIMNFFKTEITLANGEIRKRPLIETNGETGEIVWDKGRDFATVRKVLSMPQVNIVKKTEVQTGGFSKESILPKRNSDKLIARKKDWDPKKYGGFDSPTVAYSVLVVAKVEKGKSKKLKSVKELLGITIMERSSFEKNPIDFLEAKGYKEVKKDLIIKLPKYSLFELENGRKRMLASAGELQKGNELALPSKYVNFLYLASHYEKLKGSPEDNEQKQLFVEQHKHYLDEIIEQISEFSKRVILADANLDKVLSAYNKHRDKPIREQAENIIHLFTLTNLGAPAAFKYFDTTIDRKRYTSTKEVLDATLIHQSITGLYETRIDLSQLGGDGGEAAAKPAPGGSGGTLNIEDEYRLHETSKGPDVPLGSTWLSDFPQAWAETGGMGLAFRQAPLIISLKATSTPVSIKQYPMSQEARLGIKPHIQRLLDQGILVPCQSPWNTPLLPVKKPGTNDYRPVQDLREVNKRVEDIHPTVPNPYNLLSGLPPSHQWYTVLDLKDAFFCLRLHPTSQSLFAFEWKDPEMGISGQLTWTRLPQGFKNSPTLFNEALHRDLADFRIQHPDLILLQYVDDLLLAATSELDCQQGTRALLQTLGDLGYRASAKKAQICQKQVKYLGYLLKEGQRWLTEARKETVMGQPTPKTPRQLREFLGKAGLCRLFIPGFAEMAAPLYPLTKPGTLFKWGPDQQKAYQEIKQALLTAPALGLPDLTKPFELFVDEKQGYAKGVLTQKLGPWRRPVAYLSKKLDPVAAGWPPCLRMVAAIAVLTKDVGKLTMGQPLVILAPHAVEALVKQPPDRWLSNARMTHYQALLLDTDRVQFGPIVALNPATLLPLPEEGLQHDCLDILAEAHGTRPDLTDQPLPDADHTWYTDGSSFLQEGQRRAGAAVTTETEVIWAKALPAGTSAQRAELIALTQALKMAAGKKLNVYTDSRYAFATAHIHGEIYRRRGWLTSEGKEIKNKDEILALLKALFLPKRLSIIHCPGHQKGNHAEARGNRMADQAAREVATRETPETSTLLAGKRTADGSEFEKRTADGSEFESPKKKAKVE

SEQ ID NO: 2432 - protein, 2094 aa, synthetic construct
  source 1..2094: note = Description of Artificial Sequence: Synthetic polypeptide
MPAAKRVKLDGGDKKYSIGLDIGTNSVGWAVITDEYKVPSKKFKVLGNTDRHSIKKNLIGALLFDSGETAEATRLKRTARRRYTRRKNRICYLQEIFSNEMAKVDDSFFHRLEESFLVEEDKKHERHPIFGNIVDEVAYHEKYPTIYHLRKKLVDSTDKADLRLIYLALAHMIKFRGHFLIEGDLNPDNSDVDKLFIQLVQTYNQLFEENPINASGVDAKAILSARLSKSRRLENLIAQLPGEKKNGLFGNLIALSLGLTPNFKSNFDLAEDAKLQLSKDTYDDDLDNLLAQIGDQYADLFLAAKNLSDAILLSDILRVNTEITKAPLSASMIKRYDEHHQDLTLLKALVRQQLPEKYKEIFFDQSKNGYAGYIDGGASQEEFYKFIKPILEKMDGTEELLVKLNREDLLRKQRTFDNGSIPHQIHLGELHAILRRQEDFYPFLKDNREKIEKILTFRIPYYVGPLARGNSRFAWMTRKSEETITPWNFEEVVDKGASAQSFIERMTNFDKNLPNEKVLPKHSLLYEYFTVYNELTKVKYVTEGMRKPAFLSGEQKKAIVDLLFKTNRKVTVKQLKEDYFKKIECFDSVEISGVEDRFNASLGTYHDLLKIIKDKDFLDNEENEDILEDIVLTLTLFEDREMIEERLKTYAHLFDDKVMKQLKRRRYTGWGRLSRKLINGIRDKQSGKTILDFLKSDGFANRNFMQLIHDDSLTFKEDIQKAQVSGQGDSLHEHIANLAGSPAIKKGILQTVKVVDELVKVMGRHKPENIVIEMARENQTTQKGQKNSRERMKRIEEGIKELGSQILKEHPVENTQLQNEKLYLYYLQNGRDMYVDQELDINRLSDYDVDHIVPQSFLKDDSIDNKVLTRSDKARGKSDNVPSEEVVKKMKNYWRQLLNAKLITQRKFDNLTKAERGGLSELDKAGFIKRQLVETRQITKHVAQILDSRMNTKYDENDKLIREVKVITLKSKLVSDFRKDFQFYKVREINNYHHAHDAYLNAVVGTALIKKYPKLESEFVYGDYKVYDVRKMIAKSEQEIGKATAKYFFYSNIMNFFKTEITLANGEIRKRPLIETNGETGEIVWDKGRDFATVRKVLSMPQVNIVKKTEVQTGGFSKESILPKRNSDKLIARKKDWDPKKYGGFDSPTVAYSVLVVAKVEKGKSKKLKSVKELLGITIMERSSFEKNPIDFLEAKGYKEVKKDLIIKLPKYSLFELENGRKRMLASAGELQKGNELALPSKYVNFLYLASHYEKLKGSPEDNEQKQLFVEQHKHYLDEIIEQISEFSKRVILADANLDKVLSAYNKHRDKPIREQAENIIHLFTLTNLGAPAAFKYFDTTIDRKRYTSTKEVLDATLIHQSITGLYETRIDLSQLGGDGGPAPGGSGGGGGTLNIEDEYRLHETSKGPDVPLGSTWLSDFPQAWAETGGMGLAFRQAPLIISLKATSTPVSIKQYPMSQEARLGIKPHIQRLLDQGILVPCQSPWNTPLLPVKKPGTNDYRPVQDLREVNKRVEDIHPTVPNPYNLLSGLPPSHQWYTVLDLKDAFFCLRLHPTSQSLFAFEWKDPEMGISGQLTWTRLPQGFKNSPTLFNEALHRDLADFRIQHPDLILLQYVDDLLLAATSELDCQQGTRALLQTLGDLGYRASAKKAQICQKQVKYLGYLLKEGQRWLTEARKETVMGQPTPKTPRQLREFLGKAGLCRLFIPGFAEMAAPLYPLTKPGTLFKWGPDQQKAYQEIKQALLTAPALGLPDLTKPFELFVDEKQGYAKGVLTQKLGPWRRPVAYLSKKLDPVAAGWPPCLRMVAAIAVLTKDVGKLTMGQPLVILAPHAVEALVKQPPDRWLSNARMTHYQALLLDTDRVQFGPIVALNPATLLPLPEEGLQHDCLDILAEAHGTRPDLTDQPLPDADHTWYTDGSSFLQEGQRRAGAAVTTETEVIWAKALPAGTSAQRAELIALTQALKMAAGKKLNVYTDSRYAFATAHIHGEIYRRRGWLTSEGKEIKNKDEILALLKALFLPKRLSIIHCPGHQKGNHAEARGNRMADQAAREVATRETPETSTLLAGKRTADGSEFEKRTADGSEFESPKKKAKVE

SEQ ID NO: 2433 - protein, 2100 aa, synthetic construct
  source 1..2100: note = Description of Artificial Sequence: Synthetic polypeptide
MPAAKRVKLDGGDKKYSIGLDIGTNSVGWAVITDEYKVPSKKFKVLGNTDRHSIKKNLIGALLFDSGETAEATRLKRTARRRYTRRKNRICYLQEIFSNEMAKVDDSFFHRLEESFLVEEDKKHERHPIFGNIVDEVAYHEKYPTIYHLRKKLVDSTDKADLRLIYLALAHMIKFRGHFLIEGDLNPDNSDVDKLFIQLVQTYNQLFEENPINASGVDAKAILSARLSKSRRLENLIAQLPGEKKNGLFGNLIALSLGLTPNFKSNFDLAEDAKLQLSKDTYDDDLDNLLAQIGDQYADLFLAAKNLSDAILLSDILRVNTEITKAPLSASMIKRYDEHHQDLTLLKALVRQQLPEKYKEIFFDQSKNGYAGYIDGGASQEEFYKFIKPILEKMDGTEELLVKLNREDLLRKQRTFDNGSIPHQIHLGELHAILRRQEDFYPFLKDNREKIEKILTFRIPYYVGPLARGNSRFAWMTRKSEETITPWNFEEVVDKGASAQSFIERMTNFDKNLPNEKVLPKHSLLYEYFTVYNELTKVKYVTEGMRKPAFLSGEQKKAIVDLLFKTNRKVTVKQLKEDYFKKIECFDSVEISGVEDRFNASLGTYHDLLKIIKDKDFLDNEENEDILEDIVLTLTLFEDREMIEERLKTYAHLFDDKVMKQLKRRRYTGWGRLSRKLINGIRDKQSGKTILDFLKSDGFANRNFMQLIHDDSLTFKEDIQKAQVSGQGDSLHEHIANLAGSPAIKKGILQTVKVVDELVKVMGRHKPENIVIEMARENQTTQKGQKNSRERMKRIEEGIKELGSQILKEHPVENTQLQNEKLYLYYLQNGRDMYVDQELDINRLSDYDVDHIVPQSFLKDDSIDNKVLTRSDKARGKSDNVPSEEVVKKMKNYWRQLLNAKLITQRKFDNLTKAERGGLSELDKAGFIKRQLVETRQITKHVAQILDSRMNTKYDENDKLIREVKVITLKSKLVSDFRKDFQFYKVREINNYHHAHDAYLNAVVGTALIKKYPKLESEFVYGDYKVYDVRKMIAKSEQEIGKATAKYFFYSNIMNFFKTEITLANGEIRKRPLIETNGETGEIVWDKGRDFATVRKVLSMPQVNIVKKTEVQTGGFSKESILPKRNSDKLIARKKDWDPKKYGGFDSPTVAYSVLVVAKVEKGKSKKLKSVKELLGITIMERSSFEKNPIDFLEAKGYKEVKKDLIIKLPKYSLFELENGRKRMLASAGELQKGNELALPSKYVNFLYLASHYEKLKGSPEDNEQKQLFVEQHKHYLDEIIEQISEFSKRVILADANLDKVLSAYNKHRDKPIREQAENIIHLFTLTNLGAPAAFKYFDTTIDRKRYTSTKEVLDATLIHQSITGLYETRIDLSQLGGDGGEAAAKGGGGSEAAAKGGTLNIEDEYRLHETSKGPDVPLGSTWLSDFPQAWAETGGMGLAFRQAPLIISLKATSTPVSIKQYPMSQEARLGIKPHIQRLLDQGILVPCQSPWNTPLLPVKKPGTNDYRPVQDLREVNKRVEDIHPTVPNPYNLLSGLPPSHQWYTVLDLKDAFFCLRLHPTSQSLFAFEWKDPEMGISGQLTWTRLPQGFKNSPTLFNEALHRDLADFRIQHPDLILLQYVDDLLLAATSELDCQQGTRALLQTLGDLGYRASAKKAQICQKQVKYLGYLLKEGQRWLTEARKETVMGQPTPKTPRQLREFLGKAGLCRLFIPGFAEMAAPLYPLTKPGTLFKWGPDQQKAYQEIKQALLTAPALGLPDLTKPFELFVDEKQGYAKGVLTQKLGPWRRPVAYLSKKLDPVAAGWPPCLRMVAAIAVLTKDVGKLTMGQPLVILAPHAVEALVKQPPDRWLSNARMTHYQALLLDTDRVQFGPIVALNPATLLPLPEEGLQHDCLDILAEAHGTRPDLTDQPLPDADHTWYTDGSSFLQEGQRRAGAAVTTETEVIWAKALPAGTSAQRAELIALTQALKMAAGKKLNVYTDSRYAFATAHIHGEIYRRRGWLTSEGKEIKNKDEILALLKALFLPKRLSIIHCPGHQKGNHAEARGNRMADQAAREVATRETPETSTLLAGKRTADGSEFEKRTADGSEFESPKKKAKVE

SEQ ID NO: 2434 - protein, 2096 aa, synthetic construct
  source 1..2096: note = Description of Artificial Sequence: Synthetic polypeptide
MPAAKRVKLDGGDKKYSIGLDIGTNSVGWAVITDEYKVPSKKFKVLGNTDRHSIKKNLIGALLFDSGETAEATRLKRTARRRYTRRKNRICYLQEIFSNEMAKVDDSFFHRLEESFLVEEDKKHERHPIFGNIVDEVAYHEKYPTIYHLRKKLVDSTDKADLRLIYLALAHMIKFRGHFLIEGDLNPDNSDVDKLFIQLVQTYNQLFEENPINASGVDAKAILSARLSKSRRLENLIAQLPGEKKNGLFGNLIALSLGLTPNFKSNFDLAEDAKLQLSKDTYDDDLDNLLAQIGDQYADLFLAAKNLSDAILLSDILRVNTEITKAPLSASMIKRYDEHHQDLTLLKALVRQQLPEKYKEIFFDQSKNGYAGYIDGGASQEEFYKFIKPILEKMDGTEELLVKLNREDLLRKQRTFDNGSIPHQIHLGELHAILRRQEDFYPFLKDNREKIEKILTFRIPYYVGPLARGNSRFAWMTRKSEETITPWNFEEVVDKGASAQSFIERMTNFDKNLPNEKVLPKHSLLYEYFTVYNELTKVKYVTEGMRKPAFLSGEQKKAIVDLLFKTNRKVTVKQLKEDYFKKIECFDSVEISGVEDRFNASLGTYHDLLKIIKDKDFLDNEENEDILEDIVLTLTLFEDREMIEERLKTYAHLFDDKVMKQLKRRRYTGWGRLSRKLINGIRDKQSGKTILDFLKSDGFANRNFMQLIHDDSLTFKEDIQKAQVSGQGDSLHEHIANLAGSPAIKKGILQTVKVVDELVKVMGRHKPENIVIEMARENQTTQKGQKNSRERMKRIEEGIKELGSQILKEHPVENTQLQNEKLYLYYLQNGRDMYVDQELDINRLSDYDVDHIVPQSFLKDDSIDNKVLTRSDKARGKSDNVPSEEVVKKMKNYWRQLLNAKLITQRKFDNLTKAERGGLSELDKAGFIKRQLVETRQITKHVAQILDSRMNTKYDENDKLIREVKVITLKSKLVSDFRKDFQFYKVREINNYHHAHDAYLNAVVGTALIKKYPKLESEFVYGDYKVYDVRKMIAKSEQEIGKATAKYFFYSNIMNFFKTEITLANGEIRKRPLIETNGETGEIVWDKGRDFATVRKVLSMPQVNIVKKTEVQTGGFSKESILPKRNSDKLIARKKDWDPKKYGGFDSPTVAYSVLVVAKVEKGKSKKLKSVKELLGITIMERSSFEKNPIDFLEAKGYKEVKKDLIIKLPKYSLFELENGRKRMLASAGELQKGNELALPSKYVNFLYLASHYEKLKGSPEDNEQKQLFVEQHKHYLDEIIEQISEFSKRVILADANLDKVLSAYNKHRDKPIREQAENIIHLFTLTNLGAPAAFKYFDTTIDRKRYTSTKEVLDATLIHQSITGLYETRIDLSQLGGDGGGGGGSSEAAAKGGTLNIEDEYRLHETSKGPDVPLGSTWLSDFPQAWAETGGMGLAFRQAPLIISLKATSTPVSIKQYPMSQEARLGIKPHIQRLLDQGILVPCQSPWNTPLLPVKKPGTNDYRPVQDLREVNKRVEDIHPTVPNPYNLLSGLPPSHQWYTVLDLKDAFFCLRLHPTSQSLFAFEWKDPEMGISGQLTWTRLPQGFKNSPTLFNEALHRDLADFRIQHPDLILLQYVDDLLLAATSELDCQQGTRALLQTLGDLGYRASAKKAQICQKQVKYLGYLLKEGQRWLTEARKETVMGQPTPKTPRQLREFLGKAGLCRLFIPGFAEMAAPLYPLTKPGTLFKWGPDQQKAYQEIKQALLTAPALGLPDLTKPFELFVDEKQGYAKGVLTQKLGPWRRPVAYLSKKLDPVAAGWPPCLRMVAAIAVLTKDVGKLTMGQPLVILAPHAVEALVKQPPDRWLSNARMTHYQALLLDTDRVQFGPIVALNPATLLPLPEEGLQHDCLDILAEAHGTRPDLTDQPLPDADHTWYTDGSSFLQEGQRRAGAAVTTETEVIWAKALPAGTSAQRAELIALTQALKMAAGKKLNVYTDSRYAFATAHIHGEIYRRRGWLTSEGKEIKNKDEILALLKALFLPKRLSIIHCPGHQKGNHAEARGNRMADQAAREVATRETPETSTLLAGKRTADGSEFEKRTADGSEFESPKKKAKVE

SEQ ID NO: 2435 - protein, 2093 aa, synthetic construct
  source 1..2093: note = Description of Artificial Sequence: Synthetic polypeptide
MPAAKRVKLDGGDKKYSIGLDIGTNSVGWAVITDEYKVPSKKFKVLGNTDRHSIKKNLIGALLFDSGETAEATRLKRTARRRYTRRKNRICYLQEIFSNEMAKVDDSFFHRLEESFLVEEDKKHERHPIFGNIVDEVAYHEKYPTIYHLRKKLVDSTDKADLRLIYLALAHMIKFRGHFLIEGDLNPDNSDVDKLFIQLVQTYNQLFEENPINASGVDAKAILSARLSKSRRLENLIAQLPGEKKNGLFGNLIALSLGLTPNFKSNFDLAEDAKLQLSKDTYDDDLDNLLAQIGDQYADLFLAAKNLSDAILLSDILRVNTEITKAPLSASMIKRYDEHHQDLTLLKALVRQQLPEKYKEIFFDQSKNGYAGYIDGGASQEEFYKFIKPILEKMDGTEELLVKLNREDLLRKQRTFDNGSIPHQIHLGELHAILRRQEDFYPFLKDNREKIEKILTFRIPYYVGPLARGNSRFAWMTRKSEETITPWNFEEVVDKGASAQSFIERMTNFDKNLPNEKVLPKHSLLYEYFTVYNELTKVKYVTEGMRKPAFLSGEQKKAIVDLLFKTNRKVTVKQLKEDYFKKIECFDSVEISGVEDRFNASLGTYHDLLKIIKDKDFLDNEENEDILEDIVLTLTLFEDREMIEERLKTYAHLFDDKVMKQLKRRRYTGWGRLSRKLINGIRDKQSGKTILDFLKSDGFANRNFMQLIHDDSLTFKEDIQKAQVSGQGDSLHEHIANLAGSPAIKKGILQTVKVVDELVKVMGRHKPENIVIEMARENQTTQKGQKNSRERMKRIEEGIKELGSQILKEHPVENTQLQNEKLYLYYLQNGRDMYVDQELDINRLSDYDVDHIVPQSFLKDDSIDNKVLTRSDKARGKSDNVPSEEVVKKMKNYWRQLLNAKLITQRKFDNLTKAERGGLSELDKAGFIKRQLVETRQITKHVAQILDSRMNTKYDENDKLIREVKVITLKSKLVSDFRKDFQFYKVREINNYHHAHDAYLNAVVGTALIKKYPKLESEFVYGDYKVYDVRKMIAKSEQEIGKATAKYFFYSNIMNFFKTEITLANGEIRKRPLIETNGETGEIVWDKGRDFATVRKVLSMPQVNIVKKTEVQTGGFSKESILPKRNSDKLIARKKDWDPKKYGGFDSPTVAYSVLVVAKVEKGKSKKLKSVKELLGITIMERSSFEKNPIDFLEAKGYKEVKKDLIIKLPKYSLFELENGRKRMLASAGELQKGNELALPSKYVNFLYLASHYEKLKGSPEDNEQKQLFVEQHKHYLDEIIEQISEFSKRVILADANLDKVLSAYNKHRDKPIREQAENIIHLFTLTNLGAPAAFKYFDTTIDRKRYTSTKEVLDATLIHQSITGLYETRIDLSQLGGDGGEAAAKGGSGGTLNIEDEYRLHETSKGPDVPLGSTWLSDFPQAWAETGGMGLAFRQAPLIISLKATSTPVSIKQYPMSQEARLGIKPHIQRLLDQGILVPCQSPWNTPLLPVKKPGTNDYRPVQDLREVNKRVEDIHPTVPNPYNLLSGLPPSHQWYTVLDLKDAFFCLRLHPTSQSLFAFEWKDPEMGISGQLTWTRLPQGFKNSPTLFNEALHRDLADFRIQHPDLILLQYVDDLLLAATSELDCQQGTRALLQTLGDLGYRASAKKAQICQKQVKYLGYLLKEGQRWLTEARKETVMGQPTPKTPRQLREFLGKAGLCRLFIPGFAEMAAPLYPLTKPGTLFKWGPDQQKAYQEIKQALLTAPALGLPDLTKPFELFVDEKQGYAKGVLTQKLGPWRRPVAYLSKKLDPVAAGWPPCLRMVAAIAVLTKDVGKLTMGQPLVILAPHAVEALVKQPPDRWLSNARMTHYQALLLDTDRVQFGPIVALNPATLLPLPEEGLQHDCLDILAEAHGTRPDLTDQPLPDADHTWYTDGSSFLQEGQRRAGAAVTTETEVIWAKALPAGTSAQRAELIALTQALKMAAGKKLNVYTDSRYAFATAHIHGEIYRRRGWLTSEGKEIKNKDEILALLKALFLPKRLSIIHCPGHQKGNHAEARGNRMADQAAREVATRETPETSTLLAGKRTADGSEFEKRTADGSEFESPKKKAKVE

SEQ ID NO: 2436 - protein, 2091 aa, synthetic construct
  source 1..2091: note = Description of Artificial Sequence: Synthetic polypeptide
MPAAKRVKLDGGDKKYSIGLDIGTNSVGWAVITDEYKVPSKKFKVLGNTDRHSIKKNLIGALLFDSGETAEATRLKRTARRRYTRRKNRICYLQEIFSNEMAKVDDSFFHRLEESFLVEEDKKHERHPIFGNIVDEVAYHEKYPTIYHLRKKLVDSTDKADLRLIYLALAHMIKFRGHFLIEGDLNPDNSDVDKLFIQLVQTYNQLFEENPINASGVDAKAILSARLSKSRRLENLIAQLPGEKKNGLFGNLIALSLGLTPNFKSNFDLAEDAKLQLSKDTYDDDLDNLLAQIGDQYADLFLAAKNLSDAILLSDILRVNTEITKAPLSASMIKRYDEHHQDLTLLKALVRQQLPEKYKEIFFDQSKNGYAGYIDGGASQEEFYKFIKPILEKMDGTEELLVKLNREDLLRKQRTFDNGSIPHQIHLGELHAILRRQEDFYPFLKDNREKIEKILTFRIPYYVGPLARGNSRFAWMTRKSEETITPWNFEEVVDKGASAQSFIERMTNFDKNLPNEKVLPKHSLLYEYFTVYNELTKVKYVTEGMRKPAFLSGEQKKAIVDLLFKTNRKVTVKQLKEDYFKKIECFDSVEISGVEDRFNASLGTYHDLLKIIKDKDFLDNEENEDILEDIVLTLTLFEDREMIEERLKTYAHLFDDKVMKQLKRRRYTGWGRLSRKLINGIRDKQSGKTILDFLKSDGFANRNFMQLIHDDSLTFKEDIQKAQVSGQGDSLHEHIANLAGSPAIKKGILQTVKVVDELVKVMGRHKPENIVIEMARENQTTQKGQKNSRERMKRIEEGIKELGSQILKEHPVENTQLQNEKLYLYYLQNGRDMYVDQELDINRLSDYDVDHIVPQSFLKDDSIDNKVLTRSDKARGKSDNVPSEEVVKKMKNYWRQLLNAKLITQRKFDNLTKAERGGLSELDKAGFIKRQLVETRQITKHVAQILDSRMNTKYDENDKLIREVKVITLKSKLVSDFRKDFQFYKVREINNYHHAHDAYLNAVVGTALIKKYPKLESEFVYGDYKVYDVRKMIAKSEQEIGKATAKYFFYSNIMNFFKTEITLANGEIRKRPLIETNGETGEIVWDKGRDFATVRKVLSMPQVNIVKKTEVQTGGFSKESILPKRNSDKLIARKKDWDPKKYGGFDSPTVAYSVLVVAKVEKGKSKKLKSVKELLGITIMERSSFEKNPIDFLEAKGYKEVKKDLIIKLPKYSLFELENGRKRMLASAGELQKGNELALPSKYVNFLYLASHYEKLKGSPEDNEQKQLFVEQHKHYLDEIIEQISEFSKRVILADANLDKVLSAYNKHRDKPIREQAENIIHLFTLTNLGAPAAFKYFDTTIDRKRYTSTKEVLDATLIHQSITGLYETRIDLSQLGGDGGGGGGGSGGTLNIEDEYRLHETSKGPDVPLGSTWLSDFPQAWAETGGMGLAFRQAPLIISLKATSTPVSIKQYPMSQEARLGIKPHIQRLLDQGILVPCQSPWNTPLLPVKKPGTNDYRPVQDLREVNKRVEDIHPTVPNPYNLLSGLPPSHQWYTVLDLKDAFFCLRLHPTSQSLFAFEWKDPEMGISGQLTWTRLPQGFKNSPTLFNEALHRDLADFRIQHPDLILLQYVDDLLLAATSELDCQQGTRALLQTLGDLGYRASAKKAQICQKQVKYLGYLLKEGQRWLTEARKETVMGQPTPKTPRQLREFLGKAGLCRLFIPGFAEMAAPLYPLTKPGTLFKWGPDQQKAYQEIKQALLTAPALGLPDLTKPFELFVDEKQGYAKGVLTQKLGPWRRPVAYLSKKLDPVAAGWPPCLRMVAAIAVLTKDVGKLTMGQPLVILAPHAVEALVKQPPDRWLSNARMTHYQALLLDTDRVQFGPIVALNPATLLPLPEEGLQHDCLDILAEAHGTRPDLTDQPLPDADHTWYTDGSSFLQEGQRRAGAAVTTETEVIWAKALPAGTSAQRAELIALTQALKMAAGKKLNVYTDSRYAFATAHIHGEIYRRRGWLTSEGKEIKNKDEILALLKALFLPKRLSIIHCPGHQKGNHAEARGNRMADQAAREVATRETPETSTLLAGKRTADGSEFEKRTADGSEFESPKKKAKVE

SEQ ID NO: 2437 - protein, 2096 aa, synthetic construct
  source 1..2096: note = Description of Artificial Sequence: Synthetic polypeptide
MPAAKRVKLDGGDKKYSIGLDIGTNSVGWAVITDEYKVPSKKFKVLGNTDRHSIKKNLIGALLFDSGETAEATRLKRTARRRYTRRKNRICYLQEIFSNEMAKVDDSFFHRLEESFLVEEDKKHERHPIFGNIVDEVAYHEKYPTIYHLRKKLVDSTDKADLRLIYLALAHMIKFRGHFLIEGDLNPDNSDVDKLFIQLVQTYNQLFEENPINASGVDAKAILSARLSKSRRLENLIAQLPGEKKNGLFGNLIALSLGLTPNFKSNFDLAEDAKLQLSKDTYDDDLDNLLAQIGDQYADLFLAAKNLSDAILLSDILRVNTEITKAPLSASMIKRYDEHHQDLTLLKALVRQQLPEKYKEIFFDQSKNGYAGYIDGGASQEEFYKFIKPILEKMDGTEELLVKLNREDLLRKQRTFDNGSIPHQIHLGELHAILRRQEDFYPFLKDNREKIEKILTFRIPYYVGPLARGNSRFAWMTRKSEETITPWNFEEVVDKGASAQSFIERMTNFDKNLPNEKVLPKHSLLYEYFTVYNELTKVKYVTEGMRKPAFLSGEQKKAIVDLLFKTNRKVTVKQLKEDYFKKIECFDSVEISGVEDRFNASLGTYHDLLKIIKDKDFLDNEENEDILEDIVLTLTLFEDREMIEERLKTYAHLFDDKVMKQLKRRRYTGWGRLSRKLINGIRDKQSGKTILDFLKSDGFANRNFMQLIHDDSLTFKEDIQKAQVSGQGDSLHEHIANLAGSPAIKKGILQTVKVVDELVKVMGRHKPENIVIEMARENQTTQKGQKNSRERMKRIEEGIKELGSQILKEHPVENTQLQNEKLYLYYLQNGRDMYVDQELDINRLSDYDVDHIVPQSFLKDDSIDNKVLTRSDKARGKSDNVPSEEVVKKMKNYWRQLLNAKLITQRKFDNLTKAERGGLSELDKAGFIKRQLVETRQITKHVAQILDSRMNTKYDENDKLIREVKVITLKSKLVSDFRKDFQFYKVREINNYHHAHDAYLNAVVGTALIKKYPKLESEFVYGDYKVYDVRKMIAKSEQEIGKATAKYFFYSNIMNFFKTEITLANGEIRKRPLIETNGETGEIVWDKGRDFATVRKVLSMPQVNIVKKTEVQTGGFSKESILPKRNSDKLIARKKDWDPKKYGGFDSPTVAYSVLVVAKVEKGKSKKLKSVKELLGITIMERSSFEKNPIDFLEAKGYKEVKKDLIIKLPKYSLFELENGRKRMLASAGELQKGNELALPSKYVNFLYLASHYEKLKGSPEDNEQKQLFVEQHKHYLDEIIEQISEFSKRVILADANLDKVLSAYNKHRDKPIREQAENIIHLFTLTNLGAPAAFKYFDTTIDRKRYTSTKEVLDATLIHQSITGLYETRIDLSQLGGDGGGSSGGSEAAAKGGTLNIEDEYRLHETSKGPDVPLGSTWLSDFPQAWAETGGMGLAFRQAPLIISLKATSTPVSIKQYPMSQEARLGIKPHIQRLLDQGILVPCQSPWNTPLLPVKKPGTNDYRPVQDLREVNKRVEDIHPTVPNPYNLLSGLPPSHQWYTVLDLKDAFFCLRLHPTSQSLFAFEWKDPEMGISGQLTWTRLPQGFKNSPTLFNEALHRDLADFRIQHPDLILLQYVDDLLLAATSELDCQQGTRALLQTLGDLGYRASAKKAQICQKQVKYLGYLLKEGQRWLTEARKETVMGQPTPKTPRQLREFLGKAGLCRLFIPGFAEMAAPLYPLTKPGTLFKWGPDQQKAYQEIKQALLTAPALGLPDLTKPFELFVDEKQGYAKGVLTQKLGPWRRPVAYLSKKLDPVAAGWPPCLRMVAAIAVLTKDVGKLTMGQPLVILAPHAVEALVKQPPDRWLSNARMTHYQALLLDTDRVQFGPIVALNPATLLPLPEEGLQHDCLDILAEAHGTRPDLTDQPLPDADHTWYTDGSSFLQEGQRRAGAAVTTETEVIWAKALPAGTSAQRAELIALTQALKMAAGKKLNVYTDSRYAFATAHIHGEIYRRRGWLTSEGKEIKNKDEILALLKALFLPKRLSIIHCPGHQKGNHAEARGNRMADQAAREVATRETPETSTLLAGKRTADGSEFEKRTADGSEFESPKKKAKVE

SEQ ID NO: 2438 - protein, 2094 aa, synthetic construct
  source 1..2094: note = Description of Artificial Sequence: Synthetic polypeptide
MPAAKRVKLDGGDKKYSIGLDIGTNSVGWAVITDEYKVPSKKFKVLGNTDRHSIKKNLIGALLFDSGETAEATRLKRTARRRYTRRKNRICYLQEIFSNEMAKVDDSFFHRLEESFLVEEDKKHERHPIFGNIVDEVAYHEKYPTIYHLRKKLVDSTDKADLRLIYLALAHMIKFRGHFLIEGDLNPDNSDVDKLFIQLVQTYNQLFEENPINASGVDAKAILSARLSKSRRLENLIAQLPGEKKNGLFGNLIALSLGLTPNFKSNFDLAEDAKLQLSKDTYDDDLDNLLAQIGDQYADLFLAAKNLSDAILLSDILRVNTEITKAPLSASMIKRYDEHHQDLTLLKALVRQQLPEKYKEIFFDQSKNGYAGYIDGGASQEEFYKFIKPILEKMDGTEELLVKLNREDLLRKQRTFDNGSIPHQIHLGELHAILRRQEDFYPFLKDNREKIEKILTFRIPYYVGPLARGNSRFAWMTRKSEETITPWNFEEVVDKGASAQSFIERMTNFDKNLPNEKVLPKHSLLYEYFTVYNELTKVKYVTEGMRKPAFLSGEQKKAIVDLLFKTNRKVTVKQLKEDYFKKIECFDSVEISGVEDRFNASLGTYHDLLKIIKDKDFLDNEENEDILEDIVLTLTLFEDREMIEERLKTYAHLFDDKVMKQLKRRRYTGWGRLSRKLINGIRDKQSGKTILDFLKSDGFANRNFMQLIHDDSLTFKEDIQKAQVSGQGDSLHEHIANLAGSPAIKKGILQTVKVVDELVKVMGRHKPENIVIEMARENQTTQKGQKNSRERMKRIEEGIKELGSQILKEHPVENTQLQNEKLYLYYLQNGRDMYVDQELDINRLSDYDVDHIVPQSFLKDDSIDNKVLTRSDKARGKSDNVPSEEVVKKMKNYWRQLLNAKLITQRKFDNLTKAERGGLSELDKAGFIKRQLVETRQITKHVAQILDSRMNTKYDENDKLIREVKVITLKSKLVSDFRKDFQFYKVREINNYHHAHDAYLNAVVGTALIKKYPKLESEFVYGDYKVYDVRKMIAKSEQEIGKATAKYFFYSNIMNFFKTEITLANGEIRKRPLIETNGETGEIVWDKGRDFATVRKVLSMPQVNIVKKTEVQTGGFSKESILPKRNSDKLIARKKDWDPKKYGGFDSPTVAYSVLVVAKVEKGKSKKLKSVKELLGITIMERSSFEKNPIDFLEAKGYKEVKKDLIIKLPKYSLFELENGRKRMLASAGELQKGNELALPSKYVNFLYLASHYEKLKGSPEDNEQKQLFVEQHKHYLDEIIEQISEFSKRVILADANLDKVLSAYNKHRDKPIREQAENIIHLFTLTNLGAPAAFKYFDTTIDRKRYTSTKEVLDATLIHQSITGLYETRIDLSQLGGDGGGSSGGGGGSGGTLNIEDEYRLHETSKGPDVPLGSTWLSDFPQAWAETGGMGLAFRQAPLIISLKATSTPVSIKQYPMSQEARLGIKPHIQRLLDQGILVPCQSPWNTPLLPVKKPGTNDYRPVQDLREVNKRVEDIHPTVPNPYNLLSGLPPSHQWYTVLDLKDAFFCLRLHPTSQSLFAFEWKDPEMGISGQLTWTRLPQGFKNSPTLFNEALHRDLADFRIQHPDLILLQYVDDLLLAATSELDCQQGTRALLQTLGDLGYRASAKKAQICQKQVKYLGYLLKEGQRWLTEARKETVMGQPTPKTPRQLREFLGKAGLCRLFIPGFAEMAAPLYPLTKPGTLFKWGPDQQKAYQEIKQALLTAPALGLPDLTKPFELFVDEKQGYAKGVLTQKLGPWRRPVAYLSKKLDPVAAGWPPCLRMVAAIAVLTKDVGKLTMGQPLVILAPHAVEALVKQPPDRWLSNARMTHYQALLLDTDRVQFGPIVALNPATLLPLPEEGLQHDCLDILAEAHGTRPDLTDQPLPDADHTWYTDGSSFLQEGQRRAGAAVTTETEVIWAKALPAGTSAQRAELIALTQALKMAAGKKLNVYTDSRYAFATAHIHGEIYRRRGWLTSEGKEIKNKDEILALLKALFLPKRLSIIHCPGHQKGNHAEARGNRMADQAAREVATRETPETSTLLAGKRTADGSEFEKRTADGSEFESPKKKAKVE

SEQ ID NO: 2439 - protein, 2091 aa, synthetic construct
  source 1..2091: note = Description of Artificial Sequence: Synthetic polypeptide
MPAAKRVKLDGGDKKYSIGLDIGTNSVGWAVITDEYKVPSKKFKVLGNTDRHSIKKNLIGALLFDSGETAEATRLKRTARRRYTRRKNRICYLQEIFSNEMAKVDDSFFHRLEESFLVEEDKKHERHPIFGNIVDEVAYHEKYPTIYHLRKKLVDSTDKADLRLIYLALAHMIKFRGHFLIEGDLNPDNSDVDKLFIQLVQTYNQLFEENPINASGVDAKAILSARLSKSRRLENLIAQLPGEKKNGLFGNLIALSLGLTPNFKSNFDLAEDAKLQLSKDTYDDDLDNLLAQIGDQYADLFLAAKNLSDAILLSDILRVNTEITKAPLSASMIKRYDEHHQDLTLLKALVRQQLPEKYKEIFFDQSKNGYAGYIDGGASQEEFYKFIKPILEKMDGTEELLVKLNREDLLRKQRTFDNGSIPHQIHLGELHAILRRQEDFYPFLKDNREKIEKILTFRIPYYVGPLARGNSRFAWMTRKSEETITPWNFEEVVDKGASAQSFIERMTNFDKNLPNEKVLPKHSLLYEYFTVYNELTKVKYVTEGMRKPAFLSGEQKKAIVDLLFKTNRKVTVKQLKEDYFKKIECFDSVEISGVEDRFNASLGTYHDLLKIIKDKDFLDNEENEDILEDIVLTLTLFEDREMIEERLKTYAHLFDDKVMKQLKRRRYTGWGRLSRKLINGIRDKQSGKTILDFLKSDGFANRNFMQLIHDDSLTFKEDIQKAQVSGQGDSLHEHIANLAGSPAIKKGILQTVKVVDELVKVMGRHKPENIVIEMARENQTTQKGQKNSRERMKRIEEGIKELGSQILKEHPVENTQLQNEKLYLYYLQNGRDMYVDQELDINRLSDYDVDHIVPQSFLKDDSIDNKVLTRSDKARGKSDNVPSEEVVKKMKNYWRQLLNAKLITQRKFDNLTKAERGGLSELDKAGFIKRQLVETRQITKHVAQILDSRMNTKYDENDKLIREVKVITLKSKLVSDFRKDFQFYKVREINNYHHAHDAYLNAVVGTALIKKYPKLESEFVYGDYKVYDVRKMIAKSEQEIGKATAKYFFYSNIMNFFKTEITLANGEIRKRPLIETNGETGEIVWDKGRDFATVRKVLSMPQVNIVKKTEVQTGGFSKESILPKRNSDKLIARKKDWDPKKYGGFDSPTVAYSVLVVAKVEKGKSKKLKSVKELLGITIMERSSFEKNPIDFLEAKGYKEVKKDLIIKLPKYSLFELENGRKRMLASAGELQKGNELALPSKYVNFLYLASHYEKLKGSPEDNEQKQLFVEQHKHYLDEIIEQISEFSKRVILADANLDKVLSAYNKHRDKPIREQAENIIHLFTLTNLGAPAAFKYFDTTIDRKRYTSTKEVLDATLIHQSITGLYETRIDLSQLGGDGGGGSGSSGGTLNIEDEYRLHETSKGPDVPLGSTWLSDFPQAWAETGGMGLAFRQAPLIISLKATSTPVSIKQYPMSQEARLGIKPHIQRLLDQGILVPCQSPWNTPLLPVKKPGTNDYRPVQDLREVNKRVEDIHPTVPNPYNLLSGLPPSHQWYTVLDLKDAFFCLRLHPTSQSLFAFEWKDPEMGISGQLTWTRLPQGFKNSPTLFNEALHRDLADFRIQHPDLILLQYVDDLLLAATSELDCQQGTRALLQTLGDLGYRASAKKAQICQKQVKYLGYLLKEGQRWLTEARKETVMGQPTPKTPRQLREFLGKAGLCRLFIPGFAEMAAPLYPLTKPGTLFKWGPDQQKAYQEIKQALLTAPALGLPDLTKPFELFVDEKQGYAKGVLTQKLGPWRRPVAYLSKKLDPVAAGWPPCLRMVAAIAVLTKDVGKLTMGQPLVILAPHAVEALVKQPPDRWLSNARMTHYQALLLDTDRVQFGPIVALNPATLLPLPEEGLQHDCLDILAEAHGTRPDLTDQPLPDADHTWYTDGSSFLQEGQRRAGAAVTTETEVIWAKALPAGTSAQRAELIALTQALKMAAGKKLNVYTDSRYAFATAHIHGEIYRRRGWLTSEGKEIKNKDEILALLKALFLPKRLSIIHCPGHQKGNHAEARGNRMADQAAREVATRETPETSTLLAGKRTADGSEFEKRTADGSEFESPKKKAKVE

SEQ ID NO: 2440 - protein, 2096 aa, synthetic construct
  source 1..2096: note = Description of Artificial Sequence: Synthetic polypeptide
MPAAKRVKLDGGDKKYSIGLDIGTNSVGWAVITDEYKVPSKKFKVLGNTDRHSIKKNLIGALLFDSGETAEATRLKRTARRRYTRRKNRICYLQEIFSNEMAKVDDSFFHRLEESFLVEEDKKHERHPIFGNIVDEVAYHEKYPTIYHLRKKLVDSTDKADLRLIYLALAHMIKFRGHFLIEGDLNPDNSDVDKLFIQLVQTYNQLFEENPINASGVDAKAILSARLSKSRRLENLIAQLPGEKKNGLFGNLIALSLGLTPNFKSNFDLAEDAKLQLSKDTYDDDLDNLLAQIGDQYADLFLAAKNLSDAILLSDILRVNTEITKAPLSASMIKRYDEHHQDLTLLKALVRQQLPEKYKEIFFDQSKNGYAGYIDGGASQEEFYKFIKPILEKMDGTEELLVKLNREDLLRKQRTFDNGSIPHQIHLGELHAILRRQEDFYPFLKDNREKIEKILTFRIPYYVGPLARGNSRFAWMTRKSEETITPWNFEEVVDKGASAQSFIERMTNFDKNLPNEKVLPKHSLLYEYFTVYNELTKVKYVTEGMRKPAFLSGEQKKAIVDLLFKTNRKVTVKQLKEDYFKKIECFDSVEISGVEDRFNASLGTYHDLLKIIKDKDFLDNEENEDILEDIVLTLTLFEDREMIEERLKTYAHLFDDKVMKQLKRRRYTGWGRLSRKLINGIRDKQSGKTILDFLKSDGFANRNFMQLIHDDSLTFKEDIQKAQVSGQGDSLHEHIANLAGSPAIKKGILQTVKVVDELVKVMGRHKPENIVIEMARENQTTQKGQKNSRERMKRIEEGIKELGSQILKEHPVENTQLQNEKLYLYYLQNGRDMYVDQELDINRLSDYDVDHIVPQSFLKDDSIDNKVLTRSDKARGKSDNVPSEEVVKKMKNYWRQLLNAKLITQRKFDNLTKAERGGLSELDKAGFIKRQLVETRQITKHVAQILDSRMNTKYDENDKLIREVKVITLKSKLVSDFRKDFQFYKVREINNYHHAHDAYLNAVVGTALIKKYPKLESEFVYGDYKVYDVRKMIAKSEQEIGKATAKYFFYSNIMNFFKTEITLANGEIRKRPLIETNGETGEIVWDKGRDFATVRKVLSMPQVNIVKKTEVQTGGFSKESILPKRNSDKLIARKKDWDPKKYGGFDSPTVAYSVLVVAKVEKGKSKKLKSVKELLGITIMERSSFEKNPIDFLEAKGYKEVKKDLIIKLPKYSLFELENGRKRMLASAGELQKGNELALPSKYVNFLYLASHYEKLKGSPEDNEQKQLFVEQHKHYLDEIIEQISEFSKRVILADANLDKVLSAYNKHRDKPIREQAENIIHLFTLTNLGAPAAFKYFDTTIDRKRYTSTKEVLDATLIHQSITGLYETRIDLSQLGGDGGPAPGGGEAAAKGGTLNIEDEYRLHETSKGPDVPLGSTWLSDFPQAWAETGGMGLAVRQAPLIIPLKATSTPVSIKQYPMSQEARLGIKPHIQRLLDQGILVPCQSPWNTPLLPVKKPGTNDYRPVQDLREVNKRVEDIHPTVPNPYNLLSGLPPSHQWYTVLDLKDAFFCLRLHPTSQSLFAFEWRDPEMGISGQLTWTRLPQGFKNSPTLFNEALHRDLADFRIQHPDLILLQYVDDLLLAATSELDCQQGTRALLQTLGDLGYRASAKKAQICQKQVKYLGYLLKEGQRWLTEARKETVMGQPTPKTPRQLREFLGTAGFCRLWIPGFAEMAAPLYPLTKPGTLFEWGPDQQKAYQEIKQALLTAPALGLPDLTKPFELFVDEKQGYAKGVLTQKLGPWRRPVAYLSKKLDPVAAGWPPCLRMVAAIAVLTKDAGKLTMGQPLVILAPHAVEALVKQPPDRWLSNARMTHYQALLLDTDRVQFGPIVALNPATLLPLPEEGLQHDCLDILAEAHGTRPDLTDQPLPDADHTWYTDGSSFLQEGQRKAGAAVTTETEVVWAKALPAGTSAQRAELIALTQALKMAEGKKLNVYTDSRYAFATAHIHGEIYRRRGWLTSEGKEIKNKDEILALLKALFLPKRLSIIHCPGHQKGNRAEARGNRMADQAAREVATRETPETSTLLAGKRTADGSEFEKRTADGSEFESPKKKAKVE

SEQ ID NO: 2441 - protein, 2110 aa, synthetic construct
  source 1..2110: note = Description of Artificial Sequence: Synthetic polypeptide
MPAAKRVKLDGGDKKYSIGLDIGTNSVGWAVITDEYKVPSKKFKVLGNTDRHSIKKNLIGALLFDSGETAEATRLKRTARRRYTRRKNRICYLQEIFSNEMAKVDDSFFHRLEESFLVEEDKKHERHPIFGNIVDEVAYHEKYPTIYHLRKKLVDSTDKADLRLIYLALAHMIKFRGHFLIEGDLNPDNSDVDKLFIQLVQTYNQLFEENPINASGVDAKAILSARLSKSRRLENLIAQLPGEKKNGLFGNLIALSLGLTPNFKSNFDLAEDAKLQLSKDTYDDDLDNLLAQIGDQYADLFLAAKNLSDAILLSDILRVNTEITKAPLSASMIKRYDEHHQDLTLLKALVRQQLPEKYKEIFFDQSKNGYAGYIDGGASQEEFYKFIKPILEKMDGTEELLVKLNREDLLRKQRTFDNGSIPHQIHLGELHAILRRQEDFYPFLKDNREKIEKILTFRIPYYVGPLARGNSRFAWMTRKSEETITPWNFEEVVDKGASAQSFIERMTNFDKNLPNEKVLPKHSLLYEYFTVYNELTKVKYVTEGMRKPAFLSGEQKKAIVDLLFKTNRKVTVKQLKEDYFKKIECFDSVEISGVEDRFNASLGTYHDLLKIIKDKDFLDNEENEDILEDIVLTLTLFEDREMIEERLKTYAHLFDDKVMKQLKRRRYTGWGRLSRKLINGIRDKQSGKTILDFLKSDGFANRNFMQLIHDDSLTFKEDIQKAQVSGQGDSLHEHIANLAGSPAIKKGILQTVKVVDELVKVMGRHKPENIVIEMARENQTTQKGQKNSRERMKRIEEGIKELGSQILKEHPVENTQLQNEKLYLYYLQNGRDMYVDQELDINRLSDYDVDHIVPQSFLKDDSIDNKVLTRSDKARGKSDNVPSEEVVKKMKNYWRQLLNAKLITQRKFDNLTKAERGGLSELDKAGFIKRQLVETRQITKHVAQILDSRMNTKYDENDKLIREVKVITLKSKLVSDFRKDFQFYKVREINNYHHAHDAYLNAVVGTALIKKYPKLESEFVYGDYKVYDVRKMIAKSEQEIGKATAKYFFYSNIMNFFKTEITLANGEIRKRPLIETNGETGEIVWDKGRDFATVRKVLSMPQVNIVKKTEVQTGGFSKESILPKRNSDKLIARKKDWDPKKYGGFDSPTVAYSVLVVAKVEKGKSKKLKSVKELLGITIMERSSFEKNPIDFLEAKGYKEVKKDLIIKLPKYSLFELENGRKRMLASAGELQKGNELALPSKYVNFLYLASHYEKLKGSPEDNEQKQLFVEQHKHYLDEIIEQISEFSKRVILADANLDKVLSAYNKHRDKPIREQAENIIHLFTLTNLGAPAAFKYFDTTIDRKRYTSTKEVLDATLIHQSITGLYETRIDLSQLGGDGGGGGGSGGGGSGGGGSGGGGSGGGGSGGTLNIEDEYRLHETSKGPDVPLGSTWLSDFPQAWAETGGMGLAVRQAPLIIPLKATSTPVSIKQYPMSQEARLGIKPHIQRLLDQGILVPCQSPWNTPLLPVKKPGTNDYRPVQDLREVNKRVEDIHPTVPNPYNLLSGLPPSHQWYTVLDLKDAFFCLRLHPTSQSLFAFEWRDPEMGISGQLTWTRLPQGFKNSPTLFNEALHRDLADFRIQHPDLILLQYVDDLLLAATSELDCQQGTRALLQTLGDLGYRASAKKAQICQKQVKYLGYLLKEGQRWLTEARKETVMGQPTPKTPRQLREFLGTAGFCRLWIPGFAEMAAPLYPLTKPGTLFEWGPDQQKAYQEIKQALLTAPALGLPDLTKPFELFVDEKQGYAKGVLTQKLGPWRRPVAYLSKKLDPVAAGWPPCLRMVAAIAVLTKDAGKLTMGQPLVILAPHAVEALVKQPPDRWLSNARMTHYQALLLDTDRVQFGPIVALNPATLLPLPEEGLQHDCLDILAEAHGTRPDLTDQPLPDADHTWYTDGSSFLQEGQRKAGAAVTTETEVVWAKALPAGTSAQRAELIALTQALKMAEGKKLNVYTDSRYAFATAHIHGEIYRRRGWLTSEGKEIKNKDEILALLKALFLPKRLSIIHCPGHQKGNRAEARGNRMADQAAREVATRETPETSTLLAGKRTADGSEFEKRTADGSEFESPKKKAKVE

SEQ ID NO: 2442 - protein, 2088 aa, synthetic construct
  source 1..2088: note = Description of Artificial Sequence: Synthetic polypeptide
MPAAKRVKLDGGDKKYSIGLDIGTNSVGWAVITDEYKVPSKKFKVLGNTDRHSIKKNLIGALLFDSGETAEATRLKRTARRRYTRRKNRICYLQEIFSNEMAKVDDSFFHRLEESFLVEEDKKHERHPIFGNIVDEVAYHEKYPTIYHLRKKLVDSTDKADLRLIYLALAHMIKFRGHFLIEGDLNPDNSDVDKLFIQLVQTYNQLFEENPINASGVDAKAILSARLSKSRRLENLIAQLPGEKKNGLFGNLIALSLGLTPNFKSNFDLAEDAKLQLSKDTYDDDLDNLLAQIGDQYADLFLAAKNLSDAILLSDILRVNTEITKAPLSASMIKRYDEHHQDLTLLKALVRQQLPEKYKEIFFDQSKNGYAGYIDGGASQEEFYKFIKPILEKMDGTEELLVKLNREDLLRKQRTFDNGSIPHQIHLGELHAILRRQEDFYPFLKDNREKIEKILTFRIPYYVGPLARGNSRFAWMTRKSEETITPWNFEEVVDKGASAQSFIERMTNFDKNLPNEKVLPKHSLLYEYFTVYNELTKVKYVTEGMRKPAFLSGEQKKAIVDLLFKTNRKVTVKQLKEDYFKKIECFDSVEISGVEDRFNASLGTYHDLLKIIKDKDFLDNEENEDILEDIVLTLTLFEDREMIEERLKTYAHLFDDKVMKQLKRRRYTGWGRLSRKLINGIRDKQSGKTILDFLKSDGFANRNFMQLIHDDSLTFKEDIQKAQVSGQGDSLHEHIANLAGSPAIKKGILQTVKVVDELVKVMGRHKPENIVIEMARENQTTQKGQKNSRERMKRIEEGIKELGSQILKEHPVENTQLQNEKLYLYYLQNGRDMYVDQELDINRLSDYDVDHIVPQSFLKDDSIDNKVLTRSDKARGKSDNVPSEEVVKKMKNYWRQLLNAKLITQRKFDNLTKAERGGLSELDKAGFIKRQLVETRQITKHVAQILDSRMNTKYDENDKLIREVKVITLKSKLVSDFRKDFQFYKVREINNYHHAHDAYLNAVVGTALIKKYPKLESEFVYGDYKVYDVRKMIAKSEQEIGKATAKYFFYSNIMNFFKTEITLANGEIRKRPLIETNGETGEIVWDKGRDFATVRKVLSMPQVNIVKKTEVQTGGFSKESILPKRNSDKLIARKKDWDPKKYGGFDSPTVAYSVLVVAKVEKGKSKKLKSVKELLGITIMERSSFEKNPIDFLEAKGYKEVKKDLIIKLPKYSLFELENGRKRMLASAGELQKGNELALPSKYVNFLYLASHYEKLKGSPEDNEQKQLFVEQHKHYLDEIIEQISEFSKRVILADANLDKVLSAYNKHRDKPIREQAENIIHLFTLTNLGAPAAFKYFDTTIDRKRYTSTKEVLDATLIHQSITGLYETRIDLSQLGGDGGPAPGGTLNIEDEYRLHETSKGPDVPLGSTWLSDFPQAWAETGGMGLAVRQAPLIIPLKATSTPVSIKQYPMSQEARLGIKPHIQRLLDQGILVPCQSPWNTPLLPVKKPGTNDYRPVQDLREVNKRVEDIHPTVPNPYNLLSGLPPSHQWYTVLDLKDAFFCLRLHPTSQSLFAFEWRDPEMGISGQLTWTRLPQGFKNSPTLFNEALHRDLADFRIQHPDLILLQYVDDLLLAATSELDCQQGTRALLQTLGDLGYRASAKKAQICQKQVKYLGYLLKEGQRWLTEARKETVMGQPTPKTPRQLREFLGTAGFCRLWIPGFAEMAAPLYPLTKPGTLFEWGPDQQKAYQEIKQALLTAPALGLPDLTKPFELFVDEKQGYAKGVLTQKLGPWRRPVAYLSKKLDPVAAGWPPCLRMVAAIAVLTKDAGKLTMGQPLVILAPHAVEALVKQPPDRWLSNARMTHYQALLLDTDRVQFGPIVALNPATLLPLPEEGLQHDCLDILAEAHGTRPDLTDQPLPDADHTWYTDGSSFLQEGQRKAGAAVTTETEVVWAKALPAGTSAQRAELIALTQALKMAEGKKLNVYTDSRYAFATAHIHGEIYRRRGWLTSEGKEIKNKDEILALLKALFLPKRLSIIHCPGHQKGNRAEARGNRMADQAAREVATRETPETSTLLAGKRTADGSEFEKRTADGSEFESPKKKAKVE

SEQ ID NO: 2443 - protein, 2100 aa, synthetic construct
  source 1..2100: note = Description of Artificial Sequence: Synthetic polypeptide
MPAAKRVKLDGGDKKYSIGLDIGTNSVGWAVITDEYKVPSKKFKVLGNTDRHSIKKNLIGALLFDSGETAEATRLKRTARRRYTRRKNRICYLQEIFSNEMAKVDDSFFHRLEESFLVEEDKKHERHPIFGNIVDEVAYHEKYPTIYHLRKKLVDSTDKADLRLIYLALAHMIKFRGHFLIEGDLNPDNSDVDKLFIQLVQTYNQLFEENPINASGVDAKAILSARLSKSRRLENLIAQLPGEKKNGLFGNLIALSLGLTPNFKSNFDLAEDAKLQLSKDTYDDDLDNLLAQIGDQYADLFLAAKNLSDAILLSDILRVNTEITKAPLSASMIKRYDEHHQDLTLLKALVRQQLPEKYKEIFFDQSKNGYAGYIDGGASQEEFYKFIKPILEKMDGTEELLVKLNREDLLRKQRTFDNGSIPHQIHLGELHAILRRQEDFYPFLKDNREKIEKILTFRIPYYVGPLARGNSRFAWMTRKSEETITPWNFEEVVDKGASAQSFIERMTNFDKNLPNEKVLPKHSLLYEYFTVYNELTKVKYVTEGMRKPAFLSGEQKKAIVDLLFKTNRKVTVKQLKEDYFKKIECFDSVEISGVEDRFNASLGTYHDLLKIIKDKDFLDNEENEDILEDIVLTLTLFEDREMIEERLKTYAHLFDDKVMKQLKRRRYTGWGRLSRKLINGIRDKQSGKTILDFLKSDGFANRNFMQLIHDDSLTFKEDIQKAQVSGQGDSLHEHIANLAGSPAIKKGILQTVKVVDELVKVMGRHKPENIVIEMARENQTTQKGQKNSRERMKRIEEGIKELGSQILKEHPVENTQLQNEKLYLYYLQNGRDMYVDQELDINRLSDYDVDHIVPQSFLKDDSIDNKVLTRSDKARGKSDNVPSEEVVKKMKNYWRQLLNAKLITQRKFDNLTKAERGGLSELDKAGFIKRQLVETRQITKHVAQILDSRMNTKYDENDKLIREVKVITLKSKLVSDFRKDFQFYKVREINNYHHAHDAYLNAVVGTALIKKYPKLESEFVYGDYKVYDVRKMIAKSEQEIGKATAKYFFYSNIMNFFKTEITLANGEIRKRPLIETNGETGEIVWDKGRDFATVRKVLSMPQVNIVKKTEVQTGGFSKESILPKRNSDKLIARKKDWDPKKYGGFDSPTVAYSVLVVAKVEKGKSKKLKSVKELLGITIMERSSFEKNPIDFLEAKGYKEVKKDLIIKLPKYSLFELENGRKRMLASAGELQKGNELALPSKYVNFLYLASHYEKLKGSPEDNEQKQLFVEQHKHYLDEIIEQISEFSKRVILADANLDKVLSAYNKHRDKPIREQAENIIHLFTLTNLGAPAAFKYFDTTIDRKRYTSTKEVLDATLIHQSITGLYETRIDLSQLGGDGGGSSGSSGSSGSSGSSGGTLNIEDEYRLHETSKGPDVPLGSTWLSDFPQAWAETGGMGLAVRQAPLIIPLKATSTPVSIKQYPMSQEARLGIKPHIQRLLDQGILVPCQSPWNTPLLPVKKPGTNDYRPVQDLREVNKRVEDIHPTVPNPYNLLSGLPPSHQWYTVLDLKDAFFCLRLHPTSQSLFAFEWRDPEMGISGQLTWTRLPQGFKNSPTLFNEALHRDLADFRIQHPDLILLQYVDDLLLAATSELDCQQGTRALLQTLGDLGYRASAKKAQICQKQVKYLGYLLKEGQRWLTEARKETVMGQPTPKTPRQLREFLGTAGFCRLWIPGFAEMAAPLYPLTKPGTLFEWGPDQQKAYQEIKQALLTAPALGLPDLTKPFELFVDEKQGYAKGVLTQKLGPWRRPVAYLSKKLDPVAAGWPPCLRMVAAIAVLTKDAGKLTMGQPLVILAPHAVEALVKQPPDRWLSNARMTHYQALLLDTDRVQFGPIVALNPATLLPLPEEGLQHDCLDILAEAHGTRPDLTDQPLPDADHTWYTDGSSFLQEGQRKAGAAVTTETEVVWAKALPAGTSAQRAELIALTQALKMAEGKKLNVYTDSRYAFATAHIHGEIYRRRGWLTSEGKEIKNKDEILALLKALFLPKRLSIIHCPGHQKGNRAEARGNRMADQAAREVATRETPETSTLLAGKRTADGSEFEKRTADGSEFESPKKKAKVE

SEQ ID NO: 2444 - protein, 2096 aa, synthetic construct
  source 1..2096: note = Description of Artificial Sequence: Synthetic polypeptide
MPAAKRVKLDGGDKKYSIGLDIGTNSVGWAVITDEYKVPSKKFKVLGNTDRHSIKKNLIGALLFDSGETAEATRLKRTARRRYTRRKNRICYLQEIFSNEMAKVDDSFFHRLEESFLVEEDKKHERHPIFGNIVDEVAYHEKYPTIYHLRKKLVDSTDKADLRLIYLALAHMIKFRGHFLIEGDLNPDNSDVDKLFIQLVQTYNQLFEENPINASGVDAKAILSARLSKSRRLENLIAQLPGEKKNGLFGNLIALSLGLTPNFKSNFDLAEDAKLQLSKDTYDDDLDNLLAQIGDQYADLFLAAKNLSDAILLSDILRVNTEITKAPLSASMIKRYDEHHQDLTLLKALVRQQLPEKYKEIFFDQSKNGYAGYIDGGASQEEFYKFIKPILEKMDGTEELLVKLNREDLLRKQRTFDNGSIPHQIHLGELHAILRRQEDFYPFLKDNREKIEKILTFRIPYYVGPLARGNSRFAWMTRKSEETITPWNFEEVVDKGASAQSFIERMTNFDKNLPNEKVLPKHSLLYEYFTVYNELTKVKYVTEGMRKPAFLSGEQKKAIVDLLFKTNRKVTVKQLKEDYFKKIECFDSVEISGVEDRFNASLGTYHDLLKIIKDKDFLDNEENEDILEDIVLTLTLFEDREMIEERLKTYAHLFDDKVMKQLKRRRYTGWGRLSRKLINGIRDKQSGKTILDFLKSDGFANRNFMQLIHDDSLTFKEDIQKAQVSGQGDSLHEHIANLAGSPAIKKGILQTVKVVDELVKVMGRHKPENIVIEMARENQTTQKGQKNSRERMKRIEEGIKELGSQILKEHPVENTQLQNEKLYLYYLQNGRDMYVDQELDINRLSDYDVDHIVPQSFLKDDSIDNKVLTRSDKARGKSDNVPSEEVVKKMKNYWRQLLNAKLITQRKFDNLTKAERGGLSELDKAGFIKRQLVETRQITKHVAQILDSRMNTKYDENDKLIREVKVITLKSKLVSDFRKDFQFYKVREINNYHHAHDAYLNAVVGTALIKKYPKLESEFVYGDYKVYDVRKMIAKSEQEIGKATAKYFFYSNIMNFFKTEITLANGEIRKRPLIETNGETGEIVWDKGRDFATVRKVLSMPQVNIVKKTEVQTGGFSKESILPKRNSDKLIARKKDWDPKKYGGFDSPTVAYSVLVVAKVEKGKSKKLKSVKELLGITIMERSSFEKNPIDFLEAKGYKEVKKDLIIKLPKYSLFELENGRKRMLASAGELQKGNELALPSKYVNFLYLASHYEKLKGSPEDNEQKQLFVEQHKHYLDEIIEQISEFSKRVILADANLDKVLSAYNKHRDKPIREQAENIIHLFTLTNLGAPAAFKYFDTTIDRKRYTSTKEVLDATLIHQSITGLYETRIDLSQLGGDGGEAAAKGSSGGSGGTLNIEDEYRLHETSKGPDVPLGSTWLSDFPQAWAETGGMGLAVRQAPLIIPLKATSTPVSIKQYPMSQEARLGIKPHIQRLLDQGILVPCQSPWNTPLLPVKKPGTNDYRPVQDLREVNKRVEDIHPTVPNPYNLLSGLPPSHQWYTVLDLKDAFFCLRLHPTSQSLFAFEWRDPEMGISGQLTWTRLPQGFKNSPTLFNEALHRDLADFRIQHPDLILLQYVDDLLLAATSELDCQQGTRALLQTLGDLGYRASAKKAQICQKQVKYLGYLLKEGQRWLTEARKETVMGQPTPKTPRQLREFLGTAGFCRLWIPGFAEMAAPLYPLTKPGTLFEWGPDQQKAYQEIKQALLTAPALGLPDLTKPFELFVDEKQGYAKGVLTQKLGPWRRPVAYLSKKLDPVAAGWPPCLRMVAAIAVLTKDAGKLTMGQPLVILAPHAVEALVKQPPDRWLSNARMTHYQALLLDTDRVQFGPIVALNPATLLPLPEEGLQHDCLDILAEAHGTRPDLTDQPLPDADHTWYTDGSSFLQEGQRKAGAAVTTETEVVWAKALPAGTSAQRAELIALTQALKMAEGKKLNVYTDSRYAFATAHIHGEIYRRRGWLTSEGKEIKNKDEILALLKALFLPKRLSIIHCPGHQKGNRAEARGNRMADQAAREVATRETPETSTLLAGKRTADGSEFEKRTADGSEFESPKKKAKVE

SEQ ID NO: 2445 - protein, 2091 aa, synthetic construct
  source 1..2091: note = Description of Artificial Sequence: Synthetic polypeptide
MPAAKRVKLDGGDKKYSIGLDIGTNSVGWAVITDEYKVPSKKFKVLGNTDRHSIKKNLIGALLFDSGETAEATRLKRTARRRYTRRKNRICYLQEIFSNEMAKVDDSFFHRLEESFLVEEDKKHERHPIFGNIVDEVAYHEKYPTIYHLRKKLVDSTDKADLRLIYLALAHMIKFRGHFLIEGDLNPDNSDVDKLFIQLVQTYNQLFEENPINASGVDAKAILSARLSKSRRLENLIAQLPGEKKNGLFGNLIALSLGLTPNFKSNFDLAEDAKLQLSKDTYDDDLDNLLAQIGDQYADLFLAAKNLSDAILLSDILRVNTEITKAPLSASMIKRYDEHHQDLTLLKALVRQQLPEKYKEIFFDQSKNGYAGYIDGGASQEEFYKFIKPILEKMDGTEELLVKLNREDLLRKQRTFDNGSIPHQIHLGELHAILRRQEDFYPFLKDNREKIEKILTFRIPYYVGPLARGNSRFAWMTRKSEETITPWNFEEVVDKGASAQSFIERMTNFDKNLPNEKVLPKHSLLYEYFTVYNELTKVKYVTEGMRKPAFLSGEQKKAIVDLLFKTNRKVTVKQLKEDYFKKIECFDSVEISGVEDRFNASLGTYHDLLKIIKDKDFLDNEENEDILEDIVLTLTLFEDREMIEERLKTYAHLFDDKVMKQLKRRRYTGWGRLSRKLINGIRDKQSGKTILDFLKSDGFANRNFMQLIHDDSLTFKEDIQKAQVSGQGDSLHEHIANLAGSPAIKKGILQTVKVVDELVKVMGRHKPENIVIEMARENQTTQKGQKNSRERMKRIEEGIKELGSQILKEHPVENTQLQNEKLYLYYLQNGRDMYVDQELDINRLSDYDVDHIVPQSFLKDDSIDNKVLTRSDKARGKSDNVPSEEVVKKMKNYWRQLLNAKLITQRKFDNLTKAERGGLSELDKAGFIKRQLVETRQITKHVAQILDSRMNTKYDENDKLIREVKVITLKSKLVSDFRKDFQFYKVREINNYHHAHDAYLNAVVGTALIKKYPKLESEFVYGDYKVYDVRKMIAKSEQEIGKATAKYFFYSNIMNFFKTEITLANGEIRKRPLIETNGETGEIVWDKGRDFATVRKVLSMPQVNIVKKTEVQTGGFSKESILPKRNSDKLIARKKDWDPKKYGGFDSPTVAYSVLVVAKVEKGKSKKLKSVKELLGITIMERSSFEKNPIDFLEAKGYKEVKKDLIIKLPKYSLFELENGRKRMLASAGELQKGNELALPSKYVNFLYLASHYEKLKGSPEDNEQKQLFVEQHKHYLDEIIEQISEFSKRVILADANLDKVLSAYNKHRDKPIREQAENIIHLFTLTNLGAPAAFKYFDTTIDRKRYTSTKEVLDATLIHQSITGLYETRIDLSQLGGDGGGGGPAPGGTLNIEDEYRLHETSKGPDVPLGSTWLSDFPQAWAETGGMGLAVRQAPLIIPLKATSTPVSIKQYPMSQEARLGIKPHIQRLLDQGILVPCQSPWNTPLLPVKKPGTNDYRPVQDLREVNKRVEDIHPTVPNPYNLLSGLPPSHQWYTVLDLKDAFFCLRLHPTSQSLFAFEWRDPEMGISGQLTWTRLPQGFKNSPTLFNEALHRDLADFRIQHPDLILLQYVDDLLLAATSELDCQQGTRALLQTLGDLGYRASAKKAQICQKQVKYLGYLLKEGQRWLTEARKETVMGQPTPKTPRQLREFLGTAGFCRLWIPGFAEMAAPLYPLTKPGTLFEWGPDQQKAYQEIKQALLTAPALGLPDLTKPFELFVDEKQGYAKGVLTQKLGPWRRPVAYLSKKLDPVAAGWPPCLRMVAAIAVLTKDAGKLTMGQPLVILAPHAVEALVKQPPDRWLSNARMTHYQALLLDTDRVQFGPIVALNPATLLPLPEEGLQHDCLDILAEAHGTRPDLTDQPLPDADHTWYTDGSSFLQEGQRKAGAAVTTETEVVWAKALPAGTSAQRAELIALTQALKMAEGKKLNVYTDSRYAFATAHIHGEIYRRRGWLTSEGKEIKNKDEILALLKALFLPKRLSIIHCPGHQKGNRAEARGNRMADQAAREVATRETPETSTLLAGKRTADGSEFEKRTADGSEFESPKKKAKVE

SEQ ID NO: 2446 - protein, 2105 aa, synthetic construct
  source 1..2105: note = Description of Artificial Sequence: Synthetic polypeptide
MPAAKRVKLDGGDKKYSIGLDIGTNSVGWAVITDEYKVPSKKFKVLGNTDRHSIKKNLIGALLFDSGETAEATRLKRTARRRYTRRKNRICYLQEIFSNEMAKVDDSFFHRLEESFLVEEDKKHERHPIFGNIVDEVAYHEKYPTIYHLRKKLVDSTDKADLRLIYLALAHMIKFRGHFLIEGDLNPDNSDVDKLFIQLVQTYNQLFEENPINASGVDAKAILSARLSKSRRLENLIAQLPGEKKNGLFGNLIALSLGLTPNFKSNFDLAEDAKLQLSKDTYDDDLDNLLAQIGDQYADLFLAAKNLSDAILLSDILRVNTEITKAPLSASMIKRYDEHHQDLTLLKALVRQQLPEKYKEIFFDQSKNGYAGYIDGGASQEEFYKFIKPILEKMDGTEELLVKLNREDLLRKQRTFDNGSIPHQIHLGELHAILRRQEDFYPFLKDNREKIEKILTFRIPYYVGPLARGNSRFAWMTRKSEETITPWNFEEVVDKGASAQSFIERMTNFDKNLPNEKVLPKHSLLYEYFTVYNELTKVKYVTEGMRKPAFLSGEQKKAIVDLLFKTNRKVTVKQLKEDYFKKIECFDSVEISGVEDRFNASLGTYHDLLKIIKDKDFLDNEENEDILEDIVLTLTLFEDREMIEERLKTYAHLFDDKVMKQLKRRRYTGWGRLSRKLINGIRDKQSGKTILDFLKSDGFANRNFMQLIHDDSLTFKEDIQKAQVSGQGDSLHEHIANLAGSPAIKKGILQTVKVVDELVKVMGRHKPENIVIEMARENQTTQKGQKNSRERMKRIEEGIKELGSQILKEHPVENTQLQNEKLYLYYLQNGRDMYVDQELDINRLSDYDVDHIVPQSFLKDDSIDNKVLTRSDKARGKSDNVPSEEVVKKMKNYWRQLLNAKLITQRKFDNLTKAERGGLSELDKAGFIKRQLVETRQITKHVAQILDSRMNTKYDENDKLIREVKVITLKSKLVSDFRKDFQFYKVREINNYHHAHDAYLNAVVGTALIKKYPKLESEFVYGDYKVYDVRKMIAKSEQEIGKATAKYFFYSNIMNFFKTEITLANGEIRKRPLIETNGETGEIVWDKGRDFATVRKVLSMPQVNIVKKTEVQTGGFSKESILPKRNSDKLIARKKDWDPKKYGGFDSPTVAYSVLVVAKVEKGKSKKLKSVKELLGITIMERSSFEKNPIDFLEAKGYKEVKKDLIIKLPKYSLFELENGRKRMLASAGELQKGNELALPSKYVNFLYLASHYEKLKGSPEDNEQKQLFVEQHKHYLDEIIEQISEFSKRVILADANLDKVLSAYNKHRDKPIREQAENIIHLFTLTNLGAPAAFKYFDTTIDRKRYTSTKEVLDATLIHQSITGLYETRIDLSQLGGDGGEAAAKEAAAKEAAAKEAAAKGGTLNIEDEYRLHETSKGPDVPLGSTWLSDFPQAWAETGGMGLAVRQAPLIIPLKATSTPVSIKQYPMSQEARLGIKPHIQRLLDQGILVPCQSPWNTPLLPVKKPGTNDYRPVQDLREVNKRVEDIHPTVPNPYNLLSGLPPSHQWYTVLDLKDAFFCLRLHPTSQSLFAFEWRDPEMGISGQLTWTRLPQGFKNSPTLFNEALHRDLADFRIQHPDLILLQYVDDLLLAATSELDCQQGTRALLQTLGDLGYRASAKKAQICQKQVKYLGYLLKEGQRWLTEARKETVMGQPTPKTPRQLREFLGTAGFCRLWIPGFAEMAAPLYPLTKPGTLFEWGPDQQKAYQEIKQALLTAPALGLPDLTKPFELFVDEKQGYAKGVLTQKLGPWRRPVAYLSKKLDPVAAGWPPCLRMVAAIAVLTKDAGKLTMGQPLVILAPHAVEALVKQPPDRWLSNARMTHYQALLLDTDRVQFGPIVALNPATLLPLPEEGLQHDCLDILAEAHGTRPDLTDQPLPDADHTWYTDGSSFLQEGQRKAGAAVTTETEVVWAKALPAGTSAQRAELIALTQALKMAEGKKLNVYTDSRYAFATAHIHGEIYRRRGWLTSEGKEIKNKDEILALLKALFLPKRLSIIHCPGHQKGNRAEARGNRMADQAAREVATRETPETSTLLAGKRTADGSEFEKRTADGSEFESPKKKAKVE

SEQ ID NO: 2447 - protein, 2096 aa, synthetic construct
  source 1..2096: note = Description of Artificial Sequence: Synthetic polypeptide
MPAAKRVKLDGGDKKYSIGLDIGTNSVGWAVITDEYKVPSKKFKVLGNTDRHSIKKNLIGALLFDSGETAEATRLKRTARRRYTRRKNRICYLQEIFSNEMAKVDDSFFHRLEESFLVEEDKKHERHPIFGNIVDEVAYHEKYPTIYHLRKKLVDSTDKADLRLIYLALAHMIKFRGHFLIEGDLNPDNSDVDKLFIQLVQTYNQLFEENPINASGVDAKAILSARLSKSRRLENLIAQLPGEKKNGLFGNLIALSLGLTPNFKSNFDLAEDAKLQLSKDTYDDDLDNLLAQIGDQYADLFLAAKNLSDAILLSDILRVNTEITKAPLSASMIKRYDEHHQDLTLLKALVRQQLPEKYKEIFFDQSKNGYAGYIDGGASQEEFYKFIKPILEKMDGTEELLVKLNREDLLRKQRTFDNGSIPHQIHLGELHAILRRQEDFYPFLKDNREKIEKILTFRIPYYVGPLARGNSRFAWMTRKSEETITPWNFEEVVDKGASAQSFIERMTNFDKNLPNEKVLPKHSLLYEYFTVYNELTKVKYVTEGMRKPAFLSGEQKKAIVDLLFKTNRKVTVKQLKEDYFKKIECFDSVEISGVEDRFNASLGTYHDLLKIIKDKDFLDNEENEDILEDIVLTLTLFEDREMIEERLKTYAHLFDDKVMKQLKRRRYTGWGRLSRKLINGIRDKQSGKTILDFLKSDGFANRNFMQLIHDDSLTFKEDIQKAQVSGQGDSLHEHIANLAGSPAIKKGILQTVKVVDELVKVMGRHKPENIVIEMARENQTTQKGQKNSRERMKRIEEGIKELGSQILKEHPVENTQLQNEKLYLYYLQNGRDMYVDQELDINRLSDYDVDHIVPQSFLKDDSIDNKVLTRSDKARGKSDNVPSEEVVKKMKNYWRQLLNAKLITQRKFDNLTKAERGGLSELDKAGFIKRQLVETRQITKHVAQILDSRMNTKYDENDKLIREVKVITLKSKLVSDFRKDFQFYKVREINNYHHAHDAYLNAVVGTALIKKYPKLESEFVYGDYKVYDVRKMIAKSEQEIGKATAKYFFYSNIMNFFKTEITLANGEIRKRPLIETNGETGEIVWDKGRDFATVRKVLSMPQVNIVKKTEVQTGGFSKESILPKRNSDKLIARKKDWDPKKYGGFDSPTVAYSVLVVAKVEKGKSKKLKSVKELLGITIMERSSFEKNPIDFLEAKGYKEVKKDLIIKLPKYSLFELENGRKRMLASAGELQKGNELALPSKYVNFLYLASHYEKLKGSPEDNEQKQLFVEQHKHYLDEIIEQISEFSKRVILADANLDKVLSAYNKHRDKPIREQAENIIHLFTLTNLGAPAAFKYFDTTIDRKRYTSTKEVLDATLIHQSITGLYETRIDLSQLGGDGGGGSPAPEAAAKGGTLNIEDEYRLHETSKGPDVPLGSTWLSDFPQAWAETGGMGLAVRQAPLIIPLKATSTPVSIKQYPMSQEARLGIKPHIQRLLDQGILVPCQSPWNTPLLPVKKPGTNDYRPVQDLREVNKRVEDIHPTVPNPYNLLSGLPPSHQWYTVLDLKDAFFCLRLHPTSQSLFAFEWRDPEMGISGQLTWTRLPQGFKNSPTLFNEALHRDLADFRIQHPDLILLQYVDDLLLAATSELDCQQGTRALLQTLGDLGYRASAKKAQICQKQVKYLGYLLKEGQRWLTEARKETVMGQPTPKTPRQLREFLGTAGFCRLWIPGFAEMAAPLYPLTKPGTLFEWGPDQQKAYQEIKQALLTAPALGLPDLTKPFELFVDEKQGYAKGVLTQKLGPWRRPVAYLSKKLDPVAAGWPPCLRMVAAIAVLTKDAGKLTMGQPLVILAPHAVEALVKQPPDRWLSNARMTHYQALLLDTDRVQFGPIVALNPATLLPLPEEGLQHDCLDILAEAHGTRPDLTDQPLPDADHTWYTDGSSFLQEGQRKAGAAVTTETEVVWAKALPAGTSAQRAELIALTQALKMAEGKKLNVYTDSRYAFATAHIHGEIYRRRGWLTSEGKEIKNKDEILALLKALFLPKRLSIIHCPGHQKGNRAEARGNRMADQAAREVATRETPETSTLLAGKRTADGSEFEKRTADGSEFESPKKKAKVE

SEQ ID NO: 2448 - protein, 2090 aa, synthetic construct
  source 1..2090: note = Description of Artificial Sequence: Synthetic polypeptide
MPAAKRVKLDGGDKKYSIGLDIGTNSVGWAVITDEYKVPSKKFKVLGNTDRHSIKKNLIGALLFDSGETAEATRLKRTARRRYTRRKNRICYLQEIFSNEMAKVDDSFFHRLEESFLVEEDKKHERHPIFGNIVDEVAYHEKYPTIYHLRKKLVDSTDKADLRLIYLALAHMIKFRGHFLIEGDLNPDNSDVDKLFIQLVQTYNQLFEENPINASGVDAKAILSARLSKSRRLENLIAQLPGEKKNGLFGNLIALSLGLTPNFKSNFDLAEDAKLQLSKDTYDDDLDNLLAQIGDQYADLFLAAKNLSDAILLSDILRVNTEITKAPLSASMIKRYDEHHQDLTLLKALVRQQLPEKYKEIFFDQSKNGYAGYIDGGASQEEFYKFIKPILEKMDGTEELLVKLNREDLLRKQRTFDNGSIPHQIHLGELHAILRRQEDFYPFLKDNREKIEKILTFRIPYYVGPLARGNSRFAWMTRKSEETITPWNFEEVVDKGASAQSFIERMTNFDKNLPNEKVLPKHSLLYEYFTVYNELTKVKYVTEGMRKPAFLSGEQKKAIVDLLFKTNRKVTVKQLKEDYFKKIECFDSVEISGVEDRFNASLGTYHDLLKIIKDKDFLDNEENEDILEDIVLTLTLFEDREMIEERLKTYAHLFDDKVMKQLKRRRYTGWGRLSRKLINGIRDKQSGKTILDFLKSDGFANRNFMQLIHDDSLTFKEDIQKAQVSGQGDSLHEHIANLAGSPAIKKGILQTVKVVDELVKVMGRHKPENIVIEMARENQTTQKGQKNSRERMKRIEEGIKELGSQILKEHPVENTQLQNEKLYLYYLQNGRDMYVDQELDINRLSDYDVDHIVPQSFLKDDSIDNKVLTRSDKARGKSDNVPSEEVVKKMKNYWRQLLNAKLITQRKFDNLTKAERGGLSELDKAGFIKRQLVETRQITKHVAQILDSRMNTKYDENDKLIREVKVITLKSKLVSDFRKDFQFYKVREINNYHHAHDAYLNAVVGTALIKKYPKLESEFVYGDYKVYDVRKMIAKSEQEIGKATAKYFFYSNIMNFFKTEITLANGEIRKRPLIETNGETGEIVWDKGRDFATVRKVLSMPQVNIVKKTEVQTGGFSKESILPKRNSDKLIARKKDWDPKKYGGFDSPTVAYSVLVVAKVEKGKSKKLKSVKELLGITIMERSSFEKNPIDFLEAKGYKEVKKDLIIKLPKYSLFELENGRKRMLASAGELQKGNELALPSKYVNFLYLASHYEKLKGSPEDNEQKQLFVEQHKHYLDEIIEQISEFSKRVILADANLDKVLSAYNKHRDKPIREQAENIIHLFTLTNLGAPAAFKYFDTTIDRKRYTSTKEVLDATLIHQSITGLYETRIDLSQLGGDGGPAPAPGGTLNIEDEYRLHETSKGPDVPLGSTWLSDFPQAWAETGGMGLAVRQAPLIIPLKATSTPVSIKQYPMSQEARLGIKPHIQRLLDQGILVPCQSPWNTPLLPVKKPGTNDYRPVQDLREVNKRVEDIHPTVPNPYNLLSGLPPSHQWYTVLDLKDAFFCLRLHPTSQSLFAFEWRDPEMGISGQLTWTRLPQGFKNSPTLFNEALHRDLADFRIQHPDLILLQYVDDLLLAATSELDCQQGTRALLQTLGDLGYRASAKKAQICQKQVKYLGYLLKEGQRWLTEARKETVMGQPTPKTPRQLREFLGTAGFCRLWIPGFAEMAAPLYPLTKPGTLFEWGPDQQKAYQEIKQALLTAPALGLPDLTKPFELFVDEKQGYAKGVLTQKLGPWRRPVAYLSKKLDPVAAGWPPCLRMVAAIAVLTKDAGKLTMGQPLVILAPHAVEALVKQPPDRWLSNARMTHYQALLLDTDRVQFGPIVALNPATLLPLPEEGLQHDCLDILAEAHGTRPDLTDQPLPDADHTWYTDGSSFLQEGQRKAGAAVTTETEVVWAKALPAGTSAQRAELIALTQALKMAEGKKLNVYTDSRYAFATAHIHGEIYRRRGWLTSEGKEIKNKDEILALLKALFLPKRLSIIHCPGHQKGNRAEARGNRMADQAAREVATRETPETSTLLAGKRTADGSEFEKRTADGSEFESPKKKAKVE

SEQ ID NO: 2449 - protein, 2098 aa, synthetic construct
  source 1..2098: note = Description of Artificial Sequence: Synthetic polypeptide
MPAAKRVKLDGGDKKYSIGLDIGTNSVGWAVITDEYKVPSKKFKVLGNTDRHSIKKNLIGALLFDSGETAEATRLKRTARRRYTRRKNRICYLQEIFSNEMAKVDDSFFHRLEESFLVEEDKKHERHPIFGNIVDEVAYHEKYPTIYHLRKKLVDSTDKADLRLIYLALAHMIKFRGHFLIEGDLNPDNSDVDKLFIQLVQTYNQLFEENPINASGVDAKAILSARLSKSRRLENLIAQLPGEKKNGLFGNLIALSLGLTPNFKSNFDLAEDAKLQLSKDTYDDDLDNLLAQIGDQYADLFLAAKNLSDAILLSDILRVNTEITKAPLSASMIKRYDEHHQDLTLLKALVRQQLPEKYKEIFFDQSKNGYAGYIDGGASQEEFYKFIKPILEKMDGTEELLVKLNREDLLRKQRTFDNGSIPHQIHLGELHAILRRQEDFYPFLKDNREKIEKILTFRIPYYVGPLARGNSRFAWMTRKSEETITPWNFEEVVDKGASAQSFIERMTNFDKNLPNEKVLPKHSLLYEYFTVYNELTKVKYVTEGMRKPAFLSGEQKKAIVDLLFKTNRKVTVKQLKEDYFKKIECFDSVEISGVEDRFNASLGTYHDLLKIIKDKDFLDNEENEDILEDIVLTLTLFEDREMIEERLKTYAHLFDDKVMKQLKRRRYTGWGRLSRKLINGIRDKQSGKTILDFLKSDGFANRNFMQLIHDDSLTFKEDIQKAQVSGQGDSLHEHIANLAGSPAIKKGILQTVKVVDELVKVMGRHKPENIVIEMARENQTTQKGQKNSRERMKRIEEGIKELGSQILKEHPVENTQLQNEKLYLYYLQNGRDMYVDQELDINRLSDYDVDHIVPQSFLKDDSIDNKVLTRSDKARGKSDNVPSEEVVKKMKNYWRQLLNAKLITQRKFDNLTKAERGGLSELDKAGFIKRQLVETRQITKHVAQILDSRMNTKYDENDKLIREVKVITLKSKLVSDFRKDFQFYKVREINNYHHAHDAYLNAVVGTALIKKYPKLESEFVYGDYKVYDVRKMIAKSEQEIGKATAKYFFYSNIMNFFKTEITLANGEIRKRPLIETNGETGEIVWDKGRDFATVRKVLSMPQVNIVKKTEVQTGGFSKESILPKRNSDKLIARKKDWDPKKYGGFDSPTVAYSVLVVAKVEKGKSKKLKSVKELLGITIMERSSFEKNPIDFLEAKGYKEVKKDLIIKLPKYSLFELENGRKRMLASAGELQKGNELALPSKYVNFLYLASHYEKLKGSPEDNEQKQLFVEQHKHYLDEIIEQISEFSKRVILADANLDKVLSAYNKHRDKPIREQAENIIHLFTLTNLGAPAAFKYFDTTIDRKRYTSTKEVLDATLIHQSITGLYETRIDLSQLGGDGGPAPAPAPAPAPAPGGTLNIEDEYRLHETSKGPDVPLGSTWLSDFPQAWAETGGMGLAVRQAPLIIPLKATSTPVSIKQYPMSQEARLGIKPHIQRLLDQGILVPCQSPWNTPLLPVKKPGTNDYRPVQDLREVNKRVEDIHPTVPNPYNLLSGLPPSHQWYTVLDLKDAFFCLRLHPTSQSLFAFEWRDPEMGISGQLTWTRLPQGFKNSPTLFNEALHRDLADFRIQHPDLILLQYVDDLLLAATSELDCQQGTRALLQTLGDLGYRASAKKAQICQKQVKYLGYLLKEGQRWLTEARKETVMGQPTPKTPRQLREFLGTAGFCRLWIPGFAEMAAPLYPLTKPGTLFEWGPDQQKAYQEIKQALLTAPALGLPDLTKPFELFVDEKQGYAKGVLTQKLGPWRRPVAYLSKKLDPVAAGWPPCLRMVAAIAVLTKDAGKLTMGQPLVILAPHAVEALVKQPPDRWLSNARMTHYQALLLDTDRVQFGPIVALNPATLLPLPEEGLQHDCLDILAEAHGTRPDLTDQPLPDADHTWYTDGSSFLQEGQRKAGAAVTTETEVVWAKALPAGTSAQRAELIALTQALKMAEGKKLNVYTDSRYAFATAHIHGEIYRRRGWLTSEGKEIKNKDEILALLKALFLPKRLSIIHCPGHQKGNRAEARGNRMADQAAREVATRETPETSTLLAGKRTADGSEFEKRTADGSEFESPKKKAKVE

SEQ ID NO: 2450 - protein, 2092 aa, synthetic construct
  source 1..2092: note = Description of Artificial Sequence: Synthetic polypeptide
MPAAKRVKLDGGDKKYSIGLDIGTNSVGWAVITDEYKVPSKKFKVLGNTDRHSIKKNLIGALLFDSGETAEATRLKRTARRRYTRRKNRICYLQEIFSNEMAKVDDSFFHRLEESFLVEEDKKHERHPIFGNIVDEVAYHEKYPTIYHLRKKLVDSTDKADLRLIYLALAHMIKFRGHFLIEGDLNPDNSDVDKLFIQLVQTYNQLFEENPINASGVDAKAILSARLSKSRRLENLIAQLPGEKKNGLFGNLIALSLGLTPNFKSNFDLAEDAKLQLSKDTYDDDLDNLLAQIGDQYADLFLAAKNLSDAILLSDILRVNTEITKAPLSASMIKRYDEHHQDLTLLKALVRQQLPEKYKEIFFDQSKNGYAGYIDGGASQEEFYKFIKPILEKMDGTEELLVKLNREDLLRKQRTFDNGSIPHQIHLGELHAILRRQEDFYPFLKDNREKIEKILTFRIPYYVGPLARGNSRFAWMTRKSEETITPWNFEEVVDKGASAQSFIERMTNFDKNLPNEKVLPKHSLLYEYFTVYNELTKVKYVTEGMRKPAFLSGEQKKAIVDLLFKTNRKVTVKQLKEDYFKKIECFDSVEISGVEDRFNASLGTYHDLLKIIKDKDFLDNEENEDILEDIVLTLTLFEDREMIEERLKTYAHLFDDKVMKQLKRRRYTGWGRLSRKLINGIRDKQSGKTILDFLKSDGFANRNFMQLIHDDSLTFKEDIQKAQVSGQGDSLHEHIANLAGSPAIKKGILQTVKVVDELVKVMGRHKPENIVIEMARENQTTQKGQKNSRERMKRIEEGIKELGSQILKEHPVENTQLQNEKLYLYYLQNGRDMYVDQELDINRLSDYDVDHIVPQSFLKDDSIDNKVLTRSDKARGKSDNVPSEEVVKKMKNYWRQLLNAKLITQRKFDNLTKAERGGLSELDKAGFIKRQLVETRQITKHVAQILDSRMNTKYDENDKLIREVKVITLKSKLVSDFRKDFQFYKVREINNYHHAHDAYLNAVVGTALIKKYPKLESEFVYGDYKVYDVRKMIAKSEQEIGKATAKYFFYSNIMNFFKTEITLANGEIRKRPLIETNGETGEIVWDKGRDFATVRKVLSMPQVNIVKKTEVQTGGFSKESILPKRNSDKLIARKKDWDPKKYGGFDSPTVAYSVLVVAKVEKGKSKKLKSVKELLGITIMERSSFEKNPIDFLEAKGYKEVKKDLIIKLPKYSLFELENGRKRMLASAGELQKGNELALPSKYVNFLYLASHYEKLKGSPEDNEQKQLFVEQHKHYLDEIIEQISEFSKRVILADANLDKVLSAYNKHRDKPIREQAENIIHLFTLTNLGAPAAFKYFDTTIDRKRYTSTKEVLDATLIHQSITGLYETRIDLSQLGGDGGGGGGGGGGGTLNIEDEYRLHETSKGPDVPLGSTWLSDFPQAWAETGGMGLAVRQAPLIIPLKATSTPVSIKQYPMSQEARLGIKPHIQRLLDQGILVPCQSPWNTPLLPVKKPGTNDYRPVQDLREVNKRVEDIHPTVPNPYNLLSGLPPSHQWYTVLDLKDAFFCLRLHPTSQSLFAFEWRDPEMGISGQLTWTRLPQGFKNSPTLFNEALHRDLADFRIQHPDLILLQYVDDLLLAATSELDCQQGTRALLQTLGDLGYRASAKKAQICQKQVKYLGYLLKEGQRWLTEARKETVMGQPTPKTPRQLREFLGTAGFCRLWIPGFAEMAAPLYPLTKPGTLFEWGPDQQKAYQEIKQALLTAPALGLPDLTKPFELFVDEKQGYAKGVLTQKLGPWRRPVAYLSKKLDPVAAGWPPCLRMVAAIAVLTKDAGKLTMGQPLVILAPHAVEALVKQPPDRWLSNARMTHYQALLLDTDRVQFGPIVALNPATLLPLPEEGLQHDCLDILAEAHGTRPDLTDQPLPDADHTWYTDGSSFLQEGQRKAGAAVTTETEVVWAKALPAGTSAQRAELIALTQALKMAEGKKLNVYTDSRYAFATAHIHGEIYRRRGWLTSEGKEIKNKDEILALLKALFLPKRLSIIHCPGHQKGNRAEARGNRMADQAAREVATRETPETSTLLAGKRTADGSEFEKRTADGSEFESPKKKAKVE

SEQ ID NO: 2451 - protein, 2093 aa, synthetic construct
  source 1..2093: note = Description of Artificial Sequence: Synthetic polypeptide
MPAAKRVKLDGGDKKYSIGLDIGTNSVGWAVITDEYKVPSKKFKVLGNTDRHSIKKNLIGALLFDSGETAEATRLKRTARRRYTRRKNRICYLQEIFSNEMAKVDDSFFHRLEESFLVEEDKKHERHPIFGNIVDEVAYHEKYPTIYHLRKKLVDSTDKADLRLIYLALAHMIKFRGHFLIEGDLNPDNSDVDKLFIQLVQTYNQLFEENPINASGVDAKAILSARLSKSRRLENLIAQLPGEKKNGLFGNLIALSLGLTPNFKSNFDLAEDAKLQLSKDTYDDDLDNLLAQIGDQYADLFLAAKNLSDAILLSDILRVNTEITKAPLSASMIKRYDEHHQDLTLLKALVRQQLPEKYKEIFFDQSKNGYAGYIDGGASQEEFYKFIKPILEKMDGTEELLVKLNREDLLRKQRTFDNGSIPHQIHLGELHAILRRQEDFYPFLKDNREKIEKILTFRIPYYVGPLARGNSRFAWMTRKSEETITPWNFEEVVDKGASAQSFIERMTNFDKNLPNEKVLPKHSLLYEYFTVYNELTKVKYVTEGMRKPAFLSGEQKKAIVDLLFKTNRKVTVKQLKEDYFKKIECFDSVEISGVEDRFNASLGTYHDLLKIIKDKDFLDNEENEDILEDIVLTLTLFEDREMIEERLKTYAHLFDDKVMKQLKRRRYTGWGRLSRKLINGIRDKQSGKTILDFLKSDGFANRNFMQLIHDDSLTFKEDIQKAQVSGQGDSLHEHIANLAGSPAIKKGILQTVKVVDELVKVMGRHKPENIVIEMARENQTTQKGQKNSRERMKRIEEGIKELGSQILKEHPVENTQLQNEKLYLYYLQNGRDMYVDQELDINRLSDYDVDHIVPQSFLKDDSIDNKVLTRSDKARGKSDNVPSEEVVKKMKNYWRQLLNAKLITQRKFDNLTKAERGGLSELDKAGFIKRQLVETRQITKHVAQILDSRMNTKYDENDKLIREVKVITLKSKLVSDFRKDFQFYKVREINNYHHAHDAYLNAVVGTALIKKYPKLESEFVYGDYKVYDVRKMIAKSEQEIGKATAKYFFYSNIMNFFKTEITLANGEIRKRPLIETNGETGEIVWDKGRDFATVRKVLSMPQVNIVKKTEVQTGGFSKESILPKRNSDKLIARKKDWDPKKYGGFDSPTVAYSVLVVAKVEKGKSKKLKSVKELLGITIMERSSFEKNPIDFLEAKGYKEVKKDLIIKLPKYSLFELENGRKRMLASAGELQKGNELALPSKYVNFLYLASHYEKLKGSPEDNEQKQLFVEQHKHYLDEIIEQISEFSKRVILADANLDKVLSAYNKHRDKPIREQAENIIHLFTLTNLGAPAAFKYFDTTIDRKRYTSTKEVLDATLIHQSITGLYETRIDLSQLGGDGGEAAAKGSSGGTLNIEDEYRLHETSKGPDVPLGSTWLSDFPQAWAETGGMGLAVRQAPLIIPLKATSTPVSIKQYPMSQEARLGIKPHIQRLLDQGILVPCQSPWNTPLLPVKKPGTNDYRPVQDLREVNKRVEDIHPTVPNPYNLLSGLPPSHQWYTVLDLKDAFFCLRLHPTSQSLFAFEWRDPEMGISGQLTWTRLPQGFKNSPTLFNEALHRDLADFRIQHPDLILLQYVDDLLLAATSELDCQQGTRALLQTLGDLGYRASAKKAQICQKQVKYLGYLLKEGQRWLTEARKETVMGQPTPKTPRQLREFLGTAGFCRLWIPGFAEMAAPLYPLTKPGTLFEWGPDQQKAYQEIKQALLTAPALGLPDLTKPFELFVDEKQGYAKGVLTQKLGPWRRPVAYLSKKLDPVAAGWPPCLRMVAAIAVLTKDAGKLTMGQPLVILAPHAVEALVKQPPDRWLSNARMTHYQALLLDTDRVQFGPIVALNPATLLPLPEEGLQHDCLDILAEAHGTRPDLTDQPLPDADHTWYTDGSSFLQEGQRKAGAAVTTETEVVWAKALPAGTSAQRAELIALTQALKMAEGKKLNVYTDSRYAFATAHIHGEIYRRRGWLTSEGKEIKNKDEILALLKALFLPKRLSIIHCPGHQKGNRAEARGNRMADQAAREVATRETPETSTLLAGKRTADGSEFEKRTADGSEFESPKKKAKVE

SEQ ID NO: 2452 - protein, 2096 aa, synthetic construct
  source 1..2096: note = Description of Artificial Sequence: Synthetic polypeptide
MPAAKRVKLDGGDKKYSIGLDIGTNSVGWAVITDEYKVPSKKFKVLGNTDRHSIKKNLIGALLFDSGETAEATRLKRTARRRYTRRKNRICYLQEIFSNEMAKVDDSFFHRLEESFLVEEDKKHERHPIFGNIVDEVAYHEKYPTIYHLRKKLVDSTDKADLRLIYLALAHMIKFRGHFLIEGDLNPDNSDVDKLFIQLVQTYNQLFEENPINASGVDAKAILSARLSKSRRLENLIAQLPGEKKNGLFGNLIALSLGLTPNFKSNFDLAEDAKLQLSKDTYDDDLDNLLAQIGDQYADLFLAAKNLSDAILLSDILRVNTEITKAPLSASMIKRYDEHHQDLTLLKALVRQQLPEKYKEIFFDQSKNGYAGYIDGGASQEEFYKFIKPILEKMDGTEELLVKLNREDLLRKQRTFDNGSIPHQIHLGELHAILRRQEDFYPFLKDNREKIEKILTFRIPYYVGPLARGNSRFAWMTRKSEETITPWNFEEVVDKGASAQSFIERMTNFDKNLPNEKVLPKHSLLYEYFTVYNELTKVKYVTEGMRKPAFLSGEQKKAIVDLLFKTNRKVTVKQLKEDYFKKIECFDSVEISGVEDRFNASLGTYHDLLKIIKDKDFLDNEENEDILEDIVLTLTLFEDREMIEERLKTYAHLFDDKVMKQLKRRRYTGWGRLSRKLINGIRDKQSGKTILDFLKSDGFANRNFMQLIHDDSLTFKEDIQKAQVSGQGDSLHEHIANLAGSPAIKKGILQTVKVVDELVKVMGRHKPENIVIEMARENQTTQKGQKNSRERMKRIEEGIKELGSQILKEHPVENTQLQNEKLYLYYLQNGRDMYVDQELDINRLSDYDVDHIVPQSFLKDDSIDNKVLTRSDKARGKSDNVPSEEVVKKMKNYWRQLLNAKLITQRKFDNLTKAERGGLSELDKAGFIKRQLVETRQITKHVAQILDSRMNTKYDENDKLIREVKVITLKSKLVSDFRKDFQFYKVREINNYHHAHDAYLNAVVGTALIKKYPKLESEFVYGDYKVYDVRKMIAKSEQEIGKATAKYFFYSNIMNFFKTEITLANGEIRKRPLIETNGETGEIVWDKGRDFATVRKVLSMPQVNIVKKTEVQTGGFSKESILPKRNSDKLIARKKDWDPKKYGGFDSPTVAYSVLVVAKVEKGKSKKLKSVKELLGITIMERSSFEKNPIDFLEAKGYKEVKKDLIIKLPKYSLFELENGRKRMLASAGELQKGNELALPSKYVNFLYLASHYEKLKGSPEDNEQKQLFVEQHKHYLDEIIEQISEFSKRVILADANLDKVLSAYNKHRDKPIREQAENIIHLFTLTNLGAPAAFKYFDTTIDRKRYTSTKEVLDATLIHQSITGLYETRIDLSQLGGDGGEAAAKGSSGGGGGTLNIEDEYRLHETSKGPDVPLGSTWLSDFPQAWAETGGMGLAVRQAPLIIPLKATSTPVSIKQYPMSQEARLGIKPHIQRLLDQGILVPCQSPWNTPLLPVKKPGTNDYRPVQDLREVNKRVEDIHPTVPNPYNLLSGLPPSHQWYTVLDLKDAFFCLRLHPTSQSLFAFEWRDPEMGISGQLTWTRLPQGFKNSPTLFNEALHRDLADFRIQHPDLILLQYVDDLLLAATSELDCQQGTRALLQTLGDLGYRASAKKAQICQKQVKYLGYLLKEGQRWLTEARKETVMGQPTPKTPRQLREFLGTAGFCRLWIPGFAEMAAPLYPLTKPGTLFEWGPDQQKAYQEIKQALLTAPALGLPDLTKPFELFVDEKQGYAKGVLTQKLGPWRRPVAYLSKKLDPVAAGWPPCLRMVAAIAVLTKDAGKLTMGQPLVILAPHAVEALVKQPPDRWLSNARMTHYQALLLDTDRVQFGPIVALNPATLLPLPEEGLQHDCLDILAEAHGTRPDLTDQPLPDADHTWYTDGSSFLQEGQRKAGAAVTTETEVVWAKALPAGTSAQRAELIALTQALKMAEGKKLNVYTDSRYAFATAHIHGEIYRRRGWLTSEGKEIKNKDEILALLKALFLPKRLSIIHCPGHQKGNRAEARGNRMADQAAREVATRETPETSTLLAGKRTADGSEFEKRTADGSEFESPKKKAKVE

SEQ ID NO: 2453 - protein, 2096 aa, synthetic construct
  source 1..2096: note = Description of Artificial Sequence: Synthetic polypeptide
MPAAKRVKLDGGDKKYSIGLDIGTNSVGWAVITDEYKVPSKKFKVLGNTDRHSIKKNLIGALLFDSGETAEATRLKRTARRRYTRRKNRICYLQEIFSNEMAKVDDSFFHRLEESFLVEEDKKHERHPIFGNIVDEVAYHEKYPTIYHLRKKLVDSTDKADLRLIYLALAHMIKFRGHFLIEGDLNPDNSDVDKLFIQLVQTYNQLFEENPINASGVDAKAILSARLSKSRRLENLIAQLPGEKKNGLFGNLIALSLGLTPNFKSNFDLAEDAKLQLSKDTYDDDLDNLLAQIGDQYADLFLAAKNLSDAILLSDILRVNTEITKAPLSASMIKRYDEHHQDLTLLKALVRQQLPEKYKEIFFDQSKNGYAGYIDGGASQEEFYKFIKPILEKMDGTEELLVKLNREDLLRKQRTFDNGSIPHQIHLGELHAILRRQEDFYPFLKDNREKIEKILTFRIPYYVGPLARGNSRFAWMTRKSEETITPWNFEEVVDKGASAQSFIERMTNFDKNLPNEKVLPKHSLLYEYFTVYNELTKVKYVTEGMRKPAFLSGEQKKAIVDLLFKTNRKVTVKQLKEDYFKKIECFDSVEISGVEDRFNASLGTYHDLLKIIKDKDFLDNEENEDILEDIVLTLTLFEDREMIEERLKTYAHLFDDKVMKQLKRRRYTGWGRLSRKLINGIRDKQSGKTILDFLKSDGFANRNFMQLIHDDSLTFKEDIQKAQVSGQGDSLHEHIANLAGSPAIKKGILQTVKVVDELVKVMGRHKPENIVIEMARENQTTQKGQKNSRERMKRIEEGIKELGSQILKEHPVENTQLQNEKLYLYYLQNGRDMYVDQELDINRLSDYDVDHIVPQSFLKDDSIDNKVLTRSDKARGKSDNVPSEEVVKKMKNYWRQLLNAKLITQRKFDNLTKAERGGLSELDKAGFIKRQLVETRQITKHVAQILDSRMNTKYDENDKLIREVKVITLKSKLVSDFRKDFQFYKVREINNYHHAHDAYLNAVVGTALIKKYPKLESEFVYGDYKVYDVRKMIAKSEQEIGKATAKYFFYSNIMNFFKTEITLANGEIRKRPLIETNGETGEIVWDKGRDFATVRKVLSMPQVNIVKKTEVQTGGFSKESILPKRNSDKLIARKKDWDPKKYGGFDSPTVAYSVLVVAKVEKGKSKKLKSVKELLGITIMERSSFEKNPIDFLEAKGYKEVKKDLIIKLPKYSLFELENGRKRMLASAGELQKGNELALPSKYVNFLYLASHYEKLKGSPEDNEQKQLFVEQHKHYLDEIIEQISEFSKRVILADANLDKVLSAYNKHRDKPIREQAENIIHLFTLTNLGAPAAFKYFDTTIDRKRYTSTKEVLDATLIHQSITGLYETRIDLSQLGGDGGPAPGSSEAAAKGGTLNIEDEYRLHETSKGPDVPLGSTWLSDFPQAWAETGGMGLAVRQAPLIIPLKATSTPVSIKQYPMSQEARLGIKPHIQRLLDQGILVPCQSPWNTPLLPVKKPGTNDYRPVQDLREVNKRVEDIHPTVPNPYNLLSGLPPSHQWYTVLDLKDAFFCLRLHPTSQSLFAFEWRDPEMGISGQLTWTRLPQGFKNSPTLFNEALHRDLADFRIQHPDLILLQYVDDLLLAATSELDCQQGTRALLQTLGDLGYRASAKKAQICQKQVKYLGYLLKEGQRWLTEARKETVMGQPTPKTPRQLREFLGTAGFCRLWIPGFAEMAAPLYPLTKPGTLFEWGPDQQKAYQEIKQALLTAPALGLPDLTKPFELFVDEKQGYAKGVLTQKLGPWRRPVAYLSKKLDPVAAGWPPCLRMVAAIAVLTKDAGKLTMGQPLVILAPHAVEALVKQPPDRWLSNARMTHYQALLLDTDRVQFGPIVALNPATLLPLPEEGLQHDCLDILAEAHGTRPDLTDQPLPDADHTWYTDGSSFLQEGQRKAGAAVTTETEVVWAKALPAGTSAQRAELIALTQALKMAEGKKLNVYTDSRYAFATAHIHGEIYRRRGWLTSEGKEIKNKDEILALLKALFLPKRLSIIHCPGHQKGNRAEARGNRMADQAAREVATRETPETSTLLAGKRTADGSEFEKRTADGSEFESPKKKAKVE

SEQ ID NO: 2454 - protein, 2110 aa, synthetic construct
  source 1..2110: note = Description of Artificial Sequence: Synthetic polypeptide
MPAAKRVKLDGGDKKYSIGLDIGTNSVGWAVITDEYKVPSKKFKVLGNTDRHSIKKNLIGALLFDSGETAEATRLKRTARRRYTRRKNRICYLQEIFSNEMAKVDDSFFHRLEESFLVEEDKKHERHPIFGNIVDEVAYHEKYPTIYHLRKKLVDSTDKADLRLIYLALAHMIKFRGHFLIEGDLNPDNSDVDKLFIQLVQTYNQLFEENPINASGVDAKAILSARLSKSRRLENLIAQLPGEKKNGLFGNLIALSLGLTPNFKSNFDLAEDAKLQLSKDTYDDDLDNLLAQIGDQYADLFLAAKNLSDAILLSDILRVNTEITKAPLSASMIKRYDEHHQDLTLLKALVRQQLPEKYKEIFFDQSKNGYAGYIDGGASQEEFYKFIKPILEKMDGTEELLVKLNREDLLRKQRTFDNGSIPHQIHLGELHAILRRQEDFYPFLKDNREKIEKILTFRIPYYVGPLARGNSRFAWMTRKSEETITPWNFEEVVDKGASAQSFIERMTNFDKNLPNEKVLPKHSLLYEYFTVYNELTKVKYVTEGMRKPAFLSGEQKKAIVDLLFKTNRKVTVKQLKEDYFKKIECFDSVEISGVEDRFNASLGTYHDLLKIIKDKDFLDNEENEDILEDIVLTLTLFEDREMIEERLKTYAHLFDDKVMKQLKRRRYTGWGRLSRKLINGIRDKQSGKTILDFLKSDGFANRNFMQLIHDDSLTFKEDIQKAQVSGQGDSLHEHIANLAGSPAIKKGILQTVKVVDELVKVMGRHKPENIVIEMARENQTTQKGQKNSRERMKRIEEGIKELGSQILKEHPVENTQLQNEKLYLYYLQNGRDMYVDQELDINRLSDYDVDHIVPQSFLKDDSIDNKVLTRSDKARGKSDNVPSEEVVKKMKNYWRQLLNAKLITQRKFDNLTKAERGGLSELDKAGFIKRQLVETRQITKHVAQILDSRMNTKYDENDKLIREVKVITLKSKLVSDFRKDFQFYKVREINNYHHAHDAYLNAVVGTALIKKYPKLESEFVYGDYKVYDVRKMIAKSEQEIGKATAKYFFYSNIMNFFKTEITLANGEIRKRPLIETNGETGEIVWDKGRDFATVRKVLSMPQVNIVKKTEVQTGGFSKESILPKRNSDKLIARKKDWDPKKYGGFDSPTVAYSVLVVAKVEKGKSKKLKSVKELLGITIMERSSFEKNPIDFLEAKGYKEVKKDLIIKLPKYSLFELENGRKRMLASAGELQKGNELALPSKYVNFLYLASHYEKLKGSPEDNEQKQLFVEQHKHYLDEIIEQISEFSKRVILADANLDKVLSAYNKHRDKPIREQAENIIHLFTLTNLGAPAAFKYFDTTIDRKRYTSTKEVLDATLIHQSITGLYETRIDLSQLGGDGGEAAAKEAAAKEAAAKEAAAKEAAAKGGTLNIEDEYRLHETSKGPDVPLGSTWLSDFPQAWAETGGMGLAVRQAPLIIPLKATSTPVSIKQYPMSQEARLGIKPHIQRLLDQGILVPCQSPWNTPLLPVKKPGTNDYRPVQDLREVNKRVEDIHPTVPNPYNLLSGLPPSHQWYTVLDLKDAFFCLRLHPTSQSLFAFEWRDPEMGISGQLTWTRLPQGFKNSPTLFNEALHRDLADFRIQHPDLILLQYVDDLLLAATSELDCQQGTRALLQTLGDLGYRASAKKAQICQKQVKYLGYLLKEGQRWLTEARKETVMGQPTPKTPRQLREFLGTAGFCRLWIPGFAEMAAPLYPLTKPGTLFEWGPDQQKAYQEIKQALLTAPALGLPDLTKPFELFVDEKQGYAKGVLTQKLGPWRRPVAYLSKKLDPVAAGWPPCLRMVAAIAVLTKDAGKLTMGQPLVILAPHAVEALVKQPPDRWLSNARMTHYQALLLDTDRVQFGPIVALNPATLLPLPEEGLQHDCLDILAEAHGTRPDLTDQPLPDADHTWYTDGSSFLQEGQRKAGAAVTTETEVVWAKALPAGTSAQRAELIALTQALKMAEGKKLNVYTDSRYAFATAHIHGEIYRRRGWLTSEGKEIKNKDEILALLKALFLPKRLSIIHCPGHQKGNRAEARGNRMADQAAREVATRETPETSTLLAGKRTADGSEFEKRTADGSEFESPKKKAKVE

SEQ ID NO: 2455 - protein, 2115 aa, synthetic construct
  source 1..2115: note = Description of Artificial Sequence: Synthetic polypeptide
MPAAKRVKLDGGDKKYSIGLDIGTNSVGWAVITDEYKVPSKKFKVLGNTDRHSIKKNLIGALLFDSGETAEATRLKRTARRRYTRRKNRICYLQEIFSNEMAKVDDSFFHRLEESFLVEEDKKHERHPIFGNIVDEVAYHEKYPTIYHLRKKLVDSTDKADLRLIYLALAHMIKFRGHFLIEGDLNPDNSDVDKLFIQLVQTYNQLFEENPINASGVDAKAILSARLSKSRRLENLIAQLPGEKKNGLFGNLIALSLGLTPNFKSNFDLAEDAKLQLSKDTYDDDLDNLLAQIGDQYADLFLAAKNLSDAILLSDILRVNTEITKAPLSASMIKRYDEHHQDLTLLKALVRQQLPEKYKEIFFDQSKNGYAGYIDGGASQEEFYKFIKPILEKMDGTEELLVKLNREDLLRKQRTFDNGSIPHQIHLGELHAILRRQEDFYPFLKDNREKIEKILTFRIPYYVGPLARGNSRFAWMTRKSEETITPWNFEEVVDKGASAQSFIERMTNFDKNLPNEKVLPKHSLLYEYFTVYNELTKVKYVTEGMRKPAFLSGEQKKAIVDLLFKTNRKVTVKQLKEDYFKKIECFDSVEISGVEDRFNASLGTYHDLLKIIKDKDFLDNEENEDILEDIVLTLTLFEDREMIEERLKTYAHLFDDKVMKQLKRRRYTGWGRLSRKLINGIRDKQSGKTILDFLKSDGFANRNFMQLIHDDSLTFKEDIQKAQVSGQGDSLHEHIANLAGSPAIKKGILQTVKVVDELVKVMGRHKPENIVIEMARENQTTQKGQKNSRERMKRIEEGIKELGSQILKEHPVENTQLQNEKLYLYYLQNGRDMYVDQELDINRLSDYDVDHIVPQSFLKDDSIDNKVLTRSDKARGKSDNVPSEEVVKKMKNYWRQLLNAKLITQRKFDNLTKAERGGLSELDKAGFIKRQLVETRQITKHVAQILDSRMNTKYDENDKLIREVKVITLKSKLVSDFRKDFQFYKVREINNYHHAHDAYLNAVVGTALIKKYPKLESEFVYGDYKVYDVRKMIAKSEQEIGKATAKYFFYSNIMNFFKTEITLANGEIRKRPLIETNGETGEIVWDKGRDFATVRKVLSMPQVNIVKKTEVQTGGFSKESILPKRNSDKLIARKKDWDPKKYGGFDSPTVAYSVLVVAKVEKGKSKKLKSVKELLGITIMERSSFEKNPIDFLEAKGYKEVKKDLIIKLPKYSLFELENGRKRMLASAGELQKGNELALPSKYVNFLYLASHYEKLKGSPEDNEQKQLFVEQHKHYLDEIIEQISEFSKRVILADANLDKVLSAYNKHRDKPIREQAENIIHLFTLTNLGAPAAFKYFDTTIDRKRYTSTKEVLDATLIHQSITGLYETRIDLSQLGGDGGEAAAKEAAAKEAAAKEAAAKEAAAKEAAAKGGTLNIEDEYRLHETSKGPDVPLGSTWLSDFPQAWAETGGMGLAVRQAPLIIPLKATSTPVSIKQYPMSQEARLGIKPHIQRLLDQGILVPCQSPWNTPLLPVKKPGTNDYRPVQDLREVNKRVEDIHPTVPNPYNLLSGLPPSHQWYTVLDLKDAFFCLRLHPTSQSLFAFEWRDPEMGISGQLTWTRLPQGFKNSPTLFNEALHRDLADFRIQHPDLILLQYVDDLLLAATSELDCQQGTRALLQTLGDLGYRASAKKAQICQKQVKYLGYLLKEGQRWLTEARKETVMGQPTPKTPRQLREFLGTAGFCRLWIPGFAEMAAPLYPLTKPGTLFEWGPDQQKAYQEIKQALLTAPALGLPDLTKPFELFVDEKQGYAKGVLTQKLGPWRRPVAYLSKKLDPVAAGWPPCLRMVAAIAVLTKDAGKLTMGQPLVILAPHAVEALVKQPPDRWLSNARMTHYQALLLDTDRVQFGPIVALNPATLLPLPEEGLQHDCLDILAEAHGTRPDLTDQPLPDADHTWYTDGSSFLQEGQRKAGAAVTTETEVVWAKALPAGTSAQRAELIALTQALKMAEGKKLNVYTDSRYAFATAHIHGEIYRRRGWLTSEGKEIKNKDEILALLKALFLPKRLSIIHCPGHQKGNRAEARGNRMADQAAREVATRETPETSTLLAGKRTADGSEFEKRTADGSEFESPKKKAKVE

SEQ ID NO: 2456 - protein, 2093 aa, synthetic construct
  source 1..2093: note = Description of Artificial Sequence: Synthetic polypeptide
MPAAKRVKLDGGDKKYSIGLDIGTNSVGWAVITDEYKVPSKKFKVLGNTDRHSIKKNLIGALLFDSGETAEATRLKRTARRRYTRRKNRICYLQEIFSNEMAKVDDSFFHRLEESFLVEEDKKHERHPIFGNIVDEVAYHEKYPTIYHLRKKLVDSTDKADLRLIYLALAHMIKFRGHFLIEGDLNPDNSDVDKLFIQLVQTYNQLFEENPINASGVDAKAILSARLSKSRRLENLIAQLPGEKKNGLFGNLIALSLGLTPNFKSNFDLAEDAKLQLSKDTYDDDLDNLLAQIGDQYADLFLAAKNLSDAILLSDILRVNTEITKAPLSASMIKRYDEHHQDLTLLKALVRQQLPEKYKEIFFDQSKNGYAGYIDGGASQEEFYKFIKPILEKMDGTEELLVKLNREDLLRKQRTFDNGSIPHQIHLGELHAILRRQEDFYPFLKDNREKIEKILTFRIPYYVGPLARGNSRFAWMTRKSEETITPWNFEEVVDKGASAQSFIERMTNFDKNLPNEKVLPKHSLLYEYFTVYNELTKVKYVTEGMRKPAFLSGEQKKAIVDLLFKTNRKVTVKQLKEDYFKKIECFDSVEISGVEDRFNASLGTYHDLLKIIKDKDFLDNEENEDILEDIVLTLTLFEDREMIEERLKTYAHLFDDKVMKQLKRRRYTGWGRLSRKLINGIRDKQSGKTILDFLKSDGFANRNFMQLIHDDSLTFKEDIQKAQVSGQGDSLHEHIANLAGSPAIKKGILQTVKVVDELVKVMGRHKPENIVIEMARENQTTQKGQKNSRERMKRIEEGIKELGSQILKEHPVENTQLQNEKLYLYYLQNGRDMYVDQELDINRLSDYDVDHIVPQSFLKDDSIDNKVLTRSDKARGKSDNVPSEEVVKKMKNYWRQLLNAKLITQRKFDNLTKAERGGLSELDKAGFIKRQLVETRQITKHVAQILDSRMNTKYDENDKLIREVKVITLKSKLVSDFRKDFQFYKVREINNYHHAHDAYLNAVVGTALIKKYPKLESEFVYGDYKVYDVRKMIAKSEQEIGKATAKYFFYSNIMNFFKTEITLANGEIRKRPLIETNGETGEIVWDKGRDFATVRKVLSMPQVNIVKKTEVQTGGFSKESILPKRNSDKLIARKKDWDPKKYGGFDSPTVAYSVLVVAKVEKGKSKKLKSVKELLGITIMERSSFEKNPIDFLEAKGYKEVKKDLIIKLPKYSLFELENGRKRMLASAGELQKGNELALPSKYVNFLYLASHYEKLKGSPEDNEQKQLFVEQHKHYLDEIIEQISEFSKRVILADANLDKVLSAYNKHRDKPIREQAENIIHLFTLTNLGAPAAFKYFDTTIDRKRYTSTKEVLDATLIHQSITGLYETRIDLSQLGGDGGEAAAKGGSGGTLNIEDEYRLHETSKGPDVPLGSTWLSDFPQAWAETGGMGLAVRQAPLIIPLKATSTPVSIKQYPMSQEARLGIKPHIQRLLDQGILVPCQSPWNTPLLPVKKPGTNDYRPVQDLREVNKRVEDIHPTVPNPYNLLSGLPPSHQWYTVLDLKDAFFCLRLHPTSQSLFAFEWRDPEMGISGQLTWTRLPQGFKNSPTLFNEALHRDLADFRIQHPDLILLQYVDDLLLAATSELDCQQGTRALLQTLGDLGYRASAKKAQICQKQVKYLGYLLKEGQRWLTEARKETVMGQPTPKTPRQLREFLGTAGFCRLWIPGFAEMAAPLYPLTKPGTLFEWGPDQQKAYQEIKQALLTAPALGLPDLTKPFELFVDEKQGYAKGVLTQKLGPWRRPVAYLSKKLDPVAAGWPPCLRMVAAIAVLTKDAGKLTMGQPLVILAPHAVEALVKQPPDRWLSNARMTHYQALLLDTDRVQFGPIVALNPATLLPLPEEGLQHDCLDILAEAHGTRPDLTDQPLPDADHTWYTDGSSFLQEGQRKAGAAVTTETEVVWAKALPAGTSAQRAELIALTQALKMAEGKKLNVYTDSRYAFATAHIHGEIYRRRGWLTSEGKEIKNKDEILALLKALFLPKRLSIIHCPGHQKGNRAEARGNRMADQAAREVATRETPETSTLLAGKRTADGSEFEKRTADGSEFESPKKKAKVE

SEQ ID NO: 2457 - protein, 2096 aa, synthetic construct
  source 1..2096: note = Description of Artificial Sequence: Synthetic polypeptide
MPAAKRVKLDGGDKKYSIGLDIGTNSVGWAVITDEYKVPSKKFKVLGNTDRHSIKKNLIGALLFDSGETAEATRLKRTARRRYTRRKNRICYLQEIFSNEMAKVDDSFFHRLEESFLVEEDKKHERHPIFGNIVDEVAYHEKYPTIYHLRKKLVDSTDKADLRLIYLALAHMIKFRGHFLIEGDLNPDNSDVDKLFIQLVQTYNQLFEENPINASGVDAKAILSARLSKSRRLENLIAQLPGEKKNGLFGNLIALSLGLTPNFKSNFDLAEDAKLQLSKDTYDDDLDNLLAQIGDQYADLFLAAKNLSDAILLSDILRVNTEITKAPLSASMIKRYDEHHQDLTLLKALVRQQLPEKYKEIFFDQSKNGYAGYIDGGASQEEFYKFIKPILEKMDGTEELLVKLNREDLLRKQRTFDNGSIPHQIHLGELHAILRRQEDFYPFLKDNREKIEKILTFRIPYYVGPLARGNSRFAWMTRKSEETITPWNFEEVVDKGASAQSFIERMTNFDKNLPNEKVLPKHSLLYEYFTVYNELTKVKYVTEGMRKPAFLSGEQKKAIVDLLFKTNRKVTVKQLKEDYFKKIECFDSVEISGVEDRFNASLGTYHDLLKIIKDKDFLDNEENEDILEDIVLTLTLFEDREMIEERLKTYAHLFDDKVMKQLKRRRYTGWGRLSRKLINGIRDKQSGKTILDFLKSDGFANRNFMQLIHDDSLTFKEDIQKAQVSGQGDSLHEHIANLAGSPAIKKGILQTVKVVDELVKVMGRHKPENIVIEMARENQTTQKGQKNSRERMKRIEEGIKELGSQILKEHPVENTQLQNEKLYLYYLQNGRDMYVDQELDINRLSDYDVDHIVPQSFLKDDSIDNKVLTRSDKARGKSDNVPSEEVVKKMKNYWRQLLNAKLITQRKFDNLTKAERGGLSELDKAGFIKRQLVETRQITKHVAQILDSRMNTKYDENDKLIREVKVITLKSKLVSDFRKDFQFYKVREINNYHHAHDAYLNAVVGTALIKKYPKLESEFVYGDYKVYDVRKMIAKSEQEIGKATAKYFFYSNIMNFFKTEITLANGEIRKRPLIETNGETGEIVWDKGRDFATVRKVLSMPQVNIVKKTEVQTGGFSKESILPKRNSDKLIARKKDWDPKKYGGFDSPTVAYSVLVVAKVEKGKSKKLKSVKELLGITIMERSSFEKNPIDFLEAKGYKEVKKDLIIKLPKYSLFELENGRKRMLASAGELQKGNELALPSKYVNFLYLASHYEKLKGSPEDNEQKQLFVEQHKHYLDEIIEQISEFSKRVILADANLDKVLSAYNKHRDKPIREQAENIIHLFTLTNLGAPAAFKYFDTTIDRKRYTSTKEVLDATLIHQSITGLYETRIDLSQLGGDGGEAAAKGGGPAPGGTLNIEDEYRLHETSKGPDVPLGSTWLSDFPQAWAETGGMGLAVRQAPLIIPLKATSTPVSIKQYPMSQEARLGIKPHIQRLLDQGILVPCQSPWNTPLLPVKKPGTNDYRPVQDLREVNKRVEDIHPTVPNPYNLLSGLPPSHQWYTVLDLKDAFFCLRLHPTSQSLFAFEWRDPEMGISGQLTWTRLPQGFKNSPTLFNEALHRDLADFRIQHPDLILLQYVDDLLLAATSELDCQQGTRALLQTLGDLGYRASAKKAQICQKQVKYLGYLLKEGQRWLTEARKETVMGQPTPKTPRQLREFLGTAGFCRLWIPGFAEMAAPLYPLTKPGTLFEWGPDQQKAYQEIKQALLTAPALGLPDLTKPFELFVDEKQGYAKGVLTQKLGPWRRPVAYLSKKLDPVAAGWPPCLRMVAAIAVLTKDAGKLTMGQPLVILAPHAVEALVKQPPDRWLSNARMTHYQALLLDTDRVQFGPIVALNPATLLPLPEEGLQHDCLDILAEAHGTRPDLTDQPLPDADHTWYTDGSSFLQEGQRKAGAAVTTETEVVWAKALPAGTSAQRAELIALTQALKMAEGKKLNVYTDSRYAFATAHIHGEIYRRRGWLTSEGKEIKNKDEILALLKALFLPKRLSIIHCPGHQKGNRAEARGNRMADQAAREVATRETPETSTLLAGKRTADGSEFEKRTADGSEFESPKKKAKVE

SEQ ID NO: 2458 - protein, 2096 aa, synthetic construct
  source 1..2096: note = Description of Artificial Sequence: Synthetic polypeptide
MPAAKRVKLDGGDKKYSIGLDIGTNSVGWAVITDEYKVPSKKFKVLGNTDRHSIKKNLIGALLFDSGETAEATRLKRTARRRYTRRKNRICYLQEIFSNEMAKVDDSFFHRLEESFLVEEDKKHERHPIFGNIVDEVAYHEKYPTIYHLRKKLVDSTDKADLRLIYLALAHMIKFRGHFLIEGDLNPDNSDVDKLFIQLVQTYNQLFEENPINASGVDAKAILSARLSKSRRLENLIAQLPGEKKNGLFGNLIALSLGLTPNFKSNFDLAEDAKLQLSKDTYDDDLDNLLAQIGDQYADLFLAAKNLSDAILLSDILRVNTEITKAPLSASMIKRYDEHHQDLTLLKALVRQQLPEKYKEIFFDQSKNGYAGYIDGGASQEEFYKFIKPILEKMDGTEELLVKLNREDLLRKQRTFDNGSIPHQIHLGELHAILRRQEDFYPFLKDNREKIEKILTFRIPYYVGPLARGNSRFAWMTRKSEETITPWNFEEVVDKGASAQSFIERMTNFDKNLPNEKVLPKHSLLYEYFTVYNELTKVKYVTEGMRKPAFLSGEQKKAIVDLLFKTNRKVTVKQLKEDYFKKIECFDSVEISGVEDRFNASLGTYHDLLKIIKDKDFLDNEENEDILEDIVLTLTLFEDREMIEERLKTYAHLFDDKVMKQLKRRRYTGWGRLSRKLINGIRDKQSGKTILDFLKSDGFANRNFMQLIHDDSLTFKEDIQKAQVSGQGDSLHEHIANLAGSPAIKKGILQTVKVVDELVKVMGRHKPENIVIEMARENQTTQKGQKNSRERMKRIEEGIKELGSQILKEHPVENTQLQNEKLYLYYLQNGRDMYVDQELDINRLSDYDVDHIVPQSFLKDDSIDNKVLTRSDKARGKSDNVPSEEVVKKMKNYWRQLLNAKLITQRKFDNLTKAERGGLSELDKAGFIKRQLVETRQITKHVAQILDSRMNTKYDENDKLIREVKVITLKSKLVSDFRKDFQFYKVREINNYHHAHDAYLNAVVGTALIKKYPKLESEFVYGDYKVYDVRKMIAKSEQEIGKATAKYFFYSNIMNFFKTEITLANGEIRKRPLIETNGETGEIVWDKGRDFATVRKVLSMPQVNIVKKTEVQTGGFSKESILPKRNSDKLIARKKDWDPKKYGGFDSPTVAYSVLVVAKVEKGKSKKLKSVKELLGITIMERSSFEKNPIDFLEAKGYKEVKKDLIIKLPKYSLFELENGRKRMLASAGELQKGNELALPSKYVNFLYLASHYEKLKGSPEDNEQKQLFVEQHKHYLDEIIEQISEFSKRVILADANLDKVLSAYNKHRDKPIREQAENIIHLFTLTNLGAPAAFKYFDTTIDRKRYTSTKEVLDATLIHQSITGLYETRIDLSQLGGDGGGSSEAAAKGGGGGTLNIEDEYRLHETSKGPDVPLGSTWLSDFPQAWAETGGMGLAVRQAPLIIPLKATSTPVSIKQYPMSQEARLGIKPHIQRLLDQGILVPCQSPWNTPLLPVKKPGTNDYRPVQDLREVNKRVEDIHPTVPNPYNLLSGLPPSHQWYTVLDLKDAFFCLRLHPTSQSLFAFEWRDPEMGISGQLTWTRLPQGFKNSPTLFNEALHRDLADFRIQHPDLILLQYVDDLLLAATSELDCQQGTRALLQTLGDLGYRASAKKAQICQKQVKYLGYLLKEGQRWLTEARKETVMGQPTPKTPRQLREFLGTAGFCRLWIPGFAEMAAPLYPLTKPGTLFEWGPDQQKAYQEIKQALLTAPALGLPDLTKPFELFVDEKQGYAKGVLTQKLGPWRRPVAYLSKKLDPVAAGWPPCLRMVAAIAVLTKDAGKLTMGQPLVILAPHAVEALVKQPPDRWLSNARMTHYQALLLDTDRVQFGPIVALNPATLLPLPEEGLQHDCLDILAEAHGTRPDLTDQPLPDADHTWYTDGSSFLQEGQRKAGAAVTTETEVVWAKALPAGTSAQRAELIALTQALKMAEGKKLNVYTDSRYAFATAHIHGEIYRRRGWLTSEGKEIKNKDEILALLKALFLPKRLSIIHCPGHQKGNRAEARGNRMADQAAREVATRETPETSTLLAGKRTADGSEFEKRTADGSEFESPKKKAKVE

SEQ ID NO: 2459 - protein, 2096 aa, synthetic construct
  source 1..2096: note = Description of Artificial Sequence: Synthetic polypeptide
MPAAKRVKLDGGDKKYSIGLDIGTNSVGWAVITDEYKVPSKKFKVLGNTDRHSIKKNLIGALLFDSGETAEATRLKRTARRRYTRRKNRICYLQEIFSNEMAKVDDSFFHRLEESFLVEEDKKHERHPIFGNIVDEVAYHEKYPTIYHLRKKLVDSTDKADLRLIYLALAHMIKFRGHFLIEGDLNPDNSDVDKLFIQLVQTYNQLFEENPINASGVDAKAILSARLSKSRRLENLIAQLPGEKKNGLFGNLIALSLGLTPNFKSNFDLAEDAKLQLSKDTYDDDLDNLLAQIGDQYADLFLAAKNLSDAILLSDILRVNTEITKAPLSASMIKRYDEHHQDLTLLKALVRQQLPEKYKEIFFDQSKNGYAGYIDGGASQEEFYKFIKPILEKMDGTEELLVKLNREDLLRKQRTFDNGSIPHQIHLGELHAILRRQEDFYPFLKDNREKIEKILTFRIPYYVGPLARGNSRFAWMTRKSEETITPWNFEEVVDKGASAQSFIERMTNFDKNLPNEKVLPKHSLLYEYFTVYNELTKVKYVTEGMRKPAFLSGEQKKAIVDLLFKTNRKVTVKQLKEDYFKKIECFDSVEISGVEDRFNASLGTYHDLLKIIKDKDFLDNEENEDILEDIVLTLTLFEDREMIEERLKTYAHLFDDKVMKQLKRRRYTGWGRLSRKLINGIRDKQSGKTILDFLKSDGFANRNFMQLIHDDSLTFKEDIQKAQVSGQGDSLHEHIANLAGSPAIKKGILQTVKVVDELVKVMGRHKPENIVIEMARENQTTQKGQKNSRERMKRIEEGIKELGSQILKEHPVENTQLQNEKLYLYYLQNGRDMYVDQELDINRLSDYDVDHIVPQSFLKDDSIDNKVLTRSDKARGKSDNVPSEEVVKKMKNYWRQLLNAKLITQRKFDNLTKAERGGLSELDKAGFIKRQLVETRQITKHVAQILDSRMNTKYDENDKLIREVKVITLKSKLVSDFRKDFQFYKVREINNYHHAHDAYLNAVVGTALIKKYPKLESEFVYGDYKVYDVRKMIAKSEQEIGKATAKYFFYSNIMNFFKTEITLANGEIRKRPLIETNGETGEIVWDKGRDFATVRKVLSMPQVNIVKKTEVQTGGFSKESILPKRNSDKLIARKKDWDPKKYGGFDSPTVAYSVLVVAKVEKGKSKKLKSVKELLGITIMERSSFEKNPIDFLEAKGYKEVKKDLIIKLPKYSLFELENGRKRMLASAGELQKGNELALPSKYVNFLYLASHYEKLKGSPEDNEQKQLFVEQHKHYLDEIIEQISEFSKRVILADANLDKVLSAYNKHRDKPIREQAENIIHLFTLTNLGAPAAFKYFDTTIDRKRYTSTKEVLDATLIHQSITGLYETRIDLSQLGGDGGGGSGGGEAAAKGGTLNIEDEYRLHETSKGPDVPLGSTWLSDFPQAWAETGGMGLAVRQAPLIIPLKATSTPVSIKQYPMSQEARLGIKPHIQRLLDQGILVPCQSPWNTPLLPVKKPGTNDYRPVQDLREVNKRVEDIHPTVPNPYNLLSGLPPSHQWYTVLDLKDAFFCLRLHPTSQSLFAFEWRDPEMGISGQLTWTRLPQGFKNSPTLFNEALHRDLADFRIQHPDLILLQYVDDLLLAATSELDCQQGTRALLQTLGDLGYRASAKKAQICQKQVKYLGYLLKEGQRWLTEARKETVMGQPTPKTPRQLREFLGTAGFCRLWIPGFAEMAAPLYPLTKPGTLFEWGPDQQKAYQEIKQALLTAPALGLPDLTKPFELFVDEKQGYAKGVLTQKLGPWRRPVAYLSKKLDPVAAGWPPCLRMVAAIAVLTKDAGKLTMGQPLVILAPHAVEALVKQPPDRWLSNARMTHYQALLLDTDRVQFGPIVALNPATLLPLPEEGLQHDCLDILAEAHGTRPDLTDQPLPDADHTWYTDGSSFLQEGQRKAGAAVTTETEVVWAKALPAGTSAQRAELIALTQALKMAEGKKLNVYTDSRYAFATAHIHGEIYRRRGWLTSEGKEIKNKDEILALLKALFLPKRLSIIHCPGHQKGNRAEARGNRMADQAAREVATRETPETSTLLAGKRTADGSEFEKRTADGSEFESPKKKAKVE

SEQ ID NO: 2460 - protein, 2096 aa, synthetic construct
  source 1..2096: note = Description of Artificial Sequence: Synthetic polypeptide
MPAAKRVKLDGGDKKYSIGLDIGTNSVGWAVITDEYKVPSKKFKVLGNTDRHSIKKNLIGALLFDSGETAEATRLKRTARRRYTRRKNRICYLQEIFSNEMAKVDDSFFHRLEESFLVEEDKKHERHPIFGNIVDEVAYHEKYPTIYHLRKKLVDSTDKADLRLIYLALAHMIKFRGHFLIEGDLNPDNSDVDKLFIQLVQTYNQLFEENPINASGVDAKAILSARLSKSRRLENLIAQLPGEKKNGLFGNLIALSLGLTPNFKSNFDLAEDAKLQLSKDTYDDDLDNLLAQIGDQYADLFLAAKNLSDAILLSDILRVNTEITKAPLSASMIKRYDEHHQDLTLLKALVRQQLPEKYKEIFFDQSKNGYAGYIDGGASQEEFYKFIKPILEKMDGTEELLVKLNREDLLRKQRTFDNGSIPHQIHLGELHAILRRQEDFYPFLKDNREKIEKILTFRIPYYVGPLARGNSRFAWMTRKSEETITPWNFEEVVDKGASAQSFIERMTNFDKNLPNEKVLPKHSLLYEYFTVYNELTKVKYVTEGMRKPAFLSGEQKKAIVDLLFKTNRKVTVKQLKEDYFKKIECFDSVEISGVEDRFNASLGTYHDLLKIIKDKDFLDNEENEDILEDIVLTLTLFEDREMIEERLKTYAHLFDDKVMKQLKRRRYTGWGRLSRKLINGIRDKQSGKTILDFLKSDGFANRNFMQLIHDDSLTFKEDIQKAQVSGQGDSLHEHIANLAGSPAIKKGILQTVKVVDELVKVMGRHKPENIVIEMARENQTTQKGQKNSRERMKRIEEGIKELGSQILKEHPVENTQLQNEKLYLYYLQNGRDMYVDQELDINRLSDYDVDHIVPQSFLKDDSIDNKVLTRSDKARGKSDNVPSEEVVKKMKNYWRQLLNAKLITQRKFDNLTKAERGGLSELDKAGFIKRQLVETRQITKHVAQILDSRMNTKYDENDKLIREVKVITLKSKLVSDFRKDFQFYKVREINNYHHAHDAYLNAVVGTALIKKYPKLESEFVYGDYKVYDVRKMIAKSEQEIGKATAKYFFYSNIMNFFKTEITLANGEIRKRPLIETNGETGEIVWDKGRDFATVRKVLSMPQVNIVKKTEVQTGGFSKESILPKRNSDKLIARKKDWDPKKYGGFDSPTVAYSVLVVAKVEKGKSKKLKSVKELLGITIMERSSFEKNPIDFLEAKGYKEVKKDLIIKLPKYSLFELENGRKRMLASAGELQKGNELALPSKYVNFLYLASHYEKLKGSPEDNEQKQLFVEQHKHYLDEIIEQISEFSKRVILADANLDKVLSAYNKHRDKPIREQAENIIHLFTLTNLGAPAAFKYFDTTIDRKRYTSTKEVLDATLIHQSITGLYETRIDLSQLGGDGGEAAAKGGSGSSGGTLNIEDEYRLHETSKGPDVPLGSTWLSDFPQAWAETGGMGLAVRQAPLIIPLKATSTPVSIKQYPMSQEARLGIKPHIQRLLDQGILVPCQSPWNTPLLPVKKPGTNDYRPVQDLREVNKRVEDIHPTVPNPYNLLSGLPPSHQWYTVLDLKDAFFCLRLHPTSQSLFAFEWRDPEMGISGQLTWTRLPQGFKNSPTLFNEALHRDLADFRIQHPDLILLQYVDDLLLAATSELDCQQGTRALLQTLGDLGYRASAKKAQICQKQVKYLGYLLKEGQRWLTEARKETVMGQPTPKTPRQLREFLGTAGFCRLWIPGFAEMAAPLYPLTKPGTLFEWGPDQQKAYQEIKQALLTAPALGLPDLTKPFELFVDEKQGYAKGVLTQKLGPWRRPVAYLSKKLDPVAAGWPPCLRMVAAIAVLTKDAGKLTMGQPLVILAPHAVEALVKQPPDRWLSNARMTHYQALLLDTDRVQFGPIVALNPATLLPLPEEGLQHDCLDILAEAHGTRPDLTDQPLPDADHTWYTDGSSFLQEGQRKAGAAVTTETEVVWAKALPAGTSAQRAELIALTQALKMAEGKKLNVYTDSRYAFATAHIHGEIYRRRGWLTSEGKEIKNKDEILALLKALFLPKRLSIIHCPGHQKGNRAEARGNRMADQAAREVATRETPETSTLLAGKRTADGSEFEKRTADGSEFESPKKKAKVE

SEQ ID NO: 2461 - protein, 2096 aa, synthetic construct
  source 1..2096: note = Description of Artificial Sequence: Synthetic polypeptide
MPAAKRVKLDGGDKKYSIGLDIGTNSVGWAVITDEYKVPSKKFKVLGNTDRHSIKKNLIGALLFDSGETAEATRLKRTARRRYTRRKNRICYLQEIFSNEMAKVDDSFFHRLEESFLVEEDKKHERHPIFGNIVDEVAYHEKYPTIYHLRKKLVDSTDKADLRLIYLALAHMIKFRGHFLIEGDLNPDNSDVDKLFIQLVQTYNQLFEENPINASGVDAKAILSARLSKSRRLENLIAQLPGEKKNGLFGNLIALSLGLTPNFKSNFDLAEDAKLQLSKDTYDDDLDNLLAQIGDQYADLFLAAKNLSDAILLSDILRVNTEITKAPLSASMIKRYDEHHQDLTLLKALVRQQLPEKYKEIFFDQSKNGYAGYIDGGASQEEFYKFIKPILEKMDGTEELLVKLNREDLLRKQRTFDNGSIPHQIHLGELHAILRRQEDFYPFLKDNREKIEKILTFRIPYYVGPLARGNSRFAWMTRKSEETITPWNFEEVVDKGASAQSFIERMTNFDKNLPNEKVLPKHSLLYEYFTVYNELTKVKYVTEGMRKPAFLSGEQKKAIVDLLFKTNRKVTVKQLKEDYFKKIECFDSVEISGVEDRFNASLGTYHDLLKIIKDKDFLDNEENEDILEDIVLTLTLFEDREMIEERLKTYAHLFDDKVMKQLKRRRYTGWGRLSRKLINGIRDKQSGKTILDFLKSDGFANRNFMQLIHDDSLTFKEDIQKAQVSGQGDSLHEHIANLAGSPAIKKGILQTVKVVDELVKVMGRHKPENIVIEMARENQTTQKGQKNSRERMKRIEEGIKELGSQILKEHPVENTQLQNEKLYLYYLQNGRDMYVDQELDINRLSDYDVDHIVPQSFLKDDSIDNKVLTRSDKARGKSDNVPSEEVVKKMKNYWRQLLNAKLITQRKFDNLTKAERGGLSELDKAGFIKRQLVETRQITKHVAQILDSRMNTKYDENDKLIREVKVITLKSKLVSDFRKDFQFYKVREINNYHHAHDAYLNAVVGTALIKKYPKLESEFVYGDYKVYDVRKMIAKSEQEIGKATAKYFFYSNIMNFFKTEITLANGEIRKRPLIETNGETGEIVWDKGRDFATVRKVLSMPQVNIVKKTEVQTGGFSKESILPKRNSDKLIARKKDWDPKKYGGFDSPTVAYSVLVVAKVEKGKSKKLKSVKELLGITIMERSSFEKNPIDFLEAKGYKEVKKDLIIKLPKYSLFELENGRKRMLASAGELQKGNELALPSKYVNFLYLASHYEKLKGSPEDNEQKQLFVEQHKHYLDEIIEQISEFSKRVILADANLDKVLSAYNKHRDKPIREQAENIIHLFTLTNLGAPAAFKYFDTTIDRKRYTSTKEVLDATLIHQSITGLYETRIDLSQLGGDGGGGGGSSEAAAKGGTLNIEDEYRLHETSKGPDVPLGSTWLSDFPQAWAETGGMGLAVRQAPLIIPLKATSTPVSIKQYPMSQEARLGIKPHIQRLLDQGILVPCQSPWNTPLLPVKKPGTNDYRPVQDLREVNKRVEDIHPTVPNPYNLLSGLPPSHQWYTVLDLKDAFFCLRLHPTSQSLFAFEWRDPEMGISGQLTWTRLPQGFKNSPTLFNEALHRDLADFRIQHPDLILLQYVDDLLLAATSELDCQQGTRALLQTLGDLGYRASAKKAQICQKQVKYLGYLLKEGQRWLTEARKETVMGQPTPKTPRQLREFLGTAGFCRLWIPGFAEMAAPLYPLTKPGTLFEWGPDQQKAYQEIKQALLTAPALGLPDLTKPFELFVDEKQGYAKGVLTQKLGPWRRPVAYLSKKLDPVAAGWPPCLRMVAAIAVLTKDAGKLTMGQPLVILAPHAVEALVKQPPDRWLSNARMTHYQALLLDTDRVQFGPIVALNPATLLPLPEEGLQHDCLDILAEAHGTRPDLTDQPLPDADHTWYTDGSSFLQEGQRKAGAAVTTETEVVWAKALPAGTSAQRAELIALTQALKMAEGKKLNVYTDSRYAFATAHIHGEIYRRRGWLTSEGKEIKNKDEILALLKALFLPKRLSIIHCPGHQKGNRAEARGNRMADQAAREVATRETPETSTLLAGKRTADGSEFEKRTADGSEFESPKKKAKVE

SEQ ID NO: 2462 - protein, 2096 aa, synthetic construct
  source 1..2096: note = Description of Artificial Sequence: Synthetic polypeptide
MPAAKRVKLDGGDKKYSIGLDIGTNSVGWAVITDEYKVPSKKFKVLGNTDRHSIKKNLIGALLFDSGETAEATRLKRTARRRYTRRKNRICYLQEIFSNEMAKVDDSFFHRLEESFLVEEDKKHERHPIFGNIVDEVAYHEKYPTIYHLRKKLVDSTDKADLRLIYLALAHMIKFRGHFLIEGDLNPDNSDVDKLFIQLVQTYNQLFEENPINASGVDAKAILSARLSKSRRLENLIAQLPGEKKNGLFGNLIALSLGLTPNFKSNFDLAEDAKLQLSKDTYDDDLDNLLAQIGDQYADLFLAAKNLSDAILLSDILRVNTEITKAPLSASMIKRYDEHHQDLTLLKALVRQQLPEKYKEIFFDQSKNGYAGYIDGGASQEEFYKFIKPILEKMDGTEELLVKLNREDLLRKQRTFDNGSIPHQIHLGELHAILRRQEDFYPFLKDNREKIEKILTFRIPYYVGPLARGNSRFAWMTRKSEETITPWNFEEVVDKGASAQSFIERMTNFDKNLPNEKVLPKHSLLYEYFTVYNELTKVKYVTEGMRKPAFLSGEQKKAIVDLLFKTNRKVTVKQLKEDYFKKIECFDSVEISGVEDRFNASLGTYHDLLKIIKDKDFLDNEENEDILEDIVLTLTLFEDREMIEERLKTYAHLFDDKVMKQLKRRRYTGWGRLSRKLINGIRDKQSGKTILDFLKSDGFANRNFMQLIHDDSLTFKEDIQKAQVSGQGDSLHEHIANLAGSPAIKKGILQTVKVVDELVKVMGRHKPENIVIEMARENQTTQKGQKNSRERMKRIEEGIKELGSQILKEHPVENTQLQNEKLYLYYLQNGRDMYVDQELDINRLSDYDVDHIVPQSFLKDDSIDNKVLTRSDKARGKSDNVPSEEVVKKMKNYWRQLLNAKLITQRKFDNLTKAERGGLSELDKAGFIKRQLVETRQITKHVAQILDSRMNTKYDENDKLIREVKVITLKSKLVSDFRKDFQFYKVREINNYHHAHDAYLNAVVGTALIKKYPKLESEFVYGDYKVYDVRKMIAKSEQEIGKATAKYFFYSNIMNFFKTEITLANGEIRKRPLIETNGETGEIVWDKGRDFATVRKVLSMPQVNIVKKTEVQTGGFSKESILPKRNSDKLIARKKDWDPKKYGGFDSPTVAYSVLVVAKVEKGKSKKLKSVKELLGITIMERSSFEKNPIDFLEAKGYKEVKKDLIIKLPKYSLFELENGRKRMLASAGELQKGNELALPSKYVNFLYLASHYEKLKGSPEDNEQKQLFVEQHKHYLDEIIEQISEFSKRVILADANLDKVLSAYNKHRDKPIREQAENIIHLFTLTNLGAPAAFKYFDTTIDRKRYTSTKEVLDATLIHQSITGLYETRIDLSQLGGDGGEAAAKGGGGSSGGTLNIEDEYRLHETSKGPDVPLGSTWLSDFPQAWAETGGMGLAVRQAPLIIPLKATSTPVSIKQYPMSQEARLGIKPHIQRLLDQGILVPCQSPWNTPLLPVKKPGTNDYRPVQDLREVNKRVEDIHPTVPNPYNLLSGLPPSHQWYTVLDLKDAFFCLRLHPTSQSLFAFEWRDPEMGISGQLTWTRLPQGFKNSPTLFNEALHRDLADFRIQHPDLILLQYVDDLLLAATSELDCQQGTRALLQTLGDLGYRASAKKAQICQKQVKYLGYLLKEGQRWLTEARKETVMGQPTPKTPRQLREFLGTAGFCRLWIPGFAEMAAPLYPLTKPGTLFEWGPDQQKAYQEIKQALLTAPALGLPDLTKPFELFVDEKQGYAKGVLTQKLGPWRRPVAYLSKKLDPVAAGWPPCLRMVAAIAVLTKDAGKLTMGQPLVILAPHAVEALVKQPPDRWLSNARMTHYQALLLDTDRVQFGPIVALNPATLLPLPEEGLQHDCLDILAEAHGTRPDLTDQPLPDADHTWYTDGSSFLQEGQRKAGAAVTTETEVVWAKALPAGTSAQRAELIALTQALKMAEGKKLNVYTDSRYAFATAHIHGEIYRRRGWLTSEGKEIKNKDEILALLKALFLPKRLSIIHCPGHQKGNRAEARGNRMADQAAREVATRETPETSTLLAGKRTADGSEFEKRTADGSEFESPKKKAKVE

SEQ ID NO: 2463 - protein, 2094 aa, synthetic construct
  source 1..2094: note = Description of Artificial Sequence: Synthetic polypeptide
MPAAKRVKLDGGDKKYSIGLDIGTNSVGWAVITDEYKVPSKKFKVLGNTDRHSIKKNLIGALLFDSGETAEATRLKRTARRRYTRRKNRICYLQEIFSNEMAKVDDSFFHRLEESFLVEEDKKHERHPIFGNIVDEVAYHEKYPTIYHLRKKLVDSTDKADLRLIYLALAHMIKFRGHFLIEGDLNPDNSDVDKLFIQLVQTYNQLFEENPINASGVDAKAILSARLSKSRRLENLIAQLPGEKKNGLFGNLIALSLGLTPNFKSNFDLAEDAKLQLSKDTYDDDLDNLLAQIGDQYADLFLAAKNLSDAILLSDILRVNTEITKAPLSASMIKRYDEHHQDLTLLKALVRQQLPEKYKEIFFDQSKNGYAGYIDGGASQEEFYKFIKPILEKMDGTEELLVKLNREDLLRKQRTFDNGSIPHQIHLGELHAILRRQEDFYPFLKDNREKIEKILTFRIPYYVGPLARGNSRFAWMTRKSEETITPWNFEEVVDKGASAQSFIERMTNFDKNLPNEKVLPKHSLLYEYFTVYNELTKVKYVTEGMRKPAFLSGEQKKAIVDLLFKTNRKVTVKQLKEDYFKKIECFDSVEISGVEDRFNASLGTYHDLLKIIKDKDFLDNEENEDILEDIVLTLTLFEDREMIEERLKTYAHLFDDKVMKQLKRRRYTGWGRLSRKLINGIRDKQSGKTILDFLKSDGFANRNFMQLIHDDSLTFKEDIQKAQVSGQGDSLHEHIANLAGSPAIKKGILQTVKVVDELVKVMGRHKPENIVIEMARENQTTQKGQKNSRERMKRIEEGIKELGSQILKEHPVENTQLQNEKLYLYYLQNGRDMYVDQELDINRLSDYDVDHIVPQSFLKDDSIDNKVLTRSDKARGKSDNVPSEEVVKKMKNYWRQLLNAKLITQRKFDNLTKAERGGLSELDKAGFIKRQLVETRQITKHVAQILDSRMNTKYDENDKLIREVKVITLKSKLVSDFRKDFQFYKVREINNYHHAHDAYLNAVVGTALIKKYPKLESEFVYGDYKVYDVRKMIAKSEQEIGKATAKYFFYSNIMNFFKTEITLANGEIRKRPLIETNGETGEIVWDKGRDFATVRKVLSMPQVNIVKKTEVQTGGFSKESILPKRNSDKLIARKKDWDPKKYGGFDSPTVAYSVLVVAKVEKGKSKKLKSVKELLGITIMERSSFEKNPIDFLEAKGYKEVKKDLIIKLPKYSLFELENGRKRMLASAGELQKGNELALPSKYVNFLYLASHYEKLKGSPEDNEQKQLFVEQHKHYLDEIIEQISEFSKRVILADANLDKVLSAYNKHRDKPIREQAENIIHLFTLTNLGAPAAFKYFDTTIDRKRYTSTKEVLDATLIHQSITGLYETRIDLSQLGGDGGGSSGGSGGGGGTLNIEDEYRLHETSKGPDVPLGSTWLSDFPQAWAETGGMGLAVRQAPLIIPLKATSTPVSIKQYPMSQEARLGIKPHIQRLLDQGILVPCQSPWNTPLLPVKKPGTNDYRPVQDLREVNKRVEDIHPTVPNPYNLLSGLPPSHQWYTVLDLKDAFFCLRLHPTSQSLFAFEWRDPEMGISGQLTWTRLPQGFKNSPTLFNEALHRDLADFRIQHPDLILLQYVDDLLLAATSELDCQQGTRALLQTLGDLGYRASAKKAQICQKQVKYLGYLLKEGQRWLTEARKETVMGQPTPKTPRQLREFLGTAGFCRLWIPGFAEMAAPLYPLTKPGTLFEWGPDQQKAYQEIKQALLTAPALGLPDLTKPFELFVDEKQGYAKGVLTQKLGPWRRPVAYLSKKLDPVAAGWPPCLRMVAAIAVLTKDAGKLTMGQPLVILAPHAVEALVKQPPDRWLSNARMTHYQALLLDTDRVQFGPIVALNPATLLPLPEEGLQHDCLDILAEAHGTRPDLTDQPLPDADHTWYTDGSSFLQEGQRKAGAAVTTETEVVWAKALPAGTSAQRAELIALTQALKMAEGKKLNVYTDSRYAFATAHIHGEIYRRRGWLTSEGKEIKNKDEILALLKALFLPKRLSIIHCPGHQKGNRAEARGNRMADQAAREVATRETPETSTLLAGKRTADGSEFEKRTADGSEFESPKKKAKVE

SEQ ID NO: 2464 - protein, 2105 aa, synthetic construct
  source 1..2105: note = Description of Artificial Sequence: Synthetic polypeptide
MPAAKRVKLDGGDKKYSIGLDIGTNSVGWAVITDEYKVPSKKFKVLGNTDRHSIKKNLIGALLFDSGETAEATRLKRTARRRYTRRKNRICYLQEIFSNEMAKVDDSFFHRLEESFLVEEDKKHERHPIFGNIVDEVAYHEKYPTIYHLRKKLVDSTDKADLRLIYLALAHMIKFRGHFLIEGDLNPDNSDVDKLFIQLVQTYNQLFEENPINASGVDAKAILSARLSKSRRLENLIAQLPGEKKNGLFGNLIALSLGLTPNFKSNFDLAEDAKLQLSKDTYDDDLDNLLAQIGDQYADLFLAAKNLSDAILLSDILRVNTEITKAPLSASMIKRYDEHHQDLTLLKALVRQQLPEKYKEIFFDQSKNGYAGYIDGGASQEEFYKFIKPILEKMDGTEELLVKLNREDLLRKQRTFDNGSIPHQIHLGELHAILRRQEDFYPFLKDNREKIEKILTFRIPYYVGPLARGNSRFAWMTRKSEETITPWNFEEVVDKGASAQSFIERMTNFDKNLPNEKVLPKHSLLYEYFTVYNELTKVKYVTEGMRKPAFLSGEQKKAIVDLLFKTNRKVTVKQLKEDYFKKIECFDSVEISGVEDRFNASLGTYHDLLKIIKDKDFLDNEENEDILEDIVLTLTLFEDREMIEERLKTYAHLFDDKVMKQLKRRRYTGWGRLSRKLINGIRDKQSGKTILDFLKSDGFANRNFMQLIHDDSLTFKEDIQKAQVSGQGDSLHEHIANLAGSPAIKKGILQTVKVVDELVKVMGRHKPENIVIEMARENQTTQKGQKNSRERMKRIEEGIKELGSQILKEHPVENTQLQNEKLYLYYLQNGRDMYVDQELDINRLSDYDVDHIVPQSFLKDDSIDNKVLTRSDKARGKSDNVPSEEVVKKMKNYWRQLLNAKLITQRKFDNLTKAERGGLSELDKAGFIKRQLVETRQITKHVAQILDSRMNTKYDENDKLIREVKVITLKSKLVSDFRKDFQFYKVREINNYHHAHDAYLNAVVGTALIKKYPKLESEFVYGDYKVYDVRKMIAKSEQEIGKATAKYFFYSNIMNFFKTEITLANGEIRKRPLIETNGETGEIVWDKGRDFATVRKVLSMPQVNIVKKTEVQTGGFSKESILPKRNSDKLIARKKDWDPKKYGGFDSPTVAYSVLVVAKVEKGKSKKLKSVKELLGITIMERSSFEKNPIDFLEAKGYKEVKKDLIIKLPKYSLFELENGRKRMLASAGELQKGNELALPSKYVNFLYLASHYEKLKGSPEDNEQKQLFVEQHKHYLDEIIEQISEFSKRVILADANLDKVLSAYNKHRDKPIREQAENIIHLFTLTNLGAPAAFKYFDTTIDRKRYTSTKEVLDATLIHQSITGLYETRIDLSQLGGDGGGGGGSGGGGSGGGGSGGGGSGGTLNIEDEYRLHETSKGPDVPLGSTWLSDFPQAWAETGGMGLAVRQAPLIIPLKATSTPVSIKQYPMSQEARLGIKPHIQRLLDQGILVPCQSPWNTPLLPVKKPGTNDYRPVQDLREVNKRVEDIHPTVPNPYNLLSGLPPSHQWYTVLDLKDAFFCLRLHPTSQSLFAFEWRDPEMGISGQLTWTRLPQGFKNSPTLFNEALHRDLADFRIQHPDLILLQYVDDLLLAATSELDCQQGTRALLQTLGDLGYRASAKKAQICQKQVKYLGYLLKEGQRWLTEARKETVMGQPTPKTPRQLREFLGTAGFCRLWIPGFAEMAAPLYPLTKPGTLFEWGPDQQKAYQEIKQALLTAPALGLPDLTKPFELFVDEKQGYAKGVLTQKLGPWRRPVAYLSKKLDPVAAGWPPCLRMVAAIAVLTKDAGKLTMGQPLVILAPHAVEALVKQPPDRWLSNARMTHYQALLLDTDRVQFGPIVALNPATLLPLPEEGLQHDCLDILAEAHGTRPDLTDQPLPDADHTWYTDGSSFLQEGQRKAGAAVTTETEVVWAKALPAGTSAQRAELIALTQALKMAEGKKLNVYTDSRYAFATAHIHGEIYRRRGWLTSEGKEIKNKDEILALLKALFLPKRLSIIHCPGHQKGNRAEARGNRMADQAAREVATRETPETSTLLAGKRTADGSEFEKRTADGSEFESPKKKAKVE

SEQ ID NO: 2465 - protein, 2100 aa, synthetic construct
  source 1..2100: note = Description of Artificial Sequence: Synthetic polypeptide
MPAAKRVKLDGGDKKYSIGLDIGTNSVGWAVITDEYKVPSKKFKVLGNTDRHSIKKNLIGALLFDSGETAEATRLKRTARRRYTRRKNRICYLQEIFSNEMAKVDDSFFHRLEESFLVEEDKKHERHPIFGNIVDEVAYHEKYPTIYHLRKKLVDSTDKADLRLIYLALAHMIKFRGHFLIEGDLNPDNSDVDKLFIQLVQTYNQLFEENPINASGVDAKAILSARLSKSRRLENLIAQLPGEKKNGLFGNLIALSLGLTPNFKSNFDLAEDAKLQLSKDTYDDDLDNLLAQIGDQYADLFLAAKNLSDAILLSDILRVNTEITKAPLSASMIKRYDEHHQDLTLLKALVRQQLPEKYKEIFFDQSKNGYAGYIDGGASQEEFYKFIKPILEKMDGTEELLVKLNREDLLRKQRTFDNGSIPHQIHLGELHAILRRQEDFYPFLKDNREKIEKILTFRIPYYVGPLARGNSRFAWMTRKSEETITPWNFEEVVDKGASAQSFIERMTNFDKNLPNEKVLPKHSLLYEYFTVYNELTKVKYVTEGMRKPAFLSGEQKKAIVDLLFKTNRKVTVKQLKEDYFKKIECFDSVEISGVEDRFNASLGTYHDLLKIIKDKDFLDNEENEDILEDIVLTLTLFEDREMIEERLKTYAHLFDDKVMKQLKRRRYTGWGRLSRKLINGIRDKQSGKTILDFLKSDGFANRNFMQLIHDDSLTFKEDIQKAQVSGQGDSLHEHIANLAGSPAIKKGILQTVKVVDELVKVMGRHKPENIVIEMARENQTTQKGQKNSRERMKRIEEGIKELGSQILKEHPVENTQLQNEKLYLYYLQNGRDMYVDQELDINRLSDYDVDHIVPQSFLKDDSIDNKVLTRSDKARGKSDNVPSEEVVKKMKNYWRQLLNAKLITQRKFDNLTKAERGGLSELDKAGFIKRQLVETRQITKHVAQILDSRMNTKYDENDKLIREVKVITLKSKLVSDFRKDFQFYKVREINNYHHAHDAYLNAVVGTALIKKYPKLESEFVYGDYKVYDVRKMIAKSEQEIGKATAKYFFYSNIMNFFKTEITLANGEIRKRPLIETNGETGEIVWDKGRDFATVRKVLSMPQVNIVKKTEVQTGGFSKESILPKRNSDKLIARKKDWDPKKYGGFDSPTVAYSVLVVAKVEKGKSKKLKSVKELLGITIMERSSFEKNPIDFLEAKGYKEVKKDLIIKLPKYSLFELENGRKRMLASAGELQKGNELALPSKYVNFLYLASHYEKLKGSPEDNEQKQLFVEQHKHYLDEIIEQISEFSKRVILADANLDKVLSAYNKHRDKPIREQAENIIHLFTLTNLGAPAAFKYFDTTIDRKRYTSTKEVLDATLIHQSITGLYETRIDLSQLGGDGGGGSGGSGGSGGSGGSGGTLNIEDEYRLHETSKGPDVPLGSTWLSDFPQAWAETGGMGLAVRQAPLIIPLKATSTPVSIKQYPMSQEARLGIKPHIQRLLDQGILVPCQSPWNTPLLPVKKPGTNDYRPVQDLREVNKRVEDIHPTVPNPYNLLSGLPPSHQWYTVLDLKDAFFCLRLHPTSQSLFAFEWRDPEMGISGQLTWTRLPQGFKNSPTLFNEALHRDLADFRIQHPDLILLQYVDDLLLAATSELDCQQGTRALLQTLGDLGYRASAKKAQICQKQVKYLGYLLKEGQRWLTEARKETVMGQPTPKTPRQLREFLGTAGFCRLWIPGFAEMAAPLYPLTKPGTLFEWGPDQQKAYQEIKQALLTAPALGLPDLTKPFELFVDEKQGYAKGVLTQKLGPWRRPVAYLSKKLDPVAAGWPPCLRMVAAIAVLTKDAGKLTMGQPLVILAPHAVEALVKQPPDRWLSNARMTHYQALLLDTDRVQFGPIVALNPATLLPLPEEGLQHDCLDILAEAHGTRPDLTDQPLPDADHTWYTDGSSFLQEGQRKAGAAVTTETEVVWAKALPAGTSAQRAELIALTQALKMAEGKKLNVYTDSRYAFATAHIHGEIYRRRGWLTSEGKEIKNKDEILALLKALFLPKRLSIIHCPGHQKGNRAEARGNRMADQAAREVATRETPETSTLLAGKRTADGSEFEKRTADGSEFESPKKKAKVE

SEQ ID NO: 2466 - protein, 2096 aa, synthetic construct
  source 1..2096: note = Description of Artificial Sequence: Synthetic polypeptide
MPAAKRVKLDGGDKKYSIGLDIGTNSVGWAVITDEYKVPSKKFKVLGNTDRHSIKKNLIGALLFDSGETAEATRLKRTARRRYTRRKNRICYLQEIFSNEMAKVDDSFFHRLEESFLVEEDKKHERHPIFGNIVDEVAYHEKYPTIYHLRKKLVDSTDKADLRLIYLALAHMIKFRGHFLIEGDLNPDNSDVDKLFIQLVQTYNQLFEENPINASGVDAKAILSARLSKSRRLENLIAQLPGEKKNGLFGNLIALSLGLTPNFKSNFDLAEDAKLQLSKDTYDDDLDNLLAQIGDQYADLFLAAKNLSDAILLSDILRVNTEITKAPLSASMIKRYDEHHQDLTLLKALVRQQLPEKYKEIFFDQSKNGYAGYIDGGASQEEFYKFIKPILEKMDGTEELLVKLNREDLLRKQRTFDNGSIPHQIHLGELHAILRRQEDFYPFLKDNREKIEKILTFRIPYYVGPLARGNSRFAWMTRKSEETITPWNFEEVVDKGASAQSFIERMTNFDKNLPNEKVLPKHSLLYEYFTVYNELTKVKYVTEGMRKPAFLSGEQKKAIVDLLFKTNRKVTVKQLKEDYFKKIECFDSVEISGVEDRFNASLGTYHDLLKIIKDKDFLDNEENEDILEDIVLTLTLFEDREMIEERLKTYAHLFDDKVMKQLKRRRYTGWGRLSRKLINGIRDKQSGKTILDFLKSDGFANRNFMQLIHDDSLTFKEDIQKAQVSGQGDSLHEHIANLAGSPAIKKGILQTVKVVDELVKVMGRHKPENIVIEMARENQTTQKGQKNSRERMKRIEEGIKELGSQILKEHPVENTQLQNEKLYLYYLQNGRDMYVDQELDINRLSDYDVDHIVPQSFLKDDSIDNKVLTRSDKARGKSDNVPSEEVVKKMKNYWRQLLNAKLITQRKFDNLTKAERGGLSELDKAGFIKRQLVETRQITKHVAQILDSRMNTKYDENDKLIREVKVITLKSKLVSDFRKDFQFYKVREINNYHHAHDAYLNAVVGTALIKKYPKLESEFVYGDYKVYDVRKMIAKSEQEIGKATAKYFFYSNIMNFFKTEITLANGEIRKRPLIETNGETGEIVWDKGRDFATVRKVLSMPQVNIVKKTEVQTGGFSKESILPKRNSDKLIARKKDWDPKKYGGFDSPTVAYSVLVVAKVEKGKSKKLKSVKELLGITIMERSSFEKNPIDFLEAKGYKEVKKDLIIKLPKYSLFELENGRKRMLASAGELQKGNELALPSKYVNFLYLASHYEKLKGSPEDNEQKQLFVEQHKHYLDEIIEQISEFSKRVILADANLDKVLSAYNKHRDKPIREQAENIIHLFTLTNLGAPAAFKYFDTTIDRKRYTSTKEVLDATLIHQSITGLYETRIDLSQLGGDGGPAPEAAAKGSSGGTLNIEDEYRLHETSKGPDVPLGSTWLSDFPQAWAETGGMGLAVRQAPLIIPLKATSTPVSIKQYPMSQEARLGIKPHIQRLLDQGILVPCQSPWNTPLLPVKKPGTNDYRPVQDLREVNKRVEDIHPTVPNPYNLLSGLPPSHQWYTVLDLKDAFFCLRLHPTSQSLFAFEWRDPEMGISGQLTWTRLPQGFKNSPTLFNEALHRDLADFRIQHPDLILLQYVDDLLLAATSELDCQQGTRALLQTLGDLGYRASAKKAQICQKQVKYLGYLLKEGQRWLTEARKETVMGQPTPKTPRQLREFLGTAGFCRLWIPGFAEMAAPLYPLTKPGTLFEWGPDQQKAYQEIKQALLTAPALGLPDLTKPFELFVDEKQGYAKGVLTQKLGPWRRPVAYLSKKLDPVAAGWPPCLRMVAAIAVLTKDAGKLTMGQPLVILAPHAVEALVKQPPDRWLSNARMTHYQALLLDTDRVQFGPIVALNPATLLPLPEEGLQHDCLDILAEAHGTRPDLTDQPLPDADHTWYTDGSSFLQEGQRKAGAAVTTETEVVWAKALPAGTSAQRAELIALTQALKMAEGKKLNVYTDSRYAFATAHIHGEIYRRRGWLTSEGKEIKNKDEILALLKALFLPKRLSIIHCPGHQKGNRAEARGNRMADQAAREVATRETPETSTLLAGKRTADGSEFEKRTADGSEFESPKKKAKVE

SEQ ID NO: 2467 - protein, 2094 aa, synthetic construct
  source 1..2094: note = Description of Artificial Sequence: Synthetic polypeptide
MPAAKRVKLDGGDKKYSIGLDIGTNSVGWAVITDEYKVPSKKFKVLGNTDRHSIKKNLIGALLFDSGETAEATRLKRTARRRYTRRKNRICYLQEIFSNEMAKVDDSFFHRLEESFLVEEDKKHERHPIFGNIVDEVAYHEKYPTIYHLRKKLVDSTDKADLRLIYLALAHMIKFRGHFLIEGDLNPDNSDVDKLFIQLVQTYNQLFEENPINASGVDAKAILSARLSKSRRLENLIAQLPGEKKNGLFGNLIALSLGLTPNFKSNFDLAEDAKLQLSKDTYDDDLDNLLAQIGDQYADLFLAAKNLSDAILLSDILRVNTEITKAPLSASMIKRYDEHHQDLTLLKALVRQQLPEKYKEIFFDQSKNGYAGYIDGGASQEEFYKFIKPILEKMDGTEELLVKLNREDLLRKQRTFDNGSIPHQIHLGELHAILRRQEDFYPFLKDNREKIEKILTFRIPYYVGPLARGNSRFAWMTRKSEETITPWNFEEVVDKGASAQSFIERMTNFDKNLPNEKVLPKHSLLYEYFTVYNELTKVKYVTEGMRKPAFLSGEQKKAIVDLLFKTNRKVTVKQLKEDYFKKIECFDSVEISGVEDRFNASLGTYHDLLKIIKDKDFLDNEENEDILEDIVLTLTLFEDREMIEERLKTYAHLFDDKVMKQLKRRRYTGWGRLSRKLINGIRDKQSGKTILDFLKSDGFANRNFMQLIHDDSLTFKEDIQKAQVSGQGDSLHEHIANLAGSPAIKKGILQTVKVVDELVKVMGRHKPENIVIEMARENQTTQKGQKNSRERMKRIEEGIKELGSQILKEHPVENTQLQNEKLYLYYLQNGRDMYVDQELDINRLSDYDVDHIVPQSFLKDDSIDNKVLTRSDKARGKSDNVPSEEVVKKMKNYWRQLLNAKLITQRKFDNLTKAERGGLSELDKAGFIKRQLVETRQITKHVAQILDSRMNTKYDENDKLIREVKVITLKSKLVSDFRKDFQFYKVREINNYHHAHDAYLNAVVGTALIKKYPKLESEFVYGDYKVYDVRKMIAKSEQEIGKATAKYFFYSNIMNFFKTEITLANGEIRKRPLIETNGETGEIVWDKGRDFATVRKVLSMPQVNIVKKTEVQTGGFSKESILPKRNSDKLIARKKDWDPKKYGGFDSPTVAYSVLVVAKVEKGKSKKLKSVKELLGITIMERSSFEKNPIDFLEAKGYKEVKKDLIIKLPKYSLFELENGRKRMLASAGELQKGNELALPSKYVNFLYLASHYEKLKGSPEDNEQKQLFVEQHKHYLDEIIEQISEFSKRVILADANLDKVLSAYNKHRDKPIREQAENIIHLFTLTNLGAPAAFKYFDTTIDRKRYTSTKEVLDATLIHQSITGLYETRIDLSQLGGDGGPAPGGSGSSGGTLNIEDEYRLHETSKGPDVPLGSTWLSDFPQAWAETGGMGLAVRQAPLIIPLKATSTPVSIKQYPMSQEARLGIKPHIQRLLDQGILVPCQSPWNTPLLPVKKPGTNDYRPVQDLREVNKRVEDIHPTVPNPYNLLSGLPPSHQWYTVLDLKDAFFCLRLHPTSQSLFAFEWRDPEMGISGQLTWTRLPQGFKNSPTLFNEALHRDLADFRIQHPDLILLQYVDDLLLAATSELDCQQGTRALLQTLGDLGYRASAKKAQICQKQVKYLGYLLKEGQRWLTEARKETVMGQPTPKTPRQLREFLGTAGFCRLWIPGFAEMAAPLYPLTKPGTLFEWGPDQQKAYQEIKQALLTAPALGLPDLTKPFELFVDEKQGYAKGVLTQKLGPWRRPVAYLSKKLDPVAAGWPPCLRMVAAIAVLTKDAGKLTMGQPLVILAPHAVEALVKQPPDRWLSNARMTHYQALLLDTDRVQFGPIVALNPATLLPLPEEGLQHDCLDILAEAHGTRPDLTDQPLPDADHTWYTDGSSFLQEGQRKAGAAVTTETEVVWAKALPAGTSAQRAELIALTQALKMAEGKKLNVYTDSRYAFATAHIHGEIYRRRGWLTSEGKEIKNKDEILALLKALFLPKRLSIIHCPGHQKGNRAEARGNRMADQAAREVATRETPETSTLLAGKRTADGSEFEKRTADGSEFESPKKKAKVE

SEQ ID NO: 2468 - protein, 2091 aa, synthetic construct
  source 1..2091: note = Description of Artificial Sequence: Synthetic polypeptide
MPAAKRVKLDGGDKKYSIGLDIGTNSVGWAVITDEYKVPSKKFKVLGNTDRHSIKKNLIGALLFDSGETAEATRLKRTARRRYTRRKNRICYLQEIFSNEMAKVDDSFFHRLEESFLVEEDKKHERHPIFGNIVDEVAYHEKYPTIYHLRKKLVDSTDKADLRLIYLALAHMIKFRGHFLIEGDLNPDNSDVDKLFIQLVQTYNQLFEENPINASGVDAKAILSARLSKSRRLENLIAQLPGEKKNGLFGNLIALSLGLTPNFKSNFDLAEDAKLQLSKDTYDDDLDNLLAQIGDQYADLFLAAKNLSDAILLSDILRVNTEITKAPLSASMIKRYDEHHQDLTLLKALVRQQLPEKYKEIFFDQSKNGYAGYIDGGASQEEFYKFIKPILEKMDGTEELLVKLNREDLLRKQRTFDNGSIPHQIHLGELHAILRRQEDFYPFLKDNREKIEKILTFRIPYYVGPLARGNSRFAWMTRKSEETITPWNFEEVVDKGASAQSFIERMTNFDKNLPNEKVLPKHSLLYEYFTVYNELTKVKYVTEGMRKPAFLSGEQKKAIVDLLFKTNRKVTVKQLKEDYFKKIECFDSVEISGVEDRFNASLGTYHDLLKIIKDKDFLDNEENEDILEDIVLTLTLFEDREMIEERLKTYAHLFDDKVMKQLKRRRYTGWGRLSRKLINGIRDKQSGKTILDFLKSDGFANRNFMQLIHDDSLTFKEDIQKAQVSGQGDSLHEHIANLAGSPAIKKGILQTVKVVDELVKVMGRHKPENIVIEMARENQTTQKGQKNSRERMKRIEEGIKELGSQILKEHPVENTQLQNEKLYLYYLQNGRDMYVDQELDINRLSDYDVDHIVPQSFLKDDSIDNKVLTRSDKARGKSDNVPSEEVVKKMKNYWRQLLNAKLITQRKFDNLTKAERGGLSELDKAGFIKRQLVETRQITKHVAQILDSRMNTKYDENDKLIREVKVITLKSKLVSDFRKDFQFYKVREINNYHHAHDAYLNAVVGTALIKKYPKLESEFVYGDYKVYDVRKMIAKSEQEIGKATAKYFFYSNIMNFFKTEITLANGEIRKRPLIETNGETGEIVWDKGRDFATVRKVLSMPQVNIVKKTEVQTGGFSKESILPKRNSDKLIARKKDWDPKKYGGFDSPTVAYSVLVVAKVEKGKSKKLKSVKELLGITIMERSSFEKNPIDFLEAKGYKEVKKDLIIKLPKYSLFELENGRKRMLASAGELQKGNELALPSKYVNFLYLASHYEKLKGSPEDNEQKQLFVEQHKHYLDEIIEQISEFSKRVILADANLDKVLSAYNKHRDKPIREQAENIIHLFTLTNLGAPAAFKYFDTTIDRKRYTSTKEVLDATLIHQSITGLYETRIDLSQLGGDGGGGGGSSGGTLNIEDEYRLHETSKGPDVPLGSTWLSDFPQAWAETGGMGLAVRQAPLIIPLKATSTPVSIKQYPMSQEARLGIKPHIQRLLDQGILVPCQSPWNTPLLPVKKPGTNDYRPVQDLREVNKRVEDIHPTVPNPYNLLSGLPPSHQWYTVLDLKDAFFCLRLHPTSQSLFAFEWRDPEMGISGQLTWTRLPQGFKNSPTLFNEALHRDLADFRIQHPDLILLQYVDDLLLAATSELDCQQGTRALLQTLGDLGYRASAKKAQICQKQVKYLGYLLKEGQRWLTEARKETVMGQPTPKTPRQLREFLGTAGFCRLWIPGFAEMAAPLYPLTKPGTLFEWGPDQQKAYQEIKQALLTAPALGLPDLTKPFELFVDEKQGYAKGVLTQKLGPWRRPVAYLSKKLDPVAAGWPPCLRMVAAIAVLTKDAGKLTMGQPLVILAPHAVEALVKQPPDRWLSNARMTHYQALLLDTDRVQFGPIVALNPATLLPLPEEGLQHDCLDILAEAHGTRPDLTDQPLPDADHTWYTDGSSFLQEGQRKAGAAVTTETEVVWAKALPAGTSAQRAELIALTQALKMAEGKKLNVYTDSRYAFATAHIHGEIYRRRGWLTSEGKEIKNKDEILALLKALFLPKRLSIIHCPGHQKGNRAEARGNRMADQAAREVATRETPETSTLLAGKRTADGSEFEKRTADGSEFESPKKKAKVE

SEQ ID NO: 2469 - protein, 2096 aa, synthetic construct
  source 1..2096: note = Description of Artificial Sequence: Synthetic polypeptide
MPAAKRVKLDGGDKKYSIGLDIGTNSVGWAVITDEYKVPSKKFKVLGNTDRHSIKKNLIGALLFDSGETAEATRLKRTARRRYTRRKNRICYLQEIFSNEMAKVDDSFFHRLEESFLVEEDKKHERHPIFGNIVDEVAYHEKYPTIYHLRKKLVDSTDKADLRLIYLALAHMIKFRGHFLIEGDLNPDNSDVDKLFIQLVQTYNQLFEENPINASGVDAKAILSARLSKSRRLENLIAQLPGEKKNGLFGNLIALSLGLTPNFKSNFDLAEDAKLQLSKDTYDDDLDNLLAQIGDQYADLFLAAKNLSDAILLSDILRVNTEITKAPLSASMIKRYDEHHQDLTLLKALVRQQLPEKYKEIFFDQSKNGYAGYIDGGASQEEFYKFIKPILEKMDGTEELLVKLNREDLLRKQRTFDNGSIPHQIHLGELHAILRRQEDFYPFLKDNREKIEKILTFRIPYYVGPLARGNSRFAWMTRKSEETITPWNFEEVVDKGASAQSFIERMTNFDKNLPNEKVLPKHSLLYEYFTVYNELTKVKYVTEGMRKPAFLSGEQKKAIVDLLFKTNRKVTVKQLKEDYFKKIECFDSVEISGVEDRFNASLGTYHDLLKIIKDKDFLDNEENEDILEDIVLTLTLFEDREMIEERLKTYAHLFDDKVMKQLKRRRYTGWGRLSRKLINGIRDKQSGKTILDFLKSDGFANRNFMQLIHDDSLTFKEDIQKAQVSGQGDSLHEHIANLAGSPAIKKGILQTVKVVDELVKVMGRHKPENIVIEMARENQTTQKGQKNSRERMKRIEEGIKELGSQILKEHPVENTQLQNEKLYLYYLQNGRDMYVDQELDINRLSDYDVDHIVPQSFLKDDSIDNKVLTRSDKARGKSDNVPSEEVVKKMKNYWRQLLNAKLITQRKFDNLTKAERGGLSELDKAGFIKRQLVETRQITKHVAQILDSRMNTKYDENDKLIREVKVITLKSKLVSDFRKDFQFYKVREINNYHHAHDAYLNAVVGTALIKKYPKLESEFVYGDYKVYDVRKMIAKSEQEIGKATAKYFFYSNIMNFFKTEITLANGEIRKRPLIETNGETGEIVWDKGRDFATVRKVLSMPQVNIVKKTEVQTGGFSKESILPKRNSDKLIARKKDWDPKKYGGFDSPTVAYSVLVVAKVEKGKSKKLKSVKELLGITIMERSSFEKNPIDFLEAKGYKEVKKDLIIKLPKYSLFELENGRKRMLASAGELQKGNELALPSKYVNFLYLASHYEKLKGSPEDNEQKQLFVEQHKHYLDEIIEQISEFSKRVILADANLDKVLSAYNKHRDKPIREQAENIIHLFTLTNLGAPAAFKYFDTTIDRKRYTSTKEVLDATLIHQSITGLYETRIDLSQLGGDGGEAAAKGSSPAPGGTLNIEDEYRLHETSKGPDVPLGSTWLSDFPQAWAETGGMGLAVRQAPLIIPLKATSTPVSIKQYPMSQEARLGIKPHIQRLLDQGILVPCQSPWNTPLLPVKKPGTNDYRPVQDLREVNKRVEDIHPTVPNPYNLLSGLPPSHQWYTVLDLKDAFFCLRLHPTSQSLFAFEWRDPEMGISGQLTWTRLPQGFKNSPTLFNEALHRDLADFRIQHPDLILLQYVDDLLLAATSELDCQQGTRALLQTLGDLGYRASAKKAQICQKQVKYLGYLLKEGQRWLTEARKETVMGQPTPKTPRQLREFLGTAGFCRLWIPGFAEMAAPLYPLTKPGTLFEWGPDQQKAYQEIKQALLTAPALGLPDLTKPFELFVDEKQGYAKGVLTQKLGPWRRPVAYLSKKLDPVAAGWPPCLRMVAAIAVLTKDAGKLTMGQPLVILAPHAVEALVKQPPDRWLSNARMTHYQALLLDTDRVQFGPIVALNPATLLPLPEEGLQHDCLDILAEAHGTRPDLTDQPLPDADHTWYTDGSSFLQEGQRKAGAAVTTETEVVWAKALPAGTSAQRAELIALTQALKMAEGKKLNVYTDSRYAFATAHIHGEIYRRRGWLTSEGKEIKNKDEILALLKALFLPKRLSIIHCPGHQKGNRAEARGNRMADQAAREVATRETPETSTLLAGKRTADGSEFEKRTADGSEFESPKKKAKVE

SEQ ID NO: 2470 - protein, 2096 aa, synthetic construct
  source 1..2096: note = Description of Artificial Sequence: Synthetic polypeptide
MPAAKRVKLDGGDKKYSIGLDIGTNSVGWAVITDEYKVPSKKFKVLGNTDRHSIKKNLIGALLFDSGETAEATRLKRTARRRYTRRKNRICYLQEIFSNEMAKVDDSFFHRLEESFLVEEDKKHERHPIFGNIVDEVAYHEKYPTIYHLRKKLVDSTDKADLRLIYLALAHMIKFRGHFLIEGDLNPDNSDVDKLFIQLVQTYNQLFEENPINASGVDAKAILSARLSKSRRLENLIAQLPGEKKNGLFGNLIALSLGLTPNFKSNFDLAEDAKLQLSKDTYDDDLDNLLAQIGDQYADLFLAAKNLSDAILLSDILRVNTEITKAPLSASMIKRYDEHHQDLTLLKALVRQQLPEKYKEIFFDQSKNGYAGYIDGGASQEEFYKFIKPILEKMDGTEELLVKLNREDLLRKQRTFDNGSIPHQIHLGELHAILRRQEDFYPFLKDNREKIEKILTFRIPYYVGPLARGNSRFAWMTRKSEETITPWNFEEVVDKGASAQSFIERMTNFDKNLPNEKVLPKHSLLYEYFTVYNELTKVKYVTEGMRKPAFLSGEQKKAIVDLLFKTNRKVTVKQLKEDYFKKIECFDSVEISGVEDRFNASLGTYHDLLKIIKDKDFLDNEENEDILEDIVLTLTLFEDREMIEERLKTYAHLFDDKVMKQLKRRRYTGWGRLSRKLINGIRDKQSGKTILDFLKSDGFANRNFMQLIHDDSLTFKEDIQKAQVSGQGDSLHEHIANLAGSPAIKKGILQTVKVVDELVKVMGRHKPENIVIEMARENQTTQKGQKNSRERMKRIEEGIKELGSQILKEHPVENTQLQNEKLYLYYLQNGRDMYVDQELDINRLSDYDVDHIVPQSFLKDDSIDNKVLTRSDKARGKSDNVPSEEVVKKMKNYWRQLLNAKLITQRKFDNLTKAERGGLSELDKAGFIKRQLVETRQITKHVAQILDSRMNTKYDENDKLIREVKVITLKSKLVSDFRKDFQFYKVREINNYHHAHDAYLNAVVGTALIKKYPKLESEFVYGDYKVYDVRKMIAKSEQEIGKATAKYFFYSNIMNFFKTEITLANGEIRKRPLIETNGETGEIVWDKGRDFATVRKVLSMPQVNIVKKTEVQTGGFSKESILPKRNSDKLIARKKDWDPKKYGGFDSPTVAYSVLVVAKVEKGKSKKLKSVKELLGITIMERSSFEKNPIDFLEAKGYKEVKKDLIIKLPKYSLFELENGRKRMLASAGELQKGNELALPSKYVNFLYLASHYEKLKGSPEDNEQKQLFVEQHKHYLDEIIEQISEFSKRVILADANLDKVLSAYNKHRDKPIREQAENIIHLFTLTNLGAPAAFKYFDTTIDRKRYTSTKEVLDATLIHQSITGLYETRIDLSQLGGDGGGGSGSSEAAAKGGTLNIEDEYRLHETSKGPDVPLGSTWLSDFPQAWAETGGMGLAVRQAPLIIPLKATSTPVSIKQYPMSQEARLGIKPHIQRLLDQGILVPCQSPWNTPLLPVKKPGTNDYRPVQDLREVNKRVEDIHPTVPNPYNLLSGLPPSHQWYTVLDLKDAFFCLRLHPTSQSLFAFEWRDPEMGISGQLTWTRLPQGFKNSPTLFNEALHRDLADFRIQHPDLILLQYVDDLLLAATSELDCQQGTRALLQTLGDLGYRASAKKAQICQKQVKYLGYLLKEGQRWLTEARKETVMGQPTPKTPRQLREFLGTAGFCRLWIPGFAEMAAPLYPLTKPGTLFEWGPDQQKAYQEIKQALLTAPALGLPDLTKPFELFVDEKQGYAKGVLTQKLGPWRRPVAYLSKKLDPVAAGWPPCLRMVAAIAVLTKDAGKLTMGQPLVILAPHAVEALVKQPPDRWLSNARMTHYQALLLDTDRVQFGPIVALNPATLLPLPEEGLQHDCLDILAEAHGTRPDLTDQPLPDADHTWYTDGSSFLQEGQRKAGAAVTTETEVVWAKALPAGTSAQRAELIALTQALKMAEGKKLNVYTDSRYAFATAHIHGEIYRRRGWLTSEGKEIKNKDEILALLKALFLPKRLSIIHCPGHQKGNRAEARGNRMADQAAREVATRETPETSTLLAGKRTADGSEFEKRTADGSEFESPKKKAKVE

SEQ ID NO: 2471 - protein, 2094 aa, synthetic construct
  source 1..2094: note = Description of Artificial Sequence: Synthetic polypeptide
MPAAKRVKLDGGDKKYSIGLDIGTNSVGWAVITDEYKVPSKKFKVLGNTDRHSIKKNLIGALLFDSGETAEATRLKRTARRRYTRRKNRICYLQEIFSNEMAKVDDSFFHRLEESFLVEEDKKHERHPIFGNIVDEVAYHEKYPTIYHLRKKLVDSTDKADLRLIYLALAHMIKFRGHFLIEGDLNPDNSDVDKLFIQLVQTYNQLFEENPINASGVDAKAILSARLSKSRRLENLIAQLPGEKKNGLFGNLIALSLGLTPNFKSNFDLAEDAKLQLSKDTYDDDLDNLLAQIGDQYADLFLAAKNLSDAILLSDILRVNTEITKAPLSASMIKRYDEHHQDLTLLKALVRQQLPEKYKEIFFDQSKNGYAGYIDGGASQEEFYKFIKPILEKMDGTEELLVKLNREDLLRKQRTFDNGSIPHQIHLGELHAILRRQEDFYPFLKDNREKIEKILTFRIPYYVGPLARGNSRFAWMTRKSEETITPWNFEEVVDKGASAQSFIERMTNFDKNLPNEKVLPKHSLLYEYFTVYNELTKVKYVTEGMRKPAFLSGEQKKAIVDLLFKTNRKVTVKQLKEDYFKKIECFDSVEISGVEDRFNASLGTYHDLLKIIKDKDFLDNEENEDILEDIVLTLTLFEDREMIEERLKTYAHLFDDKVMKQLKRRRYTGWGRLSRKLINGIRDKQSGKTILDFLKSDGFANRNFMQLIHDDSLTFKEDIQKAQVSGQGDSLHEHIANLAGSPAIKKGILQTVKVVDELVKVMGRHKPENIVIEMARENQTTQKGQKNSRERMKRIEEGIKELGSQILKEHPVENTQLQNEKLYLYYLQNGRDMYVDQELDINRLSDYDVDHIVPQSFLKDDSIDNKVLTRSDKARGKSDNVPSEEVVKKMKNYWRQLLNAKLITQRKFDNLTKAERGGLSELDKAGFIKRQLVETRQITKHVAQILDSRMNTKYDENDKLIREVKVITLKSKLVSDFRKDFQFYKVREINNYHHAHDAYLNAVVGTALIKKYPKLESEFVYGDYKVYDVRKMIAKSEQEIGKATAKYFFYSNIMNFFKTEITLANGEIRKRPLIETNGETGEIVWDKGRDFATVRKVLSMPQVNIVKKTEVQTGGFSKESILPKRNSDKLIARKKDWDPKKYGGFDSPTVAYSVLVVAKVEKGKSKKLKSVKELLGITIMERSSFEKNPIDFLEAKGYKEVKKDLIIKLPKYSLFELENGRKRMLASAGELQKGNELALPSKYVNFLYLASHYEKLKGSPEDNEQKQLFVEQHKHYLDEIIEQISEFSKRVILADANLDKVLSAYNKHRDKPIREQAENIIHLFTLTNLGAPAAFKYFDTTIDRKRYTSTKEVLDATLIHQSITGLYETRIDLSQLGGDGGGSSGSSGSSGGTLNIEDEYRLHETSKGPDVPLGSTWLSDFPQAWAETGGMGLAVRQAPLIIPLKATSTPVSIKQYPMSQEARLGIKPHIQRLLDQGILVPCQSPWNTPLLPVKKPGTNDYRPVQDLREVNKRVEDIHPTVPNPYNLLSGLPPSHQWYTVLDLKDAFFCLRLHPTSQSLFAFEWRDPEMGISGQLTWTRLPQGFKNSPTLFNEALHRDLADFRIQHPDLILLQYVDDLLLAATSELDCQQGTRALLQTLGDLGYRASAKKAQICQKQVKYLGYLLKEGQRWLTEARKETVMGQPTPKTPRQLREFLGTAGFCRLWIPGFAEMAAPLYPLTKPGTLFEWGPDQQKAYQEIKQALLTAPALGLPDLTKPFELFVDEKQGYAKGVLTQKLGPWRRPVAYLSKKLDPVAAGWPPCLRMVAAIAVLTKDAGKLTMGQPLVILAPHAVEALVKQPPDRWLSNARMTHYQALLLDTDRVQFGPIVALNPATLLPLPEEGLQHDCLDILAEAHGTRPDLTDQPLPDADHTWYTDGSSFLQEGQRKAGAAVTTETEVVWAKALPAGTSAQRAELIALTQALKMAEGKKLNVYTDSRYAFATAHIHGEIYRRRGWLTSEGKEIKNKDEILALLKALFLPKRLSIIHCPGHQKGNRAEARGNRMADQAAREVATRETPETSTLLAGKRTADGSEFEKRTADGSEFESPKKKAKVE

SEQ ID NO: 2472 - protein, 2096 aa, synthetic construct
  source 1..2096: note = Description of Artificial Sequence: Synthetic polypeptide
MPAAKRVKLDGGDKKYSIGLDIGTNSVGWAVITDEYKVPSKKFKVLGNTDRHSIKKNLIGALLFDSGETAEATRLKRTARRRYTRRKNRICYLQEIFSNEMAKVDDSFFHRLEESFLVEEDKKHERHPIFGNIVDEVAYHEKYPTIYHLRKKLVDSTDKADLRLIYLALAHMIKFRGHFLIEGDLNPDNSDVDKLFIQLVQTYNQLFEENPINASGVDAKAILSARLSKSRRLENLIAQLPGEKKNGLFGNLIALSLGLTPNFKSNFDLAEDAKLQLSKDTYDDDLDNLLAQIGDQYADLFLAAKNLSDAILLSDILRVNTEITKAPLSASMIKRYDEHHQDLTLLKALVRQQLPEKYKEIFFDQSKNGYAGYIDGGASQEEFYKFIKPILEKMDGTEELLVKLNREDLLRKQRTFDNGSIPHQIHLGELHAILRRQEDFYPFLKDNREKIEKILTFRIPYYVGPLARGNSRFAWMTRKSEETITPWNFEEVVDKGASAQSFIERMTNFDKNLPNEKVLPKHSLLYEYFTVYNELTKVKYVTEGMRKPAFLSGEQKKAIVDLLFKTNRKVTVKQLKEDYFKKIECFDSVEISGVEDRFNASLGTYHDLLKIIKDKDFLDNEENEDILEDIVLTLTLFEDREMIEERLKTYAHLFDDKVMKQLKRRRYTGWGRLSRKLINGIRDKQSGKTILDFLKSDGFANRNFMQLIHDDSLTFKEDIQKAQVSGQGDSLHEHIANLAGSPAIKKGILQTVKVVDELVKVMGRHKPENIVIEMARENQTTQKGQKNSRERMKRIEEGIKELGSQILKEHPVENTQLQNEKLYLYYLQNGRDMYVDQELDINRLSDYDVDHIVPQSFLKDDSIDNKVLTRSDKARGKSDNVPSEEVVKKMKNYWRQLLNAKLITQRKFDNLTKAERGGLSELDKAGFIKRQLVETRQITKHVAQILDSRMNTKYDENDKLIREVKVITLKSKLVSDFRKDFQFYKVREINNYHHAHDAYLNAVVGTALIKKYPKLESEFVYGDYKVYDVRKMIAKSEQEIGKATAKYFFYSNIMNFFKTEITLANGEIRKRPLIETNGETGEIVWDKGRDFATVRKVLSMPQVNIVKKTEVQTGGFSKESILPKRNSDKLIARKKDWDPKKYGGFDSPTVAYSVLVVAKVEKGKSKKLKSVKELLGITIMERSSFEKNPIDFLEAKGYKEVKKDLIIKLPKYSLFELENGRKRMLASAGELQKGNELALPSKYVNFLYLASHYEKLKGSPEDNEQKQLFVEQHKHYLDEIIEQISEFSKRVILADANLDKVLSAYNKHRDKPIREQAENIIHLFTLTNLGAPAAFKYFDTTIDRKRYTSTKEVLDATLIHQSITGLYETRIDLSQLGGDGGGGGPAPEAAAKGGTLNIEDEYRLHETSKGPDVPLGSTWLSDFPQAWAETGGMGLAVRQAPLIIPLKATSTPVSIKQYPMSQEARLGIKPHIQRLLDQGILVPCQSPWNTPLLPVKKPGTNDYRPVQDLREVNKRVEDIHPTVPNPYNLLSGLPPSHQWYTVLDLKDAFFCLRLHPTSQSLFAFEWRDPEMGISGQLTWTRLPQGFKNSPTLFNEALHRDLADFRIQHPDLILLQYVDDLLLAATSELDCQQGTRALLQTLGDLGYRASAKKAQICQKQVKYLGYLLKEGQRWLTEARKETVMGQPTPKTPRQLREFLGTAGFCRLWIPGFAEMAAPLYPLTKPGTLFEWGPDQQKAYQEIKQALLTAPALGLPDLTKPFELFVDEKQGYAKGVLTQKLGPWRRPVAYLSKKLDPVAAGWPPCLRMVAAIAVLTKDAGKLTMGQPLVILAPHAVEALVKQPPDRWLSNARMTHYQALLLDTDRVQFGPIVALNPATLLPLPEEGLQHDCLDILAEAHGTRPDLTDQPLPDADHTWYTDGSSFLQEGQRKAGAAVTTETEVVWAKALPAGTSAQRAELIALTQALKMAEGKKLNVYTDSRYAFATAHIHGEIYRRRGWLTSEGKEIKNKDEILALLKALFLPKRLSIIHCPGHQKGNRAEARGNRMADQAAREVATRETPETSTLLAGKRTADGSEFEKRTADGSEFESPKKKAKVE

SEQ ID NO: 2473 - protein, 2096 aa, synthetic construct
  source 1..2096: note = Description of Artificial Sequence: Synthetic polypeptide
MPAAKRVKLDGGDKKYSIGLDIGTNSVGWAVITDEYKVPSKKFKVLGNTDRHSIKKNLIGALLFDSGETAEATRLKRTARRRYTRRKNRICYLQEIFSNEMAKVDDSFFHRLEESFLVEEDKKHERHPIFGNIVDEVAYHEKYPTIYHLRKKLVDSTDKADLRLIYLALAHMIKFRGHFLIEGDLNPDNSDVDKLFIQLVQTYNQLFEENPINASGVDAKAILSARLSKSRRLENLIAQLPGEKKNGLFGNLIALSLGLTPNFKSNFDLAEDAKLQLSKDTYDDDLDNLLAQIGDQYADLFLAAKNLSDAILLSDILRVNTEITKAPLSASMIKRYDEHHQDLTLLKALVRQQLPEKYKEIFFDQSKNGYAGYIDGGASQEEFYKFIKPILEKMDGTEELLVKLNREDLLRKQRTFDNGSIPHQIHLGELHAILRRQEDFYPFLKDNREKIEKILTFRIPYYVGPLARGNSRFAWMTRKSEETITPWNFEEVVDKGASAQSFIERMTNFDKNLPNEKVLPKHSLLYEYFTVYNELTKVKYVTEGMRKPAFLSGEQKKAIVDLLFKTNRKVTVKQLKEDYFKKIECFDSVEISGVEDRFNASLGTYHDLLKIIKDKDFLDNEENEDILEDIVLTLTLFEDREMIEERLKTYAHLFDDKVMKQLKRRRYTGWGRLSRKLINGIRDKQSGKTILDFLKSDGFANRNFMQLIHDDSLTFKEDIQKAQVSGQGDSLHEHIANLAGSPAIKKGILQTVKVVDELVKVMGRHKPENIVIEMARENQTTQKGQKNSRERMKRIEEGIKELGSQILKEHPVENTQLQNEKLYLYYLQNGRDMYVDQELDINRLSDYDVDHIVPQSFLKDDSIDNKVLTRSDKARGKSDNVPSEEVVKKMKNYWRQLLNAKLITQRKFDNLTKAERGGLSELDKAGFIKRQLVETRQITKHVAQILDSRMNTKYDENDKLIREVKVITLKSKLVSDFRKDFQFYKVREINNYHHAHDAYLNAVVGTALIKKYPKLESEFVYGDYKVYDVRKMIAKSEQEIGKATAKYFFYSNIMNFFKTEITLANGEIRKRPLIETNGETGEIVWDKGRDFATVRKVLSMPQVNIVKKTEVQTGGFSKESILPKRNSDKLIARKKDWDPKKYGGFDSPTVAYSVLVVAKVEKGKSKKLKSVKELLGITIMERSSFEKNPIDFLEAKGYKEVKKDLIIKLPKYSLFELENGRKRMLASAGELQKGNELALPSKYVNFLYLASHYEKLKGSPEDNEQKQLFVEQHKHYLDEIIEQISEFSKRVILADANLDKVLSAYNKHRDKPIREQAENIIHLFTLTNLGAPAAFKYFDTTIDRKRYTSTKEVLDATLIHQSITGLYETRIDLSQLGGDGGEAAAKPAPGSSGGTLNIEDEYRLHETSKGPDVPLGSTWLSDFPQAWAETGGMGLAVRQAPLIIPLKATSTPVSIKQYPMSQEARLGIKPHIQRLLDQGILVPCQSPWNTPLLPVKKPGTNDYRPVQDLREVNKRVEDIHPTVPNPYNLLSGLPPSHQWYTVLDLKDAFFCLRLHPTSQSLFAFEWRDPEMGISGQLTWTRLPQGFKNSPTLFNEALHRDLADFRIQHPDLILLQYVDDLLLAATSELDCQQGTRALLQTLGDLGYRASAKKAQICQKQVKYLGYLLKEGQRWLTEARKETVMGQPTPKTPRQLREFLGTAGFCRLWIPGFAEMAAPLYPLTKPGTLFEWGPDQQKAYQEIKQALLTAPALGLPDLTKPFELFVDEKQGYAKGVLTQKLGPWRRPVAYLSKKLDPVAAGWPPCLRMVAAIAVLTKDAGKLTMGQPLVILAPHAVEALVKQPPDRWLSNARMTHYQALLLDTDRVQFGPIVALNPATLLPLPEEGLQHDCLDILAEAHGTRPDLTDQPLPDADHTWYTDGSSFLQEGQRKAGAAVTTETEVVWAKALPAGTSAQRAELIALTQALKMAEGKKLNVYTDSRYAFATAHIHGEIYRRRGWLTSEGKEIKNKDEILALLKALFLPKRLSIIHCPGHQKGNRAEARGNRMADQAAREVATRETPETSTLLAGKRTADGSEFEKRTADGSEFESPKKKAKVE

SEQ ID NO: 2474 - protein, 2096 aa, synthetic construct
  source 1..2096: note = Description of Artificial Sequence: Synthetic polypeptide
MPAAKRVKLDGGDKKYSIGLDIGTNSVGWAVITDEYKVPSKKFKVLGNTDRHSIKKNLIGALLFDSGETAEATRLKRTARRRYTRRKNRICYLQEIFSNEMAKVDDSFFHRLEESFLVEEDKKHERHPIFGNIVDEVAYHEKYPTIYHLRKKLVDSTDKADLRLIYLALAHMIKFRGHFLIEGDLNPDNSDVDKLFIQLVQTYNQLFEENPINASGVDAKAILSARLSKSRRLENLIAQLPGEKKNGLFGNLIALSLGLTPNFKSNFDLAEDAKLQLSKDTYDDDLDNLLAQIGDQYADLFLAAKNLSDAILLSDILRVNTEITKAPLSASMIKRYDEHHQDLTLLKALVRQQLPEKYKEIFFDQSKNGYAGYIDGGASQEEFYKFIKPILEKMDGTEELLVKLNREDLLRKQRTFDNGSIPHQIHLGELHAILRRQEDFYPFLKDNREKIEKILTFRIPYYVGPLARGNSRFAWMTRKSEETITPWNFEEVVDKGASAQSFIERMTNFDKNLPNEKVLPKHSLLYEYFTVYNELTKVKYVTEGMRKPAFLSGEQKKAIVDLLFKTNRKVTVKQLKEDYFKKIECFDSVEISGVEDRFNASLGTYHDLLKIIKDKDFLDNEENEDILEDIVLTLTLFEDREMIEERLKTYAHLFDDKVMKQLKRRRYTGWGRLSRKLINGIRDKQSGKTILDFLKSDGFANRNFMQLIHDDSLTFKEDIQKAQVSGQGDSLHEHIANLAGSPAIKKGILQTVKVVDELVKVMGRHKPENIVIEMARENQTTQKGQKNSRERMKRIEEGIKELGSQILKEHPVENTQLQNEKLYLYYLQNGRDMYVDQELDINRLSDYDVDHIVPQSFLKDDSIDNKVLTRSDKARGKSDNVPSEEVVKKMKNYWRQLLNAKLITQRKFDNLTKAERGGLSELDKAGFIKRQLVETRQITKHVAQILDSRMNTKYDENDKLIREVKVITLKSKLVSDFRKDFQFYKVREINNYHHAHDAYLNAVVGTALIKKYPKLESEFVYGDYKVYDVRKMIAKSEQEIGKATAKYFFYSNIMNFFKTEITLANGEIRKRPLIETNGETGEIVWDKGRDFATVRKVLSMPQVNIVKKTEVQTGGFSKESILPKRNSDKLIARKKDWDPKKYGGFDSPTVAYSVLVVAKVEKGKSKKLKSVKELLGITIMERSSFEKNPIDFLEAKGYKEVKKDLIIKLPKYSLFELENGRKRMLASAGELQKGNELALPSKYVNFLYLASHYEKLKGSPEDNEQKQLFVEQHKHYLDEIIEQISEFSKRVILADANLDKVLSAYNKHRDKPIREQAENIIHLFTLTNLGAPAAFKYFDTTIDRKRYTSTKEVLDATLIHQSITGLYETRIDLSQLGGDGGEAAAKGGSPAPGGTLNIEDEYRLHETSKGPDVPLGSTWLSDFPQAWAETGGMGLAVRQAPLIIPLKATSTPVSIKQYPMSQEARLGIKPHIQRLLDQGILVPCQSPWNTPLLPVKKPGTNDYRPVQDLREVNKRVEDIHPTVPNPYNLLSGLPPSHQWYTVLDLKDAFFCLRLHPTSQSLFAFEWRDPEMGISGQLTWTRLPQGFKNSPTLFNEALHRDLADFRIQHPDLILLQYVDDLLLAATSELDCQQGTRALLQTLGDLGYRASAKKAQICQKQVKYLGYLLKEGQRWLTEARKETVMGQPTPKTPRQLREFLGTAGFCRLWIPGFAEMAAPLYPLTKPGTLFEWGPDQQKAYQEIKQALLTAPALGLPDLTKPFELFVDEKQGYAKGVLTQKLGPWRRPVAYLSKKLDPVAAGWPPCLRMVAAIAVLTKDAGKLTMGQPLVILAPHAVEALVKQPPDRWLSNARMTHYQALLLDTDRVQFGPIVALNPATLLPLPEEGLQHDCLDILAEAHGTRPDLTDQPLPDADHTWYTDGSSFLQEGQRKAGAAVTTETEVVWAKALPAGTSAQRAELIALTQALKMAEGKKLNVYTDSRYAFATAHIHGEIYRRRGWLTSEGKEIKNKDEILALLKALFLPKRLSIIHCPGHQKGNRAEARGNRMADQAAREVATRETPETSTLLAGKRTADGSEFEKRTADGSEFESPKKKAKVE

SEQ ID NO: 2475 - protein, 2093 aa, synthetic construct
  source 1..2093: note = Description of Artificial Sequence: Synthetic polypeptide
MPAAKRVKLDGGDKKYSIGLDIGTNSVGWAVITDEYKVPSKKFKVLGNTDRHSIKKNLIGALLFDSGETAEATRLKRTARRRYTRRKNRICYLQEIFSNEMAKVDDSFFHRLEESFLVEEDKKHERHPIFGNIVDEVAYHEKYPTIYHLRKKLVDSTDKADLRLIYLALAHMIKFRGHFLIEGDLNPDNSDVDKLFIQLVQTYNQLFEENPINASGVDAKAILSARLSKSRRLENLIAQLPGEKKNGLFGNLIALSLGLTPNFKSNFDLAEDAKLQLSKDTYDDDLDNLLAQIGDQYADLFLAAKNLSDAILLSDILRVNTEITKAPLSASMIKRYDEHHQDLTLLKALVRQQLPEKYKEIFFDQSKNGYAGYIDGGASQEEFYKFIKPILEKMDGTEELLVKLNREDLLRKQRTFDNGSIPHQIHLGELHAILRRQEDFYPFLKDNREKIEKILTFRIPYYVGPLARGNSRFAWMTRKSEETITPWNFEEVVDKGASAQSFIERMTNFDKNLPNEKVLPKHSLLYEYFTVYNELTKVKYVTEGMRKPAFLSGEQKKAIVDLLFKTNRKVTVKQLKEDYFKKIECFDSVEISGVEDRFNASLGTYHDLLKIIKDKDFLDNEENEDILEDIVLTLTLFEDREMIEERLKTYAHLFDDKVMKQLKRRRYTGWGRLSRKLINGIRDKQSGKTILDFLKSDGFANRNFMQLIHDDSLTFKEDIQKAQVSGQGDSLHEHIANLAGSPAIKKGILQTVKVVDELVKVMGRHKPENIVIEMARENQTTQKGQKNSRERMKRIEEGIKELGSQILKEHPVENTQLQNEKLYLYYLQNGRDMYVDQELDINRLSDYDVDHIVPQSFLKDDSIDNKVLTRSDKARGKSDNVPSEEVVKKMKNYWRQLLNAKLITQRKFDNLTKAERGGLSELDKAGFIKRQLVETRQITKHVAQILDSRMNTKYDENDKLIREVKVITLKSKLVSDFRKDFQFYKVREINNYHHAHDAYLNAVVGTALIKKYPKLESEFVYGDYKVYDVRKMIAKSEQEIGKATAKYFFYSNIMNFFKTEITLANGEIRKRPLIETNGETGEIVWDKGRDFATVRKVLSMPQVNIVKKTEVQTGGFSKESILPKRNSDKLIARKKDWDPKKYGGFDSPTVAYSVLVVAKVEKGKSKKLKSVKELLGITIMERSSFEKNPIDFLEAKGYKEVKKDLIIKLPKYSLFELENGRKRMLASAGELQKGNELALPSKYVNFLYLASHYEKLKGSPEDNEQKQLFVEQHKHYLDEIIEQISEFSKRVILADANLDKVLSAYNKHRDKPIREQAENIIHLFTLTNLGAPAAFKYFDTTIDRKRYTSTKEVLDATLIHQSITGLYETRIDLSQLGGDGGGSSEAAAKGGTLNIEDEYRLHETSKGPDVPLGSTWLSDFPQAWAETGGMGLAVRQAPLIIPLKATSTPVSIKQYPMSQEARLGIKPHIQRLLDQGILVPCQSPWNTPLLPVKKPGTNDYRPVQDLREVNKRVEDIHPTVPNPYNLLSGLPPSHQWYTVLDLKDAFFCLRLHPTSQSLFAFEWRDPEMGISGQLTWTRLPQGFKNSPTLFNEALHRDLADFRIQHPDLILLQYVDDLLLAATSELDCQQGTRALLQTLGDLGYRASAKKAQICQKQVKYLGYLLKEGQRWLTEARKETVMGQPTPKTPRQLREFLGTAGFCRLWIPGFAEMAAPLYPLTKPGTLFEWGPDQQKAYQEIKQALLTAPALGLPDLTKPFELFVDEKQGYAKGVLTQKLGPWRRPVAYLSKKLDPVAAGWPPCLRMVAAIAVLTKDAGKLTMGQPLVILAPHAVEALVKQPPDRWLSNARMTHYQALLLDTDRVQFGPIVALNPATLLPLPEEGLQHDCLDILAEAHGTRPDLTDQPLPDADHTWYTDGSSFLQEGQRKAGAAVTTETEVVWAKALPAGTSAQRAELIALTQALKMAEGKKLNVYTDSRYAFATAHIHGEIYRRRGWLTSEGKEIKNKDEILALLKALFLPKRLSIIHCPGHQKGNRAEARGNRMADQAAREVATRETPETSTLLAGKRTADGSEFEKRTADGSEFESPKKKAKVE

SEQ ID NO: 2476 - protein, 2094 aa, synthetic construct
  source 1..2094: note = Description of Artificial Sequence: Synthetic polypeptide
MPAAKRVKLDGGDKKYSIGLDIGTNSVGWAVITDEYKVPSKKFKVLGNTDRHSIKKNLIGALLFDSGETAEATRLKRTARRRYTRRKNRICYLQEIFSNEMAKVDDSFFHRLEESFLVEEDKKHERHPIFGNIVDEVAYHEKYPTIYHLRKKLVDSTDKADLRLIYLALAHMIKFRGHFLIEGDLNPDNSDVDKLFIQLVQTYNQLFEENPINASGVDAKAILSARLSKSRRLENLIAQLPGEKKNGLFGNLIALSLGLTPNFKSNFDLAEDAKLQLSKDTYDDDLDNLLAQIGDQYADLFLAAKNLSDAILLSDILRVNTEITKAPLSASMIKRYDEHHQDLTLLKALVRQQLPEKYKEIFFDQSKNGYAGYIDGGASQEEFYKFIKPILEKMDGTEELLVKLNREDLLRKQRTFDNGSIPHQIHLGELHAILRRQEDFYPFLKDNREKIEKILTFRIPYYVGPLARGNSRFAWMTRKSEETITPWNFEEVVDKGASAQSFIERMTNFDKNLPNEKVLPKHSLLYEYFTVYNELTKVKYVTEGMRKPAFLSGEQKKAIVDLLFKTNRKVTVKQLKEDYFKKIECFDSVEISGVEDRFNASLGTYHDLLKIIKDKDFLDNEENEDILEDIVLTLTLFEDREMIEERLKTYAHLFDDKVMKQLKRRRYTGWGRLSRKLINGIRDKQSGKTILDFLKSDGFANRNFMQLIHDDSLTFKEDIQKAQVSGQGDSLHEHIANLAGSPAIKKGILQTVKVVDELVKVMGRHKPENIVIEMARENQTTQKGQKNSRERMKRIEEGIKELGSQILKEHPVENTQLQNEKLYLYYLQNGRDMYVDQELDINRLSDYDVDHIVPQSFLKDDSIDNKVLTRSDKARGKSDNVPSEEVVKKMKNYWRQLLNAKLITQRKFDNLTKAERGGLSELDKAGFIKRQLVETRQITKHVAQILDSRMNTKYDENDKLIREVKVITLKSKLVSDFRKDFQFYKVREINNYHHAHDAYLNAVVGTALIKKYPKLESEFVYGDYKVYDVRKMIAKSEQEIGKATAKYFFYSNIMNFFKTEITLANGEIRKRPLIETNGETGEIVWDKGRDFATVRKVLSMPQVNIVKKTEVQTGGFSKESILPKRNSDKLIARKKDWDPKKYGGFDSPTVAYSVLVVAKVEKGKSKKLKSVKELLGITIMERSSFEKNPIDFLEAKGYKEVKKDLIIKLPKYSLFELENGRKRMLASAGELQKGNELALPSKYVNFLYLASHYEKLKGSPEDNEQKQLFVEQHKHYLDEIIEQISEFSKRVILADANLDKVLSAYNKHRDKPIREQAENIIHLFTLTNLGAPAAFKYFDTTIDRKRYTSTKEVLDATLIHQSITGLYETRIDLSQLGGDGGGGSPAPGGGGGTLNIEDEYRLHETSKGPDVPLGSTWLSDFPQAWAETGGMGLAVRQAPLIIPLKATSTPVSIKQYPMSQEARLGIKPHIQRLLDQGILVPCQSPWNTPLLPVKKPGTNDYRPVQDLREVNKRVEDIHPTVPNPYNLLSGLPPSHQWYTVLDLKDAFFCLRLHPTSQSLFAFEWRDPEMGISGQLTWTRLPQGFKNSPTLFNEALHRDLADFRIQHPDLILLQYVDDLLLAATSELDCQQGTRALLQTLGDLGYRASAKKAQICQKQVKYLGYLLKEGQRWLTEARKETVMGQPTPKTPRQLREFLGTAGFCRLWIPGFAEMAAPLYPLTKPGTLFEWGPDQQKAYQEIKQALLTAPALGLPDLTKPFELFVDEKQGYAKGVLTQKLGPWRRPVAYLSKKLDPVAAGWPPCLRMVAAIAVLTKDAGKLTMGQPLVILAPHAVEALVKQPPDRWLSNARMTHYQALLLDTDRVQFGPIVALNPATLLPLPEEGLQHDCLDILAEAHGTRPDLTDQPLPDADHTWYTDGSSFLQEGQRKAGAAVTTETEVVWAKALPAGTSAQRAELIALTQALKMAEGKKLNVYTDSRYAFATAHIHGEIYRRRGWLTSEGKEIKNKDEILALLKALFLPKRLSIIHCPGHQKGNRAEARGNRMADQAAREVATRETPETSTLLAGKRTADGSEFEKRTADGSEFESPKKKAKVE

SEQ ID NO: 2477 - protein, 2091 aa, synthetic construct
  source 1..2091: note = Description of Artificial Sequence: Synthetic polypeptide
MPAAKRVKLDGGDKKYSIGLDIGTNSVGWAVITDEYKVPSKKFKVLGNTDRHSIKKNLIGALLFDSGETAEATRLKRTARRRYTRRKNRICYLQEIFSNEMAKVDDSFFHRLEESFLVEEDKKHERHPIFGNIVDEVAYHEKYPTIYHLRKKLVDSTDKADLRLIYLALAHMIKFRGHFLIEGDLNPDNSDVDKLFIQLVQTYNQLFEENPINASGVDAKAILSARLSKSRRLENLIAQLPGEKKNGLFGNLIALSLGLTPNFKSNFDLAEDAKLQLSKDTYDDDLDNLLAQIGDQYADLFLAAKNLSDAILLSDILRVNTEITKAPLSASMIKRYDEHHQDLTLLKALVRQQLPEKYKEIFFDQSKNGYAGYIDGGASQEEFYKFIKPILEKMDGTEELLVKLNREDLLRKQRTFDNGSIPHQIHLGELHAILRRQEDFYPFLKDNREKIEKILTFRIPYYVGPLARGNSRFAWMTRKSEETITPWNFEEVVDKGASAQSFIERMTNFDKNLPNEKVLPKHSLLYEYFTVYNELTKVKYVTEGMRKPAFLSGEQKKAIVDLLFKTNRKVTVKQLKEDYFKKIECFDSVEISGVEDRFNASLGTYHDLLKIIKDKDFLDNEENEDILEDIVLTLTLFEDREMIEERLKTYAHLFDDKVMKQLKRRRYTGWGRLSRKLINGIRDKQSGKTILDFLKSDGFANRNFMQLIHDDSLTFKEDIQKAQVSGQGDSLHEHIANLAGSPAIKKGILQTVKVVDELVKVMGRHKPENIVIEMARENQTTQKGQKNSRERMKRIEEGIKELGSQILKEHPVENTQLQNEKLYLYYLQNGRDMYVDQELDINRLSDYDVDHIVPQSFLKDDSIDNKVLTRSDKARGKSDNVPSEEVVKKMKNYWRQLLNAKLITQRKFDNLTKAERGGLSELDKAGFIKRQLVETRQITKHVAQILDSRMNTKYDENDKLIREVKVITLKSKLVSDFRKDFQFYKVREINNYHHAHDAYLNAVVGTALIKKYPKLESEFVYGDYKVYDVRKMIAKSEQEIGKATAKYFFYSNIMNFFKTEITLANGEIRKRPLIETNGETGEIVWDKGRDFATVRKVLSMPQVNIVKKTEVQTGGFSKESILPKRNSDKLIARKKDWDPKKYGGFDSPTVAYSVLVVAKVEKGKSKKLKSVKELLGITIMERSSFEKNPIDFLEAKGYKEVKKDLIIKLPKYSLFELENGRKRMLASAGELQKGNELALPSKYVNFLYLASHYEKLKGSPEDNEQKQLFVEQHKHYLDEIIEQISEFSKRVILADANLDKVLSAYNKHRDKPIREQAENIIHLFTLTNLGAPAAFKYFDTTIDRKRYTSTKEVLDATLIHQSITGLYETRIDLSQLGGDGGGSSPAPGGTLNIEDEYRLHETSKGPDVPLGSTWLSDFPQAWAETGGMGLAVRQAPLIIPLKATSTPVSIKQYPMSQEARLGIKPHIQRLLDQGILVPCQSPWNTPLLPVKKPGTNDYRPVQDLREVNKRVEDIHPTVPNPYNLLSGLPPSHQWYTVLDLKDAFFCLRLHPTSQSLFAFEWRDPEMGISGQLTWTRLPQGFKNSPTLFNEALHRDLADFRIQHPDLILLQYVDDLLLAATSELDCQQGTRALLQTLGDLGYRASAKKAQICQKQVKYLGYLLKEGQRWLTEARKETVMGQPTPKTPRQLREFLGTAGFCRLWIPGFAEMAAPLYPLTKPGTLFEWGPDQQKAYQEIKQALLTAPALGLPDLTKPFELFVDEKQGYAKGVLTQKLGPWRRPVAYLSKKLDPVAAGWPPCLRMVAAIAVLTKDAGKLTMGQPLVILAPHAVEALVKQPPDRWLSNARMTHYQALLLDTDRVQFGPIVALNPATLLPLPEEGLQHDCLDILAEAHGTRPDLTDQPLPDADHTWYTDGSSFLQEGQRKAGAAVTTETEVVWAKALPAGTSAQRAELIALTQALKMAEGKKLNVYTDSRYAFATAHIHGEIYRRRGWLTSEGKEIKNKDEILALLKALFLPKRLSIIHCPGHQKGNRAEARGNRMADQAAREVATRETPETSTLLAGKRTADGSEFEKRTADGSEFESPKKKAKVE

SEQ ID NO: 2478 - protein, 2091 aa, synthetic construct
  source 1..2091: note = Description of Artificial Sequence: Synthetic polypeptide
MPAAKRVKLDGGDKKYSIGLDIGTNSVGWAVITDEYKVPSKKFKVLGNTDRHSIKKNLIGALLFDSGETAEATRLKRTARRRYTRRKNRICYLQEIFSNEMAKVDDSFFHRLEESFLVEEDKKHERHPIFGNIVDEVAYHEKYPTIYHLRKKLVDSTDKADLRLIYLALAHMIKFRGHFLIEGDLNPDNSDVDKLFIQLVQTYNQLFEENPINASGVDAKAILSARLSKSRRLENLIAQLPGEKKNGLFGNLIALSLGLTPNFKSNFDLAEDAKLQLSKDTYDDDLDNLLAQIGDQYADLFLAAKNLSDAILLSDILRVNTEITKAPLSASMIKRYDEHHQDLTLLKALVRQQLPEKYKEIFFDQSKNGYAGYIDGGASQEEFYKFIKPILEKMDGTEELLVKLNREDLLRKQRTFDNGSIPHQIHLGELHAILRRQEDFYPFLKDNREKIEKILTFRIPYYVGPLARGNSRFAWMTRKSEETITPWNFEEVVDKGASAQSFIERMTNFDKNLPNEKVLPKHSLLYEYFTVYNELTKVKYVTEGMRKPAFLSGEQKKAIVDLLFKTNRKVTVKQLKEDYFKKIECFDSVEISGVEDRFNASLGTYHDLLKIIKDKDFLDNEENEDILEDIVLTLTLFEDREMIEERLKTYAHLFDDKVMKQLKRRRYTGWGRLSRKLINGIRDKQSGKTILDFLKSDGFANRNFMQLIHDDSLTFKEDIQKAQVSGQGDSLHEHIANLAGSPAIKKGILQTVKVVDELVKVMGRHKPENIVIEMARENQTTQKGQKNSRERMKRIEEGIKELGSQILKEHPVENTQLQNEKLYLYYLQNGRDMYVDQELDINRLSDYDVDHIVPQSFLKDDSIDNKVLTRSDKARGKSDNVPSEEVVKKMKNYWRQLLNAKLITQRKFDNLTKAERGGLSELDKAGFIKRQLVETRQITKHVAQILDSRMNTKYDENDKLIREVKVITLKSKLVSDFRKDFQFYKVREINNYHHAHDAYLNAVVGTALIKKYPKLESEFVYGDYKVYDVRKMIAKSEQEIGKATAKYFFYSNIMNFFKTEITLANGEIRKRPLIETNGETGEIVWDKGRDFATVRKVLSMPQVNIVKKTEVQTGGFSKESILPKRNSDKLIARKKDWDPKKYGGFDSPTVAYSVLVVAKVEKGKSKKLKSVKELLGITIMERSSFEKNPIDFLEAKGYKEVKKDLIIKLPKYSLFELENGRKRMLASAGELQKGNELALPSKYVNFLYLASHYEKLKGSPEDNEQKQLFVEQHKHYLDEIIEQISEFSKRVILADANLDKVLSAYNKHRDKPIREQAENIIHLFTLTNLGAPAAFKYFDTTIDRKRYTSTKEVLDATLIHQSITGLYETRIDLSQLGGDGGGGSGGGGGTLNIEDEYRLHETSKGPDVPLGSTWLSDFPQAWAETGGMGLAVRQAPLIIPLKATSTPVSIKQYPMSQEARLGIKPHIQRLLDQGILVPCQSPWNTPLLPVKKPGTNDYRPVQDLREVNKRVEDIHPTVPNPYNLLSGLPPSHQWYTVLDLKDAFFCLRLHPTSQSLFAFEWRDPEMGISGQLTWTRLPQGFKNSPTLFNEALHRDLADFRIQHPDLILLQYVDDLLLAATSELDCQQGTRALLQTLGDLGYRASAKKAQICQKQVKYLGYLLKEGQRWLTEARKETVMGQPTPKTPRQLREFLGTAGFCRLWIPGFAEMAAPLYPLTKPGTLFEWGPDQQKAYQEIKQALLTAPALGLPDLTKPFELFVDEKQGYAKGVLTQKLGPWRRPVAYLSKKLDPVAAGWPPCLRMVAAIAVLTKDAGKLTMGQPLVILAPHAVEALVKQPPDRWLSNARMTHYQALLLDTDRVQFGPIVALNPATLLPLPEEGLQHDCLDILAEAHGTRPDLTDQPLPDADHTWYTDGSSFLQEGQRKAGAAVTTETEVVWAKALPAGTSAQRAELIALTQALKMAEGKKLNVYTDSRYAFATAHIHGEIYRRRGWLTSEGKEIKNKDEILALLKALFLPKRLSIIHCPGHQKGNRAEARGNRMADQAAREVATRETPETSTLLAGKRTADGSEFEKRTADGSEFESPKKKAKVE

SEQ ID NO: 2479 - protein, 2094 aa, synthetic construct
  source 1..2094: note = Description of Artificial Sequence: Synthetic polypeptide
MPAAKRVKLDGGDKKYSIGLDIGTNSVGWAVITDEYKVPSKKFKVLGNTDRHSIKKNLIGALLFDSGETAEATRLKRTARRRYTRRKNRICYLQEIFSNEMAKVDDSFFHRLEESFLVEEDKKHERHPIFGNIVDEVAYHEKYPTIYHLRKKLVDSTDKADLRLIYLALAHMIKFRGHFLIEGDLNPDNSDVDKLFIQLVQTYNQLFEENPINASGVDAKAILSARLSKSRRLENLIAQLPGEKKNGLFGNLIALSLGLTPNFKSNFDLAEDAKLQLSKDTYDDDLDNLLAQIGDQYADLFLAAKNLSDAILLSDILRVNTEITKAPLSASMIKRYDEHHQDLTLLKALVRQQLPEKYKEIFFDQSKNGYAGYIDGGASQEEFYKFIKPILEKMDGTEELLVKLNREDLLRKQRTFDNGSIPHQIHLGELHAILRRQEDFYPFLKDNREKIEKILTFRIPYYVGPLARGNSRFAWMTRKSEETITPWNFEEVVDKGASAQSFIERMTNFDKNLPNEKVLPKHSLLYEYFTVYNELTKVKYVTEGMRKPAFLSGEQKKAIVDLLFKTNRKVTVKQLKEDYFKKIECFDSVEISGVEDRFNASLGTYHDLLKIIKDKDFLDNEENEDILEDIVLTLTLFEDREMIEERLKTYAHLFDDKVMKQLKRRRYTGWGRLSRKLINGIRDKQSGKTILDFLKSDGFANRNFMQLIHDDSLTFKEDIQKAQVSGQGDSLHEHIANLAGSPAIKKGILQTVKVVDELVKVMGRHKPENIVIEMARENQTTQKGQKNSRERMKRIEEGIKELGSQILKEHPVENTQLQNEKLYLYYLQNGRDMYVDQELDINRLSDYDVDHIVPQSFLKDDSIDNKVLTRSDKARGKSDNVPSEEVVKKMKNYWRQLLNAKLITQRKFDNLTKAERGGLSELDKAGFIKRQLVETRQITKHVAQILDSRMNTKYDENDKLIREVKVITLKSKLVSDFRKDFQFYKVREINNYHHAHDAYLNAVVGTALIKKYPKLESEFVYGDYKVYDVRKMIAKSEQEIGKATAKYFFYSNIMNFFKTEITLANGEIRKRPLIETNGETGEIVWDKGRDFATVRKVLSMPQVNIVKKTEVQTGGFSKESILPKRNSDKLIARKKDWDPKKYGGFDSPTVAYSVLVVAKVEKGKSKKLKSVKELLGITIMERSSFEKNPIDFLEAKGYKEVKKDLIIKLPKYSLFELENGRKRMLASAGELQKGNELALPSKYVNFLYLASHYEKLKGSPEDNEQKQLFVEQHKHYLDEIIEQISEFSKRVILADANLDKVLSAYNKHRDKPIREQAENIIHLFTLTNLGAPAAFKYFDTTIDRKRYTSTKEVLDATLIHQSITGLYETRIDLSQLGGDGGGGSGGGGSSGGTLNIEDEYRLHETSKGPDVPLGSTWLSDFPQAWAETGGMGLAVRQAPLIIPLKATSTPVSIKQYPMSQEARLGIKPHIQRLLDQGILVPCQSPWNTPLLPVKKPGTNDYRPVQDLREVNKRVEDIHPTVPNPYNLLSGLPPSHQWYTVLDLKDAFFCLRLHPTSQSLFAFEWRDPEMGISGQLTWTRLPQGFKNSPTLFNEALHRDLADFRIQHPDLILLQYVDDLLLAATSELDCQQGTRALLQTLGDLGYRASAKKAQICQKQVKYLGYLLKEGQRWLTEARKETVMGQPTPKTPRQLREFLGTAGFCRLWIPGFAEMAAPLYPLTKPGTLFEWGPDQQKAYQEIKQALLTAPALGLPDLTKPFELFVDEKQGYAKGVLTQKLGPWRRPVAYLSKKLDPVAAGWPPCLRMVAAIAVLTKDAGKLTMGQPLVILAPHAVEALVKQPPDRWLSNARMTHYQALLLDTDRVQFGPIVALNPATLLPLPEEGLQHDCLDILAEAHGTRPDLTDQPLPDADHTWYTDGSSFLQEGQRKAGAAVTTETEVVWAKALPAGTSAQRAELIALTQALKMAEGKKLNVYTDSRYAFATAHIHGEIYRRRGWLTSEGKEIKNKDEILALLKALFLPKRLSIIHCPGHQKGNRAEARGNRMADQAAREVATRETPETSTLLAGKRTADGSEFEKRTADGSEFESPKKKAKVE

SEQ ID NO: 2480 - protein, 2096 aa, synthetic construct
  source 1..2096: note = Description of Artificial Sequence: Synthetic polypeptide
MPAAKRVKLDGGDKKYSIGLDIGTNSVGWAVITDEYKVPSKKFKVLGNTDRHSIKKNLIGALLFDSGETAEATRLKRTARRRYTRRKNRICYLQEIFSNEMAKVDDSFFHRLEESFLVEEDKKHERHPIFGNIVDEVAYHEKYPTIYHLRKKLVDSTDKADLRLIYLALAHMIKFRGHFLIEGDLNPDNSDVDKLFIQLVQTYNQLFEENPINASGVDAKAILSARLSKSRRLENLIAQLPGEKKNGLFGNLIALSLGLTPNFKSNFDLAEDAKLQLSKDTYDDDLDNLLAQIGDQYADLFLAAKNLSDAILLSDILRVNTEITKAPLSASMIKRYDEHHQDLTLLKALVRQQLPEKYKEIFFDQSKNGYAGYIDGGASQEEFYKFIKPILEKMDGTEELLVKLNREDLLRKQRTFDNGSIPHQIHLGELHAILRRQEDFYPFLKDNREKIEKILTFRIPYYVGPLARGNSRFAWMTRKSEETITPWNFEEVVDKGASAQSFIERMTNFDKNLPNEKVLPKHSLLYEYFTVYNELTKVKYVTEGMRKPAFLSGEQKKAIVDLLFKTNRKVTVKQLKEDYFKKIECFDSVEISGVEDRFNASLGTYHDLLKIIKDKDFLDNEENEDILEDIVLTLTLFEDREMIEERLKTYAHLFDDKVMKQLKRRRYTGWGRLSRKLINGIRDKQSGKTILDFLKSDGFANRNFMQLIHDDSLTFKEDIQKAQVSGQGDSLHEHIANLAGSPAIKKGILQTVKVVDELVKVMGRHKPENIVIEMARENQTTQKGQKNSRERMKRIEEGIKELGSQILKEHPVENTQLQNEKLYLYYLQNGRDMYVDQELDINRLSDYDVDHIVPQSFLKDDSIDNKVLTRSDKARGKSDNVPSEEVVKKMKNYWRQLLNAKLITQRKFDNLTKAERGGLSELDKAGFIKRQLVETRQITKHVAQILDSRMNTKYDENDKLIREVKVITLKSKLVSDFRKDFQFYKVREINNYHHAHDAYLNAVVGTALIKKYPKLESEFVYGDYKVYDVRKMIAKSEQEIGKATAKYFFYSNIMNFFKTEITLANGEIRKRPLIETNGETGEIVWDKGRDFATVRKVLSMPQVNIVKKTEVQTGGFSKESILPKRNSDKLIARKKDWDPKKYGGFDSPTVAYSVLVVAKVEKGKSKKLKSVKELLGITIMERSSFEKNPIDFLEAKGYKEVKKDLIIKLPKYSLFELENGRKRMLASAGELQKGNELALPSKYVNFLYLASHYEKLKGSPEDNEQKQLFVEQHKHYLDEIIEQISEFSKRVILADANLDKVLSAYNKHRDKPIREQAENIIHLFTLTNLGAPAAFKYFDTTIDRKRYTSTKEVLDATLIHQSITGLYETRIDLSQLGGDGGGSSPAPEAAAKGGTLNIEDEYRLHETSKGPDVPLGSTWLSDFPQAWAETGGMGLAVRQAPLIIPLKATSTPVSIKQYPMSQEARLGIKPHIQRLLDQGILVPCQSPWNTPLLPVKKPGTNDYRPVQDLREVNKRVEDIHPTVPNPYNLLSGLPPSHQWYTVLDLKDAFFCLRLHPTSQSLFAFEWRDPEMGISGQLTWTRLPQGFKNSPTLFNEALHRDLADFRIQHPDLILLQYVDDLLLAATSELDCQQGTRALLQTLGDLGYRASAKKAQICQKQVKYLGYLLKEGQRWLTEARKETVMGQPTPKTPRQLREFLGTAGFCRLWIPGFAEMAAPLYPLTKPGTLFEWGPDQQKAYQEIKQALLTAPALGLPDLTKPFELFVDEKQGYAKGVLTQKLGPWRRPVAYLSKKLDPVAAGWPPCLRMVAAIAVLTKDAGKLTMGQPLVILAPHAVEALVKQPPDRWLSNARMTHYQALLLDTDRVQFGPIVALNPATLLPLPEEGLQHDCLDILAEAHGTRPDLTDQPLPDADHTWYTDGSSFLQEGQRKAGAAVTTETEVVWAKALPAGTSAQRAELIALTQALKMAEGKKLNVYTDSRYAFATAHIHGEIYRRRGWLTSEGKEIKNKDEILALLKALFLPKRLSIIHCPGHQKGNRAEARGNRMADQAAREVATRETPETSTLLAGKRTADGSEFEKRTADGSEFESPKKKAKVE

SEQ ID NO: 2481 - protein, 2091 aa, synthetic construct
  source 1..2091: note = Description of Artificial Sequence: Synthetic polypeptide
MPAAKRVKLDGGDKKYSIGLDIGTNSVGWAVITDEYKVPSKKFKVLGNTDRHSIKKNLIGALLFDSGETAEATRLKRTARRRYTRRKNRICYLQEIFSNEMAKVDDSFFHRLEESFLVEEDKKHERHPIFGNIVDEVAYHEKYPTIYHLRKKLVDSTDKADLRLIYLALAHMIKFRGHFLIEGDLNPDNSDVDKLFIQLVQTYNQLFEENPINASGVDAKAILSARLSKSRRLENLIAQLPGEKKNGLFGNLIALSLGLTPNFKSNFDLAEDAKLQLSKDTYDDDLDNLLAQIGDQYADLFLAAKNLSDAILLSDILRVNTEITKAPLSASMIKRYDEHHQDLTLLKALVRQQLPEKYKEIFFDQSKNGYAGYIDGGASQEEFYKFIKPILEKMDGTEELLVKLNREDLLRKQRTFDNGSIPHQIHLGELHAILRRQEDFYPFLKDNREKIEKILTFRIPYYVGPLARGNSRFAWMTRKSEETITPWNFEEVVDKGASAQSFIERMTNFDKNLPNEKVLPKHSLLYEYFTVYNELTKVKYVTEGMRKPAFLSGEQKKAIVDLLFKTNRKVTVKQLKEDYFKKIECFDSVEISGVEDRFNASLGTYHDLLKIIKDKDFLDNEENEDILEDIVLTLTLFEDREMIEERLKTYAHLFDDKVMKQLKRRRYTGWGRLSRKLINGIRDKQSGKTILDFLKSDGFANRNFMQLIHDDSLTFKEDIQKAQVSGQGDSLHEHIANLAGSPAIKKGILQTVKVVDELVKVMGRHKPENIVIEMARENQTTQKGQKNSRERMKRIEEGIKELGSQILKEHPVENTQLQNEKLYLYYLQNGRDMYVDQELDINRLSDYDVDHIVPQSFLKDDSIDNKVLTRSDKARGKSDNVPSEEVVKKMKNYWRQLLNAKLITQRKFDNLTKAERGGLSELDKAGFIKRQLVETRQITKHVAQILDSRMNTKYDENDKLIREVKVITLKSKLVSDFRKDFQFYKVREINNYHHAHDAYLNAVVGTALIKKYPKLESEFVYGDYKVYDVRKMIAKSEQEIGKATAKYFFYSNIMNFFKTEITLANGEIRKRPLIETNGETGEIVWDKGRDFATVRKVLSMPQVNIVKKTEVQTGGFSKESILPKRNSDKLIARKKDWDPKKYGGFDSPTVAYSVLVVAKVEKGKSKKLKSVKELLGITIMERSSFEKNPIDFLEAKGYKEVKKDLIIKLPKYSLFELENGRKRMLASAGELQKGNELALPSKYVNFLYLASHYEKLKGSPEDNEQKQLFVEQHKHYLDEIIEQISEFSKRVILADANLDKVLSAYNKHRDKPIREQAENIIHLFTLTNLGAPAAFKYFDTTIDRKRYTSTKEVLDATLIHQSITGLYETRIDLSQLGGDGGGGSPAPGGTLNIEDEYRLHETSKGPDVPLGSTWLSDFPQAWAETGGMGLAVRQAPLIIPLKATSTPVSIKQYPMSQEARLGIKPHIQRLLDQGILVPCQSPWNTPLLPVKKPGTNDYRPVQDLREVNKRVEDIHPTVPNPYNLLSGLPPSHQWYTVLDLKDAFFCLRLHPTSQSLFAFEWRDPEMGISGQLTWTRLPQGFKNSPTLFNEALHRDLADFRIQHPDLILLQYVDDLLLAATSELDCQQGTRALLQTLGDLGYRASAKKAQICQKQVKYLGYLLKEGQRWLTEARKETVMGQPTPKTPRQLREFLGTAGFCRLWIPGFAEMAAPLYPLTKPGTLFEWGPDQQKAYQEIKQALLTAPALGLPDLTKPFELFVDEKQGYAKGVLTQKLGPWRRPVAYLSKKLDPVAAGWPPCLRMVAAIAVLTKDAGKLTMGQPLVILAPHAVEALVKQPPDRWLSNARMTHYQALLLDTDRVQFGPIVALNPATLLPLPEEGLQHDCLDILAEAHGTRPDLTDQPLPDADHTWYTDGSSFLQEGQRKAGAAVTTETEVVWAKALPAGTSAQRAELIALTQALKMAEGKKLNVYTDSRYAFATAHIHGEIYRRRGWLTSEGKEIKNKDEILALLKALFLPKRLSIIHCPGHQKGNRAEARGNRMADQAAREVATRETPETSTLLAGKRTADGSEFEKRTADGSEFESPKKKAKVE

SEQ ID NO: 2482 - protein, 2090 aa, synthetic construct
  source 1..2090: note = Description of Artificial Sequence: Synthetic polypeptide
MPAAKRVKLDGGDKKYSIGLDIGTNSVGWAVITDEYKVPSKKFKVLGNTDRHSIKKNLIGALLFDSGETAEATRLKRTARRRYTRRKNRICYLQEIFSNEMAKVDDSFFHRLEESFLVEEDKKHERHPIFGNIVDEVAYHEKYPTIYHLRKKLVDSTDKADLRLIYLALAHMIKFRGHFLIEGDLNPDNSDVDKLFIQLVQTYNQLFEENPINASGVDAKAILSARLSKSRRLENLIAQLPGEKKNGLFGNLIALSLGLTPNFKSNFDLAEDAKLQLSKDTYDDDLDNLLAQIGDQYADLFLAAKNLSDAILLSDILRVNTEITKAPLSASMIKRYDEHHQDLTLLKALVRQQLPEKYKEIFFDQSKNGYAGYIDGGASQEEFYKFIKPILEKMDGTEELLVKLNREDLLRKQRTFDNGSIPHQIHLGELHAILRRQEDFYPFLKDNREKIEKILTFRIPYYVGPLARGNSRFAWMTRKSEETITPWNFEEVVDKGASAQSFIERMTNFDKNLPNEKVLPKHSLLYEYFTVYNELTKVKYVTEGMRKPAFLSGEQKKAIVDLLFKTNRKVTVKQLKEDYFKKIECFDSVEISGVEDRFNASLGTYHDLLKIIKDKDFLDNEENEDILEDIVLTLTLFEDREMIEERLKTYAHLFDDKVMKQLKRRRYTGWGRLSRKLINGIRDKQSGKTILDFLKSDGFANRNFMQLIHDDSLTFKEDIQKAQVSGQGDSLHEHIANLAGSPAIKKGILQTVKVVDELVKVMGRHKPENIVIEMARENQTTQKGQKNSRERMKRIEEGIKELGSQILKEHPVENTQLQNEKLYLYYLQNGRDMYVDQELDINRLSDYDVDHIVPQSFLKDDSIDNKVLTRSDKARGKSDNVPSEEVVKKMKNYWRQLLNAKLITQRKFDNLTKAERGGLSELDKAGFIKRQLVETRQITKHVAQILDSRMNTKYDENDKLIREVKVITLKSKLVSDFRKDFQFYKVREINNYHHAHDAYLNAVVGTALIKKYPKLESEFVYGDYKVYDVRKMIAKSEQEIGKATAKYFFYSNIMNFFKTEITLANGEIRKRPLIETNGETGEIVWDKGRDFATVRKVLSMPQVNIVKKTEVQTGGFSKESILPKRNSDKLIARKKDWDPKKYGGFDSPTVAYSVLVVAKVEKGKSKKLKSVKELLGITIMERSSFEKNPIDFLEAKGYKEVKKDLIIKLPKYSLFELENGRKRMLASAGELQKGNELALPSKYVNFLYLASHYEKLKGSPEDNEQKQLFVEQHKHYLDEIIEQISEFSKRVILADANLDKVLSAYNKHRDKPIREQAENIIHLFTLTNLGAPAAFKYFDTTIDRKRYTSTKEVLDATLIHQSITGLYETRIDLSQLGGDGGGGGGSGGTLNIEDEYRLHETSKGPDVPLGSTWLSDFPQAWAETGGMGLAVRQAPLIIPLKATSTPVSIKQYPMSQEARLGIKPHIQRLLDQGILVPCQSPWNTPLLPVKKPGTNDYRPVQDLREVNKRVEDIHPTVPNPYNLLSGLPPSHQWYTVLDLKDAFFCLRLHPTSQSLFAFEWRDPEMGISGQLTWTRLPQGFKNSPTLFNEALHRDLADFRIQHPDLILLQYVDDLLLAATSELDCQQGTRALLQTLGDLGYRASAKKAQICQKQVKYLGYLLKEGQRWLTEARKETVMGQPTPKTPRQLREFLGTAGFCRLWIPGFAEMAAPLYPLTKPGTLFEWGPDQQKAYQEIKQALLTAPALGLPDLTKPFELFVDEKQGYAKGVLTQKLGPWRRPVAYLSKKLDPVAAGWPPCLRMVAAIAVLTKDAGKLTMGQPLVILAPHAVEALVKQPPDRWLSNARMTHYQALLLDTDRVQFGPIVALNPATLLPLPEEGLQHDCLDILAEAHGTRPDLTDQPLPDADHTWYTDGSSFLQEGQRKAGAAVTTETEVVWAKALPAGTSAQRAELIALTQALKMAEGKKLNVYTDSRYAFATAHIHGEIYRRRGWLTSEGKEIKNKDEILALLKALFLPKRLSIIHCPGHQKGNRAEARGNRMADQAAREVATRETPETSTLLAGKRTADGSEFEKRTADGSEFESPKKKAKVE

SEQ ID NO: 2483 - protein, 2096 aa, synthetic construct
  source 1..2096: note = Description of Artificial Sequence: Synthetic polypeptide
MPAAKRVKLDGGDKKYSIGLDIGTNSVGWAVITDEYKVPSKKFKVLGNTDRHSIKKNLIGALLFDSGETAEATRLKRTARRRYTRRKNRICYLQEIFSNEMAKVDDSFFHRLEESFLVEEDKKHERHPIFGNIVDEVAYHEKYPTIYHLRKKLVDSTDKADLRLIYLALAHMIKFRGHFLIEGDLNPDNSDVDKLFIQLVQTYNQLFEENPINASGVDAKAILSARLSKSRRLENLIAQLPGEKKNGLFGNLIALSLGLTPNFKSNFDLAEDAKLQLSKDTYDDDLDNLLAQIGDQYADLFLAAKNLSDAILLSDILRVNTEITKAPLSASMIKRYDEHHQDLTLLKALVRQQLPEKYKEIFFDQSKNGYAGYIDGGASQEEFYKFIKPILEKMDGTEELLVKLNREDLLRKQRTFDNGSIPHQIHLGELHAILRRQEDFYPFLKDNREKIEKILTFRIPYYVGPLARGNSRFAWMTRKSEETITPWNFEEVVDKGASAQSFIERMTNFDKNLPNEKVLPKHSLLYEYFTVYNELTKVKYVTEGMRKPAFLSGEQKKAIVDLLFKTNRKVTVKQLKEDYFKKIECFDSVEISGVEDRFNASLGTYHDLLKIIKDKDFLDNEENEDILEDIVLTLTLFEDREMIEERLKTYAHLFDDKVMKQLKRRRYTGWGRLSRKLINGIRDKQSGKTILDFLKSDGFANRNFMQLIHDDSLTFKEDIQKAQVSGQGDSLHEHIANLAGSPAIKKGILQTVKVVDELVKVMGRHKPENIVIEMARENQTTQKGQKNSRERMKRIEEGIKELGSQILKEHPVENTQLQNEKLYLYYLQNGRDMYVDQELDINRLSDYDVDHIVPQSFLKDDSIDNKVLTRSDKARGKSDNVPSEEVVKKMKNYWRQLLNAKLITQRKFDNLTKAERGGLSELDKAGFIKRQLVETRQITKHVAQILDSRMNTKYDENDKLIREVKVITLKSKLVSDFRKDFQFYKVREINNYHHAHDAYLNAVVGTALIKKYPKLESEFVYGDYKVYDVRKMIAKSEQEIGKATAKYFFYSNIMNFFKTEITLANGEIRKRPLIETNGETGEIVWDKGRDFATVRKVLSMPQVNIVKKTEVQTGGFSKESILPKRNSDKLIARKKDWDPKKYGGFDSPTVAYSVLVVAKVEKGKSKKLKSVKELLGITIMERSSFEKNPIDFLEAKGYKEVKKDLIIKLPKYSLFELENGRKRMLASAGELQKGNELALPSKYVNFLYLASHYEKLKGSPEDNEQKQLFVEQHKHYLDEIIEQISEFSKRVILADANLDKVLSAYNKHRDKPIREQAENIIHLFTLTNLGAPAAFKYFDTTIDRKRYTSTKEVLDATLIHQSITGLYETRIDLSQLGGDGGEAAAKGGGGGSGGTLNIEDEYRLHETSKGPDVPLGSTWLSDFPQAWAETGGMGLAVRQAPLIIPLKATSTPVSIKQYPMSQEARLGIKPHIQRLLDQGILVPCQSPWNTPLLPVKKPGTNDYRPVQDLREVNKRVEDIHPTVPNPYNLLSGLPPSHQWYTVLDLKDAFFCLRLHPTSQSLFAFEWRDPEMGISGQLTWTRLPQGFKNSPTLFNEALHRDLADFRIQHPDLILLQYVDDLLLAATSELDCQQGTRALLQTLGDLGYRASAKKAQICQKQVKYLGYLLKEGQRWLTEARKETVMGQPTPKTPRQLREFLGTAGFCRLWIPGFAEMAAPLYPLTKPGTLFEWGPDQQKAYQEIKQALLTAPALGLPDLTKPFELFVDEKQGYAKGVLTQKLGPWRRPVAYLSKKLDPVAAGWPPCLRMVAAIAVLTKDAGKLTMGQPLVILAPHAVEALVKQPPDRWLSNARMTHYQALLLDTDRVQFGPIVALNPATLLPLPEEGLQHDCLDILAEAHGTRPDLTDQPLPDADHTWYTDGSSFLQEGQRKAGAAVTTETEVVWAKALPAGTSAQRAELIALTQALKMAEGKKLNVYTDSRYAFATAHIHGEIYRRRGWLTSEGKEIKNKDEILALLKALFLPKRLSIIHCPGHQKGNRAEARGNRMADQAAREVATRETPETSTLLAGKRTADGSEFEKRTADGSEFESPKKKAKVE

SEQ ID NO: 2484 - protein, 2095 aa, synthetic construct
  source 1..2095: note = Description of Artificial Sequence: Synthetic polypeptide
MPAAKRVKLDGGDKKYSIGLDIGTNSVGWAVITDEYKVPSKKFKVLGNTDRHSIKKNLIGALLFDSGETAEATRLKRTARRRYTRRKNRICYLQEIFSNEMAKVDDSFFHRLEESFLVEEDKKHERHPIFGNIVDEVAYHEKYPTIYHLRKKLVDSTDKADLRLIYLALAHMIKFRGHFLIEGDLNPDNSDVDKLFIQLVQTYNQLFEENPINASGVDAKAILSARLSKSRRLENLIAQLPGEKKNGLFGNLIALSLGLTPNFKSNFDLAEDAKLQLSKDTYDDDLDNLLAQIGDQYADLFLAAKNLSDAILLSDILRVNTEITKAPLSASMIKRYDEHHQDLTLLKALVRQQLPEKYKEIFFDQSKNGYAGYIDGGASQEEFYKFIKPILEKMDGTEELLVKLNREDLLRKQRTFDNGSIPHQIHLGELHAILRRQEDFYPFLKDNREKIEKILTFRIPYYVGPLARGNSRFAWMTRKSEETITPWNFEEVVDKGASAQSFIERMTNFDKNLPNEKVLPKHSLLYEYFTVYNELTKVKYVTEGMRKPAFLSGEQKKAIVDLLFKTNRKVTVKQLKEDYFKKIECFDSVEISGVEDRFNASLGTYHDLLKIIKDKDFLDNEENEDILEDIVLTLTLFEDREMIEERLKTYAHLFDDKVMKQLKRRRYTGWGRLSRKLINGIRDKQSGKTILDFLKSDGFANRNFMQLIHDDSLTFKEDIQKAQVSGQGDSLHEHIANLAGSPAIKKGILQTVKVVDELVKVMGRHKPENIVIEMARENQTTQKGQKNSRERMKRIEEGIKELGSQILKEHPVENTQLQNEKLYLYYLQNGRDMYVDQELDINRLSDYDVDHIVPQSFLKDDSIDNKVLTRSDKARGKSDNVPSEEVVKKMKNYWRQLLNAKLITQRKFDNLTKAERGGLSELDKAGFIKRQLVETRQITKHVAQILDSRMNTKYDENDKLIREVKVITLKSKLVSDFRKDFQFYKVREINNYHHAHDAYLNAVVGTALIKKYPKLESEFVYGDYKVYDVRKMIAKSEQEIGKATAKYFFYSNIMNFFKTEITLANGEIRKRPLIETNGETGEIVWDKGRDFATVRKVLSMPQVNIVKKTEVQTGGFSKESILPKRNSDKLIARKKDWDPKKYGGFDSPTVAYSVLVVAKVEKGKSKKLKSVKELLGITIMERSSFEKNPIDFLEAKGYKEVKKDLIIKLPKYSLFELENGRKRMLASAGELQKGNELALPSKYVNFLYLASHYEKLKGSPEDNEQKQLFVEQHKHYLDEIIEQISEFSKRVILADANLDKVLSAYNKHRDKPIREQAENIIHLFTLTNLGAPAAFKYFDTTIDRKRYTSTKEVLDATLIHQSITGLYETRIDLSQLGGDGGEAAAKEAAAKGGTLNIEDEYRLHETSKGPDVPLGSTWLSDFPQAWAETGGMGLAVRQAPLIIPLKATSTPVSIKQYPMSQEARLGIKPHIQRLLDQGILVPCQSPWNTPLLPVKKPGTNDYRPVQDLREVNKRVEDIHPTVPNPYNLLSGLPPSHQWYTVLDLKDAFFCLRLHPTSQSLFAFEWRDPEMGISGQLTWTRLPQGFKNSPTLFNEALHRDLADFRIQHPDLILLQYVDDLLLAATSELDCQQGTRALLQTLGDLGYRASAKKAQICQKQVKYLGYLLKEGQRWLTEARKETVMGQPTPKTPRQLREFLGTAGFCRLWIPGFAEMAAPLYPLTKPGTLFEWGPDQQKAYQEIKQALLTAPALGLPDLTKPFELFVDEKQGYAKGVLTQKLGPWRRPVAYLSKKLDPVAAGWPPCLRMVAAIAVLTKDAGKLTMGQPLVILAPHAVEALVKQPPDRWLSNARMTHYQALLLDTDRVQFGPIVALNPATLLPLPEEGLQHDCLDILAEAHGTRPDLTDQPLPDADHTWYTDGSSFLQEGQRKAGAAVTTETEVVWAKALPAGTSAQRAELIALTQALKMAEGKKLNVYTDSRYAFATAHIHGEIYRRRGWLTSEGKEIKNKDEILALLKALFLPKRLSIIHCPGHQKGNRAEARGNRMADQAAREVATRETPETSTLLAGKRTADGSEFEKRTADGSEFESPKKKAKVE

SEQ ID NO: 2485 - protein, 2096 aa, synthetic construct
  source 1..2096: note = Description of Artificial Sequence: Synthetic polypeptide
MPAAKRVKLDGGDKKYSIGLDIGTNSVGWAVITDEYKVPSKKFKVLGNTDRHSIKKNLIGALLFDSGETAEATRLKRTARRRYTRRKNRICYLQEIFSNEMAKVDDSFFHRLEESFLVEEDKKHERHPIFGNIVDEVAYHEKYPTIYHLRKKLVDSTDKADLRLIYLALAHMIKFRGHFLIEGDLNPDNSDVDKLFIQLVQTYNQLFEENPINASGVDAKAILSARLSKSRRLENLIAQLPGEKKNGLFGNLIALSLGLTPNFKSNFDLAEDAKLQLSKDTYDDDLDNLLAQIGDQYADLFLAAKNLSDAILLSDILRVNTEITKAPLSASMIKRYDEHHQDLTLLKALVRQQLPEKYKEIFFDQSKNGYAGYIDGGASQEEFYKFIKPILEKMDGTEELLVKLNREDLLRKQRTFDNGSIPHQIHLGELHAILRRQEDFYPFLKDNREKIEKILTFRIPYYVGPLARGNSRFAWMTRKSEETITPWNFEEVVDKGASAQSFIERMTNFDKNLPNEKVLPKHSLLYEYFTVYNELTKVKYVTEGMRKPAFLSGEQKKAIVDLLFKTNRKVTVKQLKEDYFKKIECFDSVEISGVEDRFNASLGTYHDLLKIIKDKDFLDNEENEDILEDIVLTLTLFEDREMIEERLKTYAHLFDDKVMKQLKRRRYTGWGRLSRKLINGIRDKQSGKTILDFLKSDGFANRNFMQLIHDDSLTFKEDIQKAQVSGQGDSLHEHIANLAGSPAIKKGILQTVKVVDELVKVMGRHKPENIVIEMARENQTTQKGQKNSRERMKRIEEGIKELGSQILKEHPVENTQLQNEKLYLYYLQNGRDMYVDQELDINRLSDYDVDHIVPQSFLKDDSIDNKVLTRSDKARGKSDNVPSEEVVKKMKNYWRQLLNAKLITQRKFDNLTKAERGGLSELDKAGFIKRQLVETRQITKHVAQILDSRMNTKYDENDKLIREVKVITLKSKLVSDFRKDFQFYKVREINNYHHAHDAYLNAVVGTALIKKYPKLESEFVYGDYKVYDVRKMIAKSEQEIGKATAKYFFYSNIMNFFKTEITLANGEIRKRPLIETNGETGEIVWDKGRDFATVRKVLSMPQVNIVKKTEVQTGGFSKESILPKRNSDKLIARKKDWDPKKYGGFDSPTVAYSVLVVAKVEKGKSKKLKSVKELLGITIMERSSFEKNPIDFLEAKGYKEVKKDLIIKLPKYSLFELENGRKRMLASAGELQKGNELALPSKYVNFLYLASHYEKLKGSPEDNEQKQLFVEQHKHYLDEIIEQISEFSKRVILADANLDKVLSAYNKHRDKPIREQAENIIHLFTLTNLGAPAAFKYFDTTIDRKRYTSTKEVLDATLIHQSITGLYETRIDLSQLGGDGGGSSEAAAKPAPGGTLNIEDEYRLHETSKGPDVPLGSTWLSDFPQAWAETGGMGLAVRQAPLIIPLKATSTPVSIKQYPMSQEARLGIKPHIQRLLDQGILVPCQSPWNTPLLPVKKPGTNDYRPVQDLREVNKRVEDIHPTVPNPYNLLSGLPPSHQWYTVLDLKDAFFCLRLHPTSQSLFAFEWRDPEMGISGQLTWTRLPQGFKNSPTLFNEALHRDLADFRIQHPDLILLQYVDDLLLAATSELDCQQGTRALLQTLGDLGYRASAKKAQICQKQVKYLGYLLKEGQRWLTEARKETVMGQPTPKTPRQLREFLGTAGFCRLWIPGFAEMAAPLYPLTKPGTLFEWGPDQQKAYQEIKQALLTAPALGLPDLTKPFELFVDEKQGYAKGVLTQKLGPWRRPVAYLSKKLDPVAAGWPPCLRMVAAIAVLTKDAGKLTMGQPLVILAPHAVEALVKQPPDRWLSNARMTHYQALLLDTDRVQFGPIVALNPATLLPLPEEGLQHDCLDILAEAHGTRPDLTDQPLPDADHTWYTDGSSFLQEGQRKAGAAVTTETEVVWAKALPAGTSAQRAELIALTQALKMAEGKKLNVYTDSRYAFATAHIHGEIYRRRGWLTSEGKEIKNKDEILALLKALFLPKRLSIIHCPGHQKGNRAEARGNRMADQAAREVATRETPETSTLLAGKRTADGSEFEKRTADGSEFESPKKKAKVE

SEQ ID NO: 2486 - protein, 2096 aa, synthetic construct
  source 1..2096: note = Description of Artificial Sequence: Synthetic polypeptide
MPAAKRVKLDGGDKKYSIGLDIGTNSVGWAVITDEYKVPSKKFKVLGNTDRHSIKKNLIGALLFDSGETAEATRLKRTARRRYTRRKNRICYLQEIFSNEMAKVDDSFFHRLEESFLVEEDKKHERHPIFGNIVDEVAYHEKYPTIYHLRKKLVDSTDKADLRLIYLALAHMIKFRGHFLIEGDLNPDNSDVDKLFIQLVQTYNQLFEENPINASGVDAKAILSARLSKSRRLENLIAQLPGEKKNGLFGNLIALSLGLTPNFKSNFDLAEDAKLQLSKDTYDDDLDNLLAQIGDQYADLFLAAKNLSDAILLSDILRVNTEITKAPLSASMIKRYDEHHQDLTLLKALVRQQLPEKYKEIFFDQSKNGYAGYIDGGASQEEFYKFIKPILEKMDGTEELLVKLNREDLLRKQRTFDNGSIPHQIHLGELHAILRRQEDFYPFLKDNREKIEKILTFRIPYYVGPLARGNSRFAWMTRKSEETITPWNFEEVVDKGASAQSFIERMTNFDKNLPNEKVLPKHSLLYEYFTVYNELTKVKYVTEGMRKPAFLSGEQKKAIVDLLFKTNRKVTVKQLKEDYFKKIECFDSVEISGVEDRFNASLGTYHDLLKIIKDKDFLDNEENEDILEDIVLTLTLFEDREMIEERLKTYAHLFDDKVMKQLKRRRYTGWGRLSRKLINGIRDKQSGKTILDFLKSDGFANRNFMQLIHDDSLTFKEDIQKAQVSGQGDSLHEHIANLAGSPAIKKGILQTVKVVDELVKVMGRHKPENIVIEMARENQTTQKGQKNSRERMKRIEEGIKELGSQILKEHPVENTQLQNEKLYLYYLQNGRDMYVDQELDINRLSDYDVDHIVPQSFLKDDSIDNKVLTRSDKARGKSDNVPSEEVVKKMKNYWRQLLNAKLITQRKFDNLTKAERGGLSELDKAGFIKRQLVETRQITKHVAQILDSRMNTKYDENDKLIREVKVITLKSKLVSDFRKDFQFYKVREINNYHHAHDAYLNAVVGTALIKKYPKLESEFVYGDYKVYDVRKMIAKSEQEIGKATAKYFFYSNIMNFFKTEITLANGEIRKRPLIETNGETGEIVWDKGRDFATVRKVLSMPQVNIVKKTEVQTGGFSKESILPKRNSDKLIARKKDWDPKKYGGFDSPTVAYSVLVVAKVEKGKSKKLKSVKELLGITIMERSSFEKNPIDFLEAKGYKEVKKDLIIKLPKYSLFELENGRKRMLASAGELQKGNELALPSKYVNFLYLASHYEKLKGSPEDNEQKQLFVEQHKHYLDEIIEQISEFSKRVILADANLDKVLSAYNKHRDKPIREQAENIIHLFTLTNLGAPAAFKYFDTTIDRKRYTSTKEVLDATLIHQSITGLYETRIDLSQLGGDGGGGSEAAAKPAPGGTLNIEDEYRLHETSKGPDVPLGSTWLSDFPQAWAETGGMGLAVRQAPLIIPLKATSTPVSIKQYPMSQEARLGIKPHIQRLLDQGILVPCQSPWNTPLLPVKKPGTNDYRPVQDLREVNKRVEDIHPTVPNPYNLLSGLPPSHQWYTVLDLKDAFFCLRLHPTSQSLFAFEWRDPEMGISGQLTWTRLPQGFKNSPTLFNEALHRDLADFRIQHPDLILLQYVDDLLLAATSELDCQQGTRALLQTLGDLGYRASAKKAQICQKQVKYLGYLLKEGQRWLTEARKETVMGQPTPKTPRQLREFLGTAGFCRLWIPGFAEMAAPLYPLTKPGTLFEWGPDQQKAYQEIKQALLTAPALGLPDLTKPFELFVDEKQGYAKGVLTQKLGPWRRPVAYLSKKLDPVAAGWPPCLRMVAAIAVLTKDAGKLTMGQPLVILAPHAVEALVKQPPDRWLSNARMTHYQALLLDTDRVQFGPIVALNPATLLPLPEEGLQHDCLDILAEAHGTRPDLTDQPLPDADHTWYTDGSSFLQEGQRKAGAAVTTETEVVWAKALPAGTSAQRAELIALTQALKMAEGKKLNVYTDSRYAFATAHIHGEIYRRRGWLTSEGKEIKNKDEILALLKALFLPKRLSIIHCPGHQKGNRAEARGNRMADQAAREVATRETPETSTLLAGKRTADGSEFEKRTADGSEFESPKKKAKVE

SEQ ID NO: 2487 - protein, 2091 aa, synthetic construct
  source 1..2091: note = Description of Artificial Sequence: Synthetic polypeptide
MPAAKRVKLDGGDKKYSIGLDIGTNSVGWAVITDEYKVPSKKFKVLGNTDRHSIKKNLIGALLFDSGETAEATRLKRTARRRYTRRKNRICYLQEIFSNEMAKVDDSFFHRLEESFLVEEDKKHERHPIFGNIVDEVAYHEKYPTIYHLRKKLVDSTDKADLRLIYLALAHMIKFRGHFLIEGDLNPDNSDVDKLFIQLVQTYNQLFEENPINASGVDAKAILSARLSKSRRLENLIAQLPGEKKNGLFGNLIALSLGLTPNFKSNFDLAEDAKLQLSKDTYDDDLDNLLAQIGDQYADLFLAAKNLSDAILLSDILRVNTEITKAPLSASMIKRYDEHHQDLTLLKALVRQQLPEKYKEIFFDQSKNGYAGYIDGGASQEEFYKFIKPILEKMDGTEELLVKLNREDLLRKQRTFDNGSIPHQIHLGELHAILRRQEDFYPFLKDNREKIEKILTFRIPYYVGPLARGNSRFAWMTRKSEETITPWNFEEVVDKGASAQSFIERMTNFDKNLPNEKVLPKHSLLYEYFTVYNELTKVKYVTEGMRKPAFLSGEQKKAIVDLLFKTNRKVTVKQLKEDYFKKIECFDSVEISGVEDRFNASLGTYHDLLKIIKDKDFLDNEENEDILEDIVLTLTLFEDREMIEERLKTYAHLFDDKVMKQLKRRRYTGWGRLSRKLINGIRDKQSGKTILDFLKSDGFANRNFMQLIHDDSLTFKEDIQKAQVSGQGDSLHEHIANLAGSPAIKKGILQTVKVVDELVKVMGRHKPENIVIEMARENQTTQKGQKNSRERMKRIEEGIKELGSQILKEHPVENTQLQNEKLYLYYLQNGRDMYVDQELDINRLSDYDVDHIVPQSFLKDDSIDNKVLTRSDKARGKSDNVPSEEVVKKMKNYWRQLLNAKLITQRKFDNLTKAERGGLSELDKAGFIKRQLVETRQITKHVAQILDSRMNTKYDENDKLIREVKVITLKSKLVSDFRKDFQFYKVREINNYHHAHDAYLNAVVGTALIKKYPKLESEFVYGDYKVYDVRKMIAKSEQEIGKATAKYFFYSNIMNFFKTEITLANGEIRKRPLIETNGETGEIVWDKGRDFATVRKVLSMPQVNIVKKTEVQTGGFSKESILPKRNSDKLIARKKDWDPKKYGGFDSPTVAYSVLVVAKVEKGKSKKLKSVKELLGITIMERSSFEKNPIDFLEAKGYKEVKKDLIIKLPKYSLFELENGRKRMLASAGELQKGNELALPSKYVNFLYLASHYEKLKGSPEDNEQKQLFVEQHKHYLDEIIEQISEFSKRVILADANLDKVLSAYNKHRDKPIREQAENIIHLFTLTNLGAPAAFKYFDTTIDRKRYTSTKEVLDATLIHQSITGLYETRIDLSQLGGDGGGGSGSSGGTLNIEDEYRLHETSKGPDVPLGSTWLSDFPQAWAETGGMGLAVRQAPLIIPLKATSTPVSIKQYPMSQEARLGIKPHIQRLLDQGILVPCQSPWNTPLLPVKKPGTNDYRPVQDLREVNKRVEDIHPTVPNPYNLLSGLPPSHQWYTVLDLKDAFFCLRLHPTSQSLFAFEWRDPEMGISGQLTWTRLPQGFKNSPTLFNEALHRDLADFRIQHPDLILLQYVDDLLLAATSELDCQQGTRALLQTLGDLGYRASAKKAQICQKQVKYLGYLLKEGQRWLTEARKETVMGQPTPKTPRQLREFLGTAGFCRLWIPGFAEMAAPLYPLTKPGTLFEWGPDQQKAYQEIKQALLTAPALGLPDLTKPFELFVDEKQGYAKGVLTQKLGPWRRPVAYLSKKLDPVAAGWPPCLRMVAAIAVLTKDAGKLTMGQPLVILAPHAVEALVKQPPDRWLSNARMTHYQALLLDTDRVQFGPIVALNPATLLPLPEEGLQHDCLDILAEAHGTRPDLTDQPLPDADHTWYTDGSSFLQEGQRKAGAAVTTETEVVWAKALPAGTSAQRAELIALTQALKMAEGKKLNVYTDSRYAFATAHIHGEIYRRRGWLTSEGKEIKNKDEILALLKALFLPKRLSIIHCPGHQKGNRAEARGNRMADQAAREVATRETPETSTLLAGKRTADGSEFEKRTADGSEFESPKKKAKVE

SEQ ID NO: 2488 - protein, 2096 aa, synthetic construct
  source 1..2096: note = Description of Artificial Sequence: Synthetic polypeptide
MPAAKRVKLDGGDKKYSIGLDIGTNSVGWAVITDEYKVPSKKFKVLGNTDRHSIKKNLIGALLFDSGETAEATRLKRTARRRYTRRKNRICYLQEIFSNEMAKVDDSFFHRLEESFLVEEDKKHERHPIFGNIVDEVAYHEKYPTIYHLRKKLVDSTDKADLRLIYLALAHMIKFRGHFLIEGDLNPDNSDVDKLFIQLVQTYNQLFEENPINASGVDAKAILSARLSKSRRLENLIAQLPGEKKNGLFGNLIALSLGLTPNFKSNFDLAEDAKLQLSKDTYDDDLDNLLAQIGDQYADLFLAAKNLSDAILLSDILRVNTEITKAPLSASMIKRYDEHHQDLTLLKALVRQQLPEKYKEIFFDQSKNGYAGYIDGGASQEEFYKFIKPILEKMDGTEELLVKLNREDLLRKQRTFDNGSIPHQIHLGELHAILRRQEDFYPFLKDNREKIEKILTFRIPYYVGPLARGNSRFAWMTRKSEETITPWNFEEVVDKGASAQSFIERMTNFDKNLPNEKVLPKHSLLYEYFTVYNELTKVKYVTEGMRKPAFLSGEQKKAIVDLLFKTNRKVTVKQLKEDYFKKIECFDSVEISGVEDRFNASLGTYHDLLKIIKDKDFLDNEENEDILEDIVLTLTLFEDREMIEERLKTYAHLFDDKVMKQLKRRRYTGWGRLSRKLINGIRDKQSGKTILDFLKSDGFANRNFMQLIHDDSLTFKEDIQKAQVSGQGDSLHEHIANLAGSPAIKKGILQTVKVVDELVKVMGRHKPENIVIEMARENQTTQKGQKNSRERMKRIEEGIKELGSQILKEHPVENTQLQNEKLYLYYLQNGRDMYVDQELDINRLSDYDVDHIVPQSFLKDDSIDNKVLTRSDKARGKSDNVPSEEVVKKMKNYWRQLLNAKLITQRKFDNLTKAERGGLSELDKAGFIKRQLVETRQITKHVAQILDSRMNTKYDENDKLIREVKVITLKSKLVSDFRKDFQFYKVREINNYHHAHDAYLNAVVGTALIKKYPKLESEFVYGDYKVYDVRKMIAKSEQEIGKATAKYFFYSNIMNFFKTEITLANGEIRKRPLIETNGETGEIVWDKGRDFATVRKVLSMPQVNIVKKTEVQTGGFSKESILPKRNSDKLIARKKDWDPKKYGGFDSPTVAYSVLVVAKVEKGKSKKLKSVKELLGITIMERSSFEKNPIDFLEAKGYKEVKKDLIIKLPKYSLFELENGRKRMLASAGELQKGNELALPSKYVNFLYLASHYEKLKGSPEDNEQKQLFVEQHKHYLDEIIEQISEFSKRVILADANLDKVLSAYNKHRDKPIREQAENIIHLFTLTNLGAPAAFKYFDTTIDRKRYTSTKEVLDATLIHQSITGLYETRIDLSQLGGDGGGSSGGSEAAAKGGTLNIEDEYRLHETSKGPDVPLGSTWLSDFPQAWAETGGMGLAVRQAPLIIPLKATSTPVSIKQYPMSQEARLGIKPHIQRLLDQGILVPCQSPWNTPLLPVKKPGTNDYRPVQDLREVNKRVEDIHPTVPNPYNLLSGLPPSHQWYTVLDLKDAFFCLRLHPTSQSLFAFEWRDPEMGISGQLTWTRLPQGFKNSPTLFNEALHRDLADFRIQHPDLILLQYVDDLLLAATSELDCQQGTRALLQTLGDLGYRASAKKAQICQKQVKYLGYLLKEGQRWLTEARKETVMGQPTPKTPRQLREFLGTAGFCRLWIPGFAEMAAPLYPLTKPGTLFEWGPDQQKAYQEIKQALLTAPALGLPDLTKPFELFVDEKQGYAKGVLTQKLGPWRRPVAYLSKKLDPVAAGWPPCLRMVAAIAVLTKDAGKLTMGQPLVILAPHAVEALVKQPPDRWLSNARMTHYQALLLDTDRVQFGPIVALNPATLLPLPEEGLQHDCLDILAEAHGTRPDLTDQPLPDADHTWYTDGSSFLQEGQRKAGAAVTTETEVVWAKALPAGTSAQRAELIALTQALKMAEGKKLNVYTDSRYAFATAHIHGEIYRRRGWLTSEGKEIKNKDEILALLKALFLPKRLSIIHCPGHQKGNRAEARGNRMADQAAREVATRETPETSTLLAGKRTADGSEFEKRTADGSEFESPKKKAKVE

SEQ ID NO: 2489 - protein, 2101 aa, synthetic construct
  source 1..2101: note = Description of Artificial Sequence: Synthetic polypeptide
MPAAKRVKLDGGDKKYSIGLDIGTNSVGWAVITDEYKVPSKKFKVLGNTDRHSIKKNLIGALLFDSGETAEATRLKRTARRRYTRRKNRICYLQEIFSNEMAKVDDSFFHRLEESFLVEEDKKHERHPIFGNIVDEVAYHEKYPTIYHLRKKLVDSTDKADLRLIYLALAHMIKFRGHFLIEGDLNPDNSDVDKLFIQLVQTYNQLFEENPINASGVDAKAILSARLSKSRRLENLIAQLPGEKKNGLFGNLIALSLGLTPNFKSNFDLAEDAKLQLSKDTYDDDLDNLLAQIGDQYADLFLAAKNLSDAILLSDILRVNTEITKAPLSASMIKRYDEHHQDLTLLKALVRQQLPEKYKEIFFDQSKNGYAGYIDGGASQEEFYKFIKPILEKMDGTEELLVKLNREDLLRKQRTFDNGSIPHQIHLGELHAILRRQEDFYPFLKDNREKIEKILTFRIPYYVGPLARGNSRFAWMTRKSEETITPWNFEEVVDKGASAQSFIERMTNFDKNLPNEKVLPKHSLLYEYFTVYNELTKVKYVTEGMRKPAFLSGEQKKAIVDLLFKTNRKVTVKQLKEDYFKKIECFDSVEISGVEDRFNASLGTYHDLLKIIKDKDFLDNEENEDILEDIVLTLTLFEDREMIEERLKTYAHLFDDKVMKQLKRRRYTGWGRLSRKLINGIRDKQSGKTILDFLKSDGFANRNFMQLIHDDSLTFKEDIQKAQVSGQGDSLHEHIANLAGSPAIKKGILQTVKVVDELVKVMGRHKPENIVIEMARENQTTQKGQKNSRERMKRIEEGIKELGSQILKEHPVENTQLQNEKLYLYYLQNGRDMYVDQELDINRLSDYDVDHIVPQSFLKDDSIDNKVLTRSDKARGKSDNVPSEEVVKKMKNYWRQLLNAKLITQRKFDNLTKAERGGLSELDKAGFIKRQLVETRQITKHVAQILDSRMNTKYDENDKLIREVKVITLKSKLVSDFRKDFQFYKVREINNYHHAHDAYLNAVVGTALIKKYPKLESEFVYGDYKVYDVRKMIAKSEQEIGKATAKYFFYSNIMNFFKTEITLANGEIRKRPLIETNGETGEIVWDKGRDFATVRKVLSMPQVNIVKKTEVQTGGFSKESILPKRNSDKLIARKKDWDPKKYGGFDSPTVAYSVLVVAKVEKGKSKKLKSVKELLGITIMERSSFEKNPIDFLEAKGYKEVKKDLIIKLPKYSLFELENGRKRMLASAGELQKGNELALPSKYVNFLYLASHYEKLKGSPEDNEQKQLFVEQHKHYLDEIIEQISEFSKRVILADANLDKVLSAYNKHRDKPIREQAENIIHLFTLTNLGAPAAFKYFDTTIDRKRYTSTKEVLDATLIHQSITGLYETRIDLSQLGGDGGSGSETPGTSESATPESGGTLNIEDEYRLHETSKGPDVPLGSTWLSDFPQAWAETGGMGLAVRQAPLIIPLKATSTPVSIKQYPMSQEARLGIKPHIQRLLDQGILVPCQSPWNTPLLPVKKPGTNDYRPVQDLREVNKRVEDIHPTVPNPYNLLSGLPPSHQWYTVLDLKDAFFCLRLHPTSQSLFAFEWRDPEMGISGQLTWTRLPQGFKNSPTLFNEALHRDLADFRIQHPDLILLQYVDDLLLAATSELDCQQGTRALLQTLGDLGYRASAKKAQICQKQVKYLGYLLKEGQRWLTEARKETVMGQPTPKTPRQLREFLGTAGFCRLWIPGFAEMAAPLYPLTKPGTLFEWGPDQQKAYQEIKQALLTAPALGLPDLTKPFELFVDEKQGYAKGVLTQKLGPWRRPVAYLSKKLDPVAAGWPPCLRMVAAIAVLTKDAGKLTMGQPLVILAPHAVEALVKQPPDRWLSNARMTHYQALLLDTDRVQFGPIVALNPATLLPLPEEGLQHDCLDILAEAHGTRPDLTDQPLPDADHTWYTDGSSFLQEGQRKAGAAVTTETEVVWAKALPAGTSAQRAELIALTQALKMAEGKKLNVYTDSRYAFATAHIHGEIYRRRGWLTSEGKEIKNKDEILALLKALFLPKRLSIIHCPGHQKGNRAEARGNRMADQAAREVATRETPETSTLLAGKRTADGSEFEKRTADGSEFESPKKKAKVE

SEQ ID NO: 2490 - protein, 2097 aa, synthetic construct
  source 1..2097: note = Description of Artificial Sequence: Synthetic polypeptide
MPAAKRVKLDGGDKKYSIGLDIGTNSVGWAVITDEYKVPSKKFKVLGNTDRHSIKKNLIGALLFDSGETAEATRLKRTARRRYTRRKNRICYLQEIFSNEMAKVDDSFFHRLEESFLVEEDKKHERHPIFGNIVDEVAYHEKYPTIYHLRKKLVDSTDKADLRLIYLALAHMIKFRGHFLIEGDLNPDNSDVDKLFIQLVQTYNQLFEENPINASGVDAKAILSARLSKSRRLENLIAQLPGEKKNGLFGNLIALSLGLTPNFKSNFDLAEDAKLQLSKDTYDDDLDNLLAQIGDQYADLFLAAKNLSDAILLSDILRVNTEITKAPLSASMIKRYDEHHQDLTLLKALVRQQLPEKYKEIFFDQSKNGYAGYIDGGASQEEFYKFIKPILEKMDGTEELLVKLNREDLLRKQRTFDNGSIPHQIHLGELHAILRRQEDFYPFLKDNREKIEKILTFRIPYYVGPLARGNSRFAWMTRKSEETITPWNFEEVVDKGASAQSFIERMTNFDKNLPNEKVLPKHSLLYEYFTVYNELTKVKYVTEGMRKPAFLSGEQKKAIVDLLFKTNRKVTVKQLKEDYFKKIECFDSVEISGVEDRFNASLGTYHDLLKIIKDKDFLDNEENEDILEDIVLTLTLFEDREMIEERLKTYAHLFDDKVMKQLKRRRYTGWGRLSRKLINGIRDKQSGKTILDFLKSDGFANRNFMQLIHDDSLTFKEDIQKAQVSGQGDSLHEHIANLAGSPAIKKGILQTVKVVDELVKVMGRHKPENIVIEMARENQTTQKGQKNSRERMKRIEEGIKELGSQILKEHPVENTQLQNEKLYLYYLQNGRDMYVDQELDINRLSDYDVDHIVPQSFLKDDSIDNKVLTRSDKARGKSDNVPSEEVVKKMKNYWRQLLNAKLITQRKFDNLTKAERGGLSELDKAGFIKRQLVETRQITKHVAQILDSRMNTKYDENDKLIREVKVITLKSKLVSDFRKDFQFYKVREINNYHHAHDAYLNAVVGTALIKKYPKLESEFVYGDYKVYDVRKMIAKSEQEIGKATAKYFFYSNIMNFFKTEITLANGEIRKRPLIETNGETGEIVWDKGRDFATVRKVLSMPQVNIVKKTEVQTGGFSKESILPKRNSDKLIARKKDWDPKKYGGFDSPTVAYSVLVVAKVEKGKSKKLKSVKELLGITIMERSSFEKNPIDFLEAKGYKEVKKDLIIKLPKYSLFELENGRKRMLASAGELQKGNELALPSKYVNFLYLASHYEKLKGSPEDNEQKQLFVEQHKHYLDEIIEQISEFSKRVILADANLDKVLSAYNKHRDKPIREQAENIIHLFTLTNLGAPAAFKYFDTTIDRKRYTSTKEVLDATLIHQSITGLYETRIDLSQLGGDGGGSAGSAAGSGEFGGTLNIEDEYRLHETSKGPDVPLGSTWLSDFPQAWAETGGMGLAVRQAPLIIPLKATSTPVSIKQYPMSQEARLGIKPHIQRLLDQGILVPCQSPWNTPLLPVKKPGTNDYRPVQDLREVNKRVEDIHPTVPNPYNLLSGLPPSHQWYTVLDLKDAFFCLRLHPTSQSLFAFEWRDPEMGISGQLTWTRLPQGFKNSPTLFNEALHRDLADFRIQHPDLILLQYVDDLLLAATSELDCQQGTRALLQTLGDLGYRASAKKAQICQKQVKYLGYLLKEGQRWLTEARKETVMGQPTPKTPRQLREFLGTAGFCRLWIPGFAEMAAPLYPLTKPGTLFEWGPDQQKAYQEIKQALLTAPALGLPDLTKPFELFVDEKQGYAKGVLTQKLGPWRRPVAYLSKKLDPVAAGWPPCLRMVAAIAVLTKDAGKLTMGQPLVILAPHAVEALVKQPPDRWLSNARMTHYQALLLDTDRVQFGPIVALNPATLLPLPEEGLQHDCLDILAEAHGTRPDLTDQPLPDADHTWYTDGSSFLQEGQRKAGAAVTTETEVVWAKALPAGTSAQRAELIALTQALKMAEGKKLNVYTDSRYAFATAHIHGEIYRRRGWLTSEGKEIKNKDEILALLKALFLPKRLSIIHCPGHQKGNRAEARGNRMADQAAREVATRETPETSTLLAGKRTADGSEFEKRTADGSEFESPKKKAKVE

SEQ ID NO: 2491 - protein, 2094 aa, synthetic construct
  source 1..2094: note = Description of Artificial Sequence: Synthetic polypeptide
MPAAKRVKLDGGDKKYSIGLDIGTNSVGWAVITDEYKVPSKKFKVLGNTDRHSIKKNLIGALLFDSGETAEATRLKRTARRRYTRRKNRICYLQEIFSNEMAKVDDSFFHRLEESFLVEEDKKHERHPIFGNIVDEVAYHEKYPTIYHLRKKLVDSTDKADLRLIYLALAHMIKFRGHFLIEGDLNPDNSDVDKLFIQLVQTYNQLFEENPINASGVDAKAILSARLSKSRRLENLIAQLPGEKKNGLFGNLIALSLGLTPNFKSNFDLAEDAKLQLSKDTYDDDLDNLLAQIGDQYADLFLAAKNLSDAILLSDILRVNTEITKAPLSASMIKRYDEHHQDLTLLKALVRQQLPEKYKEIFFDQSKNGYAGYIDGGASQEEFYKFIKPILEKMDGTEELLVKLNREDLLRKQRTFDNGSIPHQIHLGELHAILRRQEDFYPFLKDNREKIEKILTFRIPYYVGPLARGNSRFAWMTRKSEETITPWNFEEVVDKGASAQSFIERMTNFDKNLPNEKVLPKHSLLYEYFTVYNELTKVKYVTEGMRKPAFLSGEQKKAIVDLLFKTNRKVTVKQLKEDYFKKIECFDSVEISGVEDRFNASLGTYHDLLKIIKDKDFLDNEENEDILEDIVLTLTLFEDREMIEERLKTYAHLFDDKVMKQLKRRRYTGWGRLSRKLINGIRDKQSGKTILDFLKSDGFANRNFMQLIHDDSLTFKEDIQKAQVSGQGDSLHEHIANLAGSPAIKKGILQTVKVVDELVKVMGRHKPENIVIEMARENQTTQKGQKNSRERMKRIEEGIKELGSQILKEHPVENTQLQNEKLYLYYLQNGRDMYVDQELDINRLSDYDVDHIVPQSFLKDDSIDNKVLTRSDKARGKSDNVPSEEVVKKMKNYWRQLLNAKLITQRKFDNLTKAERGGLSELDKAGFIKRQLVETRQITKHVAQILDSRMNTKYDENDKLIREVKVITLKSKLVSDFRKDFQFYKVREINNYHHAHDAYLNAVVGTALIKKYPKLESEFVYGDYKVYDVRKMIAKSEQEIGKATAKYFFYSNIMNFFKTEITLANGEIRKRPLIETNGETGEIVWDKGRDFATVRKVLSMPQVNIVKKTEVQTGGFSKESILPKRNSDKLIARKKDWDPKKYGGFDSPTVAYSVLVVAKVEKGKSKKLKSVKELLGITIMERSSFEKNPIDFLEAKGYKEVKKDLIIKLPKYSLFELENGRKRMLASAGELQKGNELALPSKYVNFLYLASHYEKLKGSPEDNEQKQLFVEQHKHYLDEIIEQISEFSKRVILADANLDKVLSAYNKHRDKPIREQAENIIHLFTLTNLGAPAAFKYFDTTIDRKRYTSTKEVLDATLIHQSITGLYETRIDLSQLGGDGGGSSGGSPAPGGTLNIEDEYRLHETSKGPDVPLGSTWLSDFPQAWAETGGMGLAVRQAPLIIPLKATSTPVSIKQYPMSQEARLGIKPHIQRLLDQGILVPCQSPWNTPLLPVKKPGTNDYRPVQDLREVNKRVEDIHPTVPNPYNLLSGLPPSHQWYTVLDLKDAFFCLRLHPTSQSLFAFEWRDPEMGISGQLTWTRLPQGFKNSPTLFNEALHRDLADFRIQHPDLILLQYVDDLLLAATSELDCQQGTRALLQTLGDLGYRASAKKAQICQKQVKYLGYLLKEGQRWLTEARKETVMGQPTPKTPRQLREFLGTAGFCRLWIPGFAEMAAPLYPLTKPGTLFEWGPDQQKAYQEIKQALLTAPALGLPDLTKPFELFVDEKQGYAKGVLTQKLGPWRRPVAYLSKKLDPVAAGWPPCLRMVAAIAVLTKDAGKLTMGQPLVILAPHAVEALVKQPPDRWLSNARMTHYQALLLDTDRVQFGPIVALNPATLLPLPEEGLQHDCLDILAEAHGTRPDLTDQPLPDADHTWYTDGSSFLQEGQRKAGAAVTTETEVVWAKALPAGTSAQRAELIALTQALKMAEGKKLNVYTDSRYAFATAHIHGEIYRRRGWLTSEGKEIKNKDEILALLKALFLPKRLSIIHCPGHQKGNRAEARGNRMADQAAREVATRETPETSTLLAGKRTADGSEFEKRTADGSEFESPKKKAKVE

SEQ ID NO: 2492 - protein, 2091 aa, synthetic construct
  source 1..2091: note = Description of Artificial Sequence: Synthetic polypeptide
MPAAKRVKLDGGDKKYSIGLDIGTNSVGWAVITDEYKVPSKKFKVLGNTDRHSIKKNLIGALLFDSGETAEATRLKRTARRRYTRRKNRICYLQEIFSNEMAKVDDSFFHRLEESFLVEEDKKHERHPIFGNIVDEVAYHEKYPTIYHLRKKLVDSTDKADLRLIYLALAHMIKFRGHFLIEGDLNPDNSDVDKLFIQLVQTYNQLFEENPINASGVDAKAILSARLSKSRRLENLIAQLPGEKKNGLFGNLIALSLGLTPNFKSNFDLAEDAKLQLSKDTYDDDLDNLLAQIGDQYADLFLAAKNLSDAILLSDILRVNTEITKAPLSASMIKRYDEHHQDLTLLKALVRQQLPEKYKEIFFDQSKNGYAGYIDGGASQEEFYKFIKPILEKMDGTEELLVKLNREDLLRKQRTFDNGSIPHQIHLGELHAILRRQEDFYPFLKDNREKIEKILTFRIPYYVGPLARGNSRFAWMTRKSEETITPWNFEEVVDKGASAQSFIERMTNFDKNLPNEKVLPKHSLLYEYFTVYNELTKVKYVTEGMRKPAFLSGEQKKAIVDLLFKTNRKVTVKQLKEDYFKKIECFDSVEISGVEDRFNASLGTYHDLLKIIKDKDFLDNEENEDILEDIVLTLTLFEDREMIEERLKTYAHLFDDKVMKQLKRRRYTGWGRLSRKLINGIRDKQSGKTILDFLKSDGFANRNFMQLIHDDSLTFKEDIQKAQVSGQGDSLHEHIANLAGSPAIKKGILQTVKVVDELVKVMGRHKPENIVIEMARENQTTQKGQKNSRERMKRIEEGIKELGSQILKEHPVENTQLQNEKLYLYYLQNGRDMYVDQELDINRLSDYDVDHIVPQSFLKDDSIDNKVLTRSDKARGKSDNVPSEEVVKKMKNYWRQLLNAKLITQRKFDNLTKAERGGLSELDKAGFIKRQLVETRQITKHVAQILDSRMNTKYDENDKLIREVKVITLKSKLVSDFRKDFQFYKVREINNYHHAHDAYLNAVVGTALIKKYPKLESEFVYGDYKVYDVRKMIAKSEQEIGKATAKYFFYSNIMNFFKTEITLANGEIRKRPLIETNGETGEIVWDKGRDFATVRKVLSMPQVNIVKKTEVQTGGFSKESILPKRNSDKLIARKKDWDPKKYGGFDSPTVAYSVLVVAKVEKGKSKKLKSVKELLGITIMERSSFEKNPIDFLEAKGYKEVKKDLIIKLPKYSLFELENGRKRMLASAGELQKGNELALPSKYVNFLYLASHYEKLKGSPEDNEQKQLFVEQHKHYLDEIIEQISEFSKRVILADANLDKVLSAYNKHRDKPIREQAENIIHLFTLTNLGAPAAFKYFDTTIDRKRYTSTKEVLDATLIHQSITGLYETRIDLSQLGGDGGPAPGGGGGTLNIEDEYRLHETSKGPDVPLGSTWLSDFPQAWAETGGMGLAVRQAPLIIPLKATSTPVSIKQYPMSQEARLGIKPHIQRLLDQGILVPCQSPWNTPLLPVKKPGTNDYRPVQDLREVNKRVEDIHPTVPNPYNLLSGLPPSHQWYTVLDLKDAFFCLRLHPTSQSLFAFEWRDPEMGISGQLTWTRLPQGFKNSPTLFNEALHRDLADFRIQHPDLILLQYVDDLLLAATSELDCQQGTRALLQTLGDLGYRASAKKAQICQKQVKYLGYLLKEGQRWLTEARKETVMGQPTPKTPRQLREFLGTAGFCRLWIPGFAEMAAPLYPLTKPGTLFEWGPDQQKAYQEIKQALLTAPALGLPDLTKPFELFVDEKQGYAKGVLTQKLGPWRRPVAYLSKKLDPVAAGWPPCLRMVAAIAVLTKDAGKLTMGQPLVILAPHAVEALVKQPPDRWLSNARMTHYQALLLDTDRVQFGPIVALNPATLLPLPEEGLQHDCLDILAEAHGTRPDLTDQPLPDADHTWYTDGSSFLQEGQRKAGAAVTTETEVVWAKALPAGTSAQRAELIALTQALKMAEGKKLNVYTDSRYAFATAHIHGEIYRRRGWLTSEGKEIKNKDEILALLKALFLPKRLSIIHCPGHQKGNRAEARGNRMADQAAREVATRETPETSTLLAGKRTADGSEFEKRTADGSEFESPKKKAKVE

SEQ ID NO: 2493 - protein, 2094 aa, synthetic construct
  source 1..2094: note = Description of Artificial Sequence: Synthetic polypeptide
MPAAKRVKLDGGDKKYSIGLDIGTNSVGWAVITDEYKVPSKKFKVLGNTDRHSIKKNLIGALLFDSGETAEATRLKRTARRRYTRRKNRICYLQEIFSNEMAKVDDSFFHRLEESFLVEEDKKHERHPIFGNIVDEVAYHEKYPTIYHLRKKLVDSTDKADLRLIYLALAHMIKFRGHFLIEGDLNPDNSDVDKLFIQLVQTYNQLFEENPINASGVDAKAILSARLSKSRRLENLIAQLPGEKKNGLFGNLIALSLGLTPNFKSNFDLAEDAKLQLSKDTYDDDLDNLLAQIGDQYADLFLAAKNLSDAILLSDILRVNTEITKAPLSASMIKRYDEHHQDLTLLKALVRQQLPEKYKEIFFDQSKNGYAGYIDGGASQEEFYKFIKPILEKMDGTEELLVKLNREDLLRKQRTFDNGSIPHQIHLGELHAILRRQEDFYPFLKDNREKIEKILTFRIPYYVGPLARGNSRFAWMTRKSEETITPWNFEEVVDKGASAQSFIERMTNFDKNLPNEKVLPKHSLLYEYFTVYNELTKVKYVTEGMRKPAFLSGEQKKAIVDLLFKTNRKVTVKQLKEDYFKKIECFDSVEISGVEDRFNASLGTYHDLLKIIKDKDFLDNEENEDILEDIVLTLTLFEDREMIEERLKTYAHLFDDKVMKQLKRRRYTGWGRLSRKLINGIRDKQSGKTILDFLKSDGFANRNFMQLIHDDSLTFKEDIQKAQVSGQGDSLHEHIANLAGSPAIKKGILQTVKVVDELVKVMGRHKPENIVIEMARENQTTQKGQKNSRERMKRIEEGIKELGSQILKEHPVENTQLQNEKLYLYYLQNGRDMYVDQELDINRLSDYDVDHIVPQSFLKDDSIDNKVLTRSDKARGKSDNVPSEEVVKKMKNYWRQLLNAKLITQRKFDNLTKAERGGLSELDKAGFIKRQLVETRQITKHVAQILDSRMNTKYDENDKLIREVKVITLKSKLVSDFRKDFQFYKVREINNYHHAHDAYLNAVVGTALIKKYPKLESEFVYGDYKVYDVRKMIAKSEQEIGKATAKYFFYSNIMNFFKTEITLANGEIRKRPLIETNGETGEIVWDKGRDFATVRKVLSMPQVNIVKKTEVQTGGFSKESILPKRNSDKLIARKKDWDPKKYGGFDSPTVAYSVLVVAKVEKGKSKKLKSVKELLGITIMERSSFEKNPIDFLEAKGYKEVKKDLIIKLPKYSLFELENGRKRMLASAGELQKGNELALPSKYVNFLYLASHYEKLKGSPEDNEQKQLFVEQHKHYLDEIIEQISEFSKRVILADANLDKVLSAYNKHRDKPIREQAENIIHLFTLTNLGAPAAFKYFDTTIDRKRYTSTKEVLDATLIHQSITGLYETRIDLSQLGGDGGPAPGGSGGGGGTLNIEDEYRLHETSKGPDVPLGSTWLSDFPQAWAETGGMGLAVRQAPLIIPLKATSTPVSIKQYPMSQEARLGIKPHIQRLLDQGILVPCQSPWNTPLLPVKKPGTNDYRPVQDLREVNKRVEDIHPTVPNPYNLLSGLPPSHQWYTVLDLKDAFFCLRLHPTSQSLFAFEWRDPEMGISGQLTWTRLPQGFKNSPTLFNEALHRDLADFRIQHPDLILLQYVDDLLLAATSELDCQQGTRALLQTLGDLGYRASAKKAQICQKQVKYLGYLLKEGQRWLTEARKETVMGQPTPKTPRQLREFLGTAGFCRLWIPGFAEMAAPLYPLTKPGTLFEWGPDQQKAYQEIKQALLTAPALGLPDLTKPFELFVDEKQGYAKGVLTQKLGPWRRPVAYLSKKLDPVAAGWPPCLRMVAAIAVLTKDAGKLTMGQPLVILAPHAVEALVKQPPDRWLSNARMTHYQALLLDTDRVQFGPIVALNPATLLPLPEEGLQHDCLDILAEAHGTRPDLTDQPLPDADHTWYTDGSSFLQEGQRKAGAAVTTETEVVWAKALPAGTSAQRAELIALTQALKMAEGKKLNVYTDSRYAFATAHIHGEIYRRRGWLTSEGKEIKNKDEILALLKALFLPKRLSIIHCPGHQKGNRAEARGNRMADQAAREVATRETPETSTLLAGKRTADGSEFEKRTADGSEFESPKKKAKVE

SEQ ID NO: 2494 - protein, 2096 aa, synthetic construct
  source 1..2096: note = Description of Artificial Sequence: Synthetic polypeptide
MPAAKRVKLDGGDKKYSIGLDIGTNSVGWAVITDEYKVPSKKFKVLGNTDRHSIKKNLIGALLFDSGETAEATRLKRTARRRYTRRKNRICYLQEIFSNEMAKVDDSFFHRLEESFLVEEDKKHERHPIFGNIVDEVAYHEKYPTIYHLRKKLVDSTDKADLRLIYLALAHMIKFRGHFLIEGDLNPDNSDVDKLFIQLVQTYNQLFEENPINASGVDAKAILSARLSKSRRLENLIAQLPGEKKNGLFGNLIALSLGLTPNFKSNFDLAEDAKLQLSKDTYDDDLDNLLAQIGDQYADLFLAAKNLSDAILLSDILRVNTEITKAPLSASMIKRYDEHHQDLTLLKALVRQQLPEKYKEIFFDQSKNGYAGYIDGGASQEEFYKFIKPILEKMDGTEELLVKLNREDLLRKQRTFDNGSIPHQIHLGELHAILRRQEDFYPFLKDNREKIEKILTFRIPYYVGPLARGNSRFAWMTRKSEETITPWNFEEVVDKGASAQSFIERMTNFDKNLPNEKVLPKHSLLYEYFTVYNELTKVKYVTEGMRKPAFLSGEQKKAIVDLLFKTNRKVTVKQLKEDYFKKIECFDSVEISGVEDRFNASLGTYHDLLKIIKDKDFLDNEENEDILEDIVLTLTLFEDREMIEERLKTYAHLFDDKVMKQLKRRRYTGWGRLSRKLINGIRDKQSGKTILDFLKSDGFANRNFMQLIHDDSLTFKEDIQKAQVSGQGDSLHEHIANLAGSPAIKKGILQTVKVVDELVKVMGRHKPENIVIEMARENQTTQKGQKNSRERMKRIEEGIKELGSQILKEHPVENTQLQNEKLYLYYLQNGRDMYVDQELDINRLSDYDVDHIVPQSFLKDDSIDNKVLTRSDKARGKSDNVPSEEVVKKMKNYWRQLLNAKLITQRKFDNLTKAERGGLSELDKAGFIKRQLVETRQITKHVAQILDSRMNTKYDENDKLIREVKVITLKSKLVSDFRKDFQFYKVREINNYHHAHDAYLNAVVGTALIKKYPKLESEFVYGDYKVYDVRKMIAKSEQEIGKATAKYFFYSNIMNFFKTEITLANGEIRKRPLIETNGETGEIVWDKGRDFATVRKVLSMPQVNIVKKTEVQTGGFSKESILPKRNSDKLIARKKDWDPKKYGGFDSPTVAYSVLVVAKVEKGKSKKLKSVKELLGITIMERSSFEKNPIDFLEAKGYKEVKKDLIIKLPKYSLFELENGRKRMLASAGELQKGNELALPSKYVNFLYLASHYEKLKGSPEDNEQKQLFVEQHKHYLDEIIEQISEFSKRVILADANLDKVLSAYNKHRDKPIREQAENIIHLFTLTNLGAPAAFKYFDTTIDRKRYTSTKEVLDATLIHQSITGLYETRIDLSQLGGDGGPAPEAAAKGGGGGTLNIEDEYRLHETSKGPDVPLGSTWLSDFPQAWAETGGMGLAVRQAPLIIPLKATSTPVSIKQYPMSQEARLGIKPHIQRLLDQGILVPCQSPWNTPLLPVKKPGTNDYRPVQDLREVNKRVEDIHPTVPNPYNLLSGLPPSHQWYTVLDLKDAFFCLRLHPTSQSLFAFEWRDPEMGISGQLTWTRLPQGFKNSPTLFNEALHRDLADFRIQHPDLILLQYVDDLLLAATSELDCQQGTRALLQTLGDLGYRASAKKAQICQKQVKYLGYLLKEGQRWLTEARKETVMGQPTPKTPRQLREFLGTAGFCRLWIPGFAEMAAPLYPLTKPGTLFEWGPDQQKAYQEIKQALLTAPALGLPDLTKPFELFVDEKQGYAKGVLTQKLGPWRRPVAYLSKKLDPVAAGWPPCLRMVAAIAVLTKDAGKLTMGQPLVILAPHAVEALVKQPPDRWLSNARMTHYQALLLDTDRVQFGPIVALNPATLLPLPEEGLQHDCLDILAEAHGTRPDLTDQPLPDADHTWYTDGSSFLQEGQRKAGAAVTTETEVVWAKALPAGTSAQRAELIALTQALKMAEGKKLNVYTDSRYAFATAHIHGEIYRRRGWLTSEGKEIKNKDEILALLKALFLPKRLSIIHCPGHQKGNRAEARGNRMADQAAREVATRETPETSTLLAGKRTADGSEFEKRTADGSEFESPKKKAKVE

SEQ ID NO: 2495 - protein, 2096 aa, synthetic construct
  source 1..2096: note = Description of Artificial Sequence: Synthetic polypeptide
MPAAKRVKLDGGDKKYSIGLDIGTNSVGWAVITDEYKVPSKKFKVLGNTDRHSIKKNLIGALLFDSGETAEATRLKRTARRRYTRRKNRICYLQEIFSNEMAKVDDSFFHRLEESFLVEEDKKHERHPIFGNIVDEVAYHEKYPTIYHLRKKLVDSTDKADLRLIYLALAHMIKFRGHFLIEGDLNPDNSDVDKLFIQLVQTYNQLFEENPINASGVDAKAILSARLSKSRRLENLIAQLPGEKKNGLFGNLIALSLGLTPNFKSNFDLAEDAKLQLSKDTYDDDLDNLLAQIGDQYADLFLAAKNLSDAILLSDILRVNTEITKAPLSASMIKRYDEHHQDLTLLKALVRQQLPEKYKEIFFDQSKNGYAGYIDGGASQEEFYKFIKPILEKMDGTEELLVKLNREDLLRKQRTFDNGSIPHQIHLGELHAILRRQEDFYPFLKDNREKIEKILTFRIPYYVGPLARGNSRFAWMTRKSEETITPWNFEEVVDKGASAQSFIERMTNFDKNLPNEKVLPKHSLLYEYFTVYNELTKVKYVTEGMRKPAFLSGEQKKAIVDLLFKTNRKVTVKQLKEDYFKKIECFDSVEISGVEDRFNASLGTYHDLLKIIKDKDFLDNEENEDILEDIVLTLTLFEDREMIEERLKTYAHLFDDKVMKQLKRRRYTGWGRLSRKLINGIRDKQSGKTILDFLKSDGFANRNFMQLIHDDSLTFKEDIQKAQVSGQGDSLHEHIANLAGSPAIKKGILQTVKVVDELVKVMGRHKPENIVIEMARENQTTQKGQKNSRERMKRIEEGIKELGSQILKEHPVENTQLQNEKLYLYYLQNGRDMYVDQELDINRLSDYDVDHIVPQSFLKDDSIDNKVLTRSDKARGKSDNVPSEEVVKKMKNYWRQLLNAKLITQRKFDNLTKAERGGLSELDKAGFIKRQLVETRQITKHVAQILDSRMNTKYDENDKLIREVKVITLKSKLVSDFRKDFQFYKVREINNYHHAHDAYLNAVVGTALIKKYPKLESEFVYGDYKVYDVRKMIAKSEQEIGKATAKYFFYSNIMNFFKTEITLANGEIRKRPLIETNGETGEIVWDKGRDFATVRKVLSMPQVNIVKKTEVQTGGFSKESILPKRNSDKLIARKKDWDPKKYGGFDSPTVAYSVLVVAKVEKGKSKKLKSVKELLGITIMERSSFEKNPIDFLEAKGYKEVKKDLIIKLPKYSLFELENGRKRMLASAGELQKGNELALPSKYVNFLYLASHYEKLKGSPEDNEQKQLFVEQHKHYLDEIIEQISEFSKRVILADANLDKVLSAYNKHRDKPIREQAENIIHLFTLTNLGAPAAFKYFDTTIDRKRYTSTKEVLDATLIHQSITGLYETRIDLSQLGGDGGEAAAKPAPGGSGGTLNIEDEYRLHETSKGPDVPLGSTWLSDFPQAWAETGGMGLAVRQAPLIIPLKATSTPVSIKQYPMSQEARLGIKPHIQRLLDQGILVPCQSPWNTPLLPVKKPGTNDYRPVQDLREVNKRVEDIHPTVPNPYNLLSGLPPSHQWYTVLDLKDAFFCLRLHPTSQSLFAFEWRDPEMGISGQLTWTRLPQGFKNSPTLFNEALHRDLADFRIQHPDLILLQYVDDLLLAATSELDCQQGTRALLQTLGDLGYRASAKKAQICQKQVKYLGYLLKEGQRWLTEARKETVMGQPTPKTPRQLREFLGTAGFCRLWIPGFAEMAAPLYPLTKPGTLFEWGPDQQKAYQEIKQALLTAPALGLPDLTKPFELFVDEKQGYAKGVLTQKLGPWRRPVAYLSKKLDPVAAGWPPCLRMVAAIAVLTKDAGKLTMGQPLVILAPHAVEALVKQPPDRWLSNARMTHYQALLLDTDRVQFGPIVALNPATLLPLPEEGLQHDCLDILAEAHGTRPDLTDQPLPDADHTWYTDGSSFLQEGQRKAGAAVTTETEVVWAKALPAGTSAQRAELIALTQALKMAEGKKLNVYTDSRYAFATAHIHGEIYRRRGWLTSEGKEIKNKDEILALLKALFLPKRLSIIHCPGHQKGNRAEARGNRMADQAAREVATRETPETSTLLAGKRTADGSEFEKRTADGSEFESPKKKAKVE

SEQ ID NO: 2496 - protein, 2094 aa, synthetic construct
  source 1..2094: note = Description of Artificial Sequence: Synthetic polypeptide
MPAAKRVKLDGGDKKYSIGLDIGTNSVGWAVITDEYKVPSKKFKVLGNTDRHSIKKNLIGALLFDSGETAEATRLKRTARRRYTRRKNRICYLQEIFSNEMAKVDDSFFHRLEESFLVEEDKKHERHPIFGNIVDEVAYHEKYPTIYHLRKKLVDSTDKADLRLIYLALAHMIKFRGHFLIEGDLNPDNSDVDKLFIQLVQTYNQLFEENPINASGVDAKAILSARLSKSRRLENLIAQLPGEKKNGLFGNLIALSLGLTPNFKSNFDLAEDAKLQLSKDTYDDDLDNLLAQIGDQYADLFLAAKNLSDAILLSDILRVNTEITKAPLSASMIKRYDEHHQDLTLLKALVRQQLPEKYKEIFFDQSKNGYAGYIDGGASQEEFYKFIKPILEKMDGTEELLVKLNREDLLRKQRTFDNGSIPHQIHLGELHAILRRQEDFYPFLKDNREKIEKILTFRIPYYVGPLARGNSRFAWMTRKSEETITPWNFEEVVDKGASAQSFIERMTNFDKNLPNEKVLPKHSLLYEYFTVYNELTKVKYVTEGMRKPAFLSGEQKKAIVDLLFKTNRKVTVKQLKEDYFKKIECFDSVEISGVEDRFNASLGTYHDLLKIIKDKDFLDNEENEDILEDIVLTLTLFEDREMIEERLKTYAHLFDDKVMKQLKRRRYTGWGRLSRKLINGIRDKQSGKTILDFLKSDGFANRNFMQLIHDDSLTFKEDIQKAQVSGQGDSLHEHIANLAGSPAIKKGILQTVKVVDELVKVMGRHKPENIVIEMARENQTTQKGQKNSRERMKRIEEGIKELGSQILKEHPVENTQLQNEKLYLYYLQNGRDMYVDQELDINRLSDYDVDHIVPQSFLKDDSIDNKVLTRSDKARGKSDNVPSEEVVKKMKNYWRQLLNAKLITQRKFDNLTKAERGGLSELDKAGFIKRQLVETRQITKHVAQILDSRMNTKYDENDKLIREVKVITLKSKLVSDFRKDFQFYKVREINNYHHAHDAYLNAVVGTALIKKYPKLESEFVYGDYKVYDVRKMIAKSEQEIGKATAKYFFYSNIMNFFKTEITLANGEIRKRPLIETNGETGEIVWDKGRDFATVRKVLSMPQVNIVKKTEVQTGGFSKESILPKRNSDKLIARKKDWDPKKYGGFDSPTVAYSVLVVAKVEKGKSKKLKSVKELLGITIMERSSFEKNPIDFLEAKGYKEVKKDLIIKLPKYSLFELENGRKRMLASAGELQKGNELALPSKYVNFLYLASHYEKLKGSPEDNEQKQLFVEQHKHYLDEIIEQISEFSKRVILADANLDKVLSAYNKHRDKPIREQAENIIHLFTLTNLGAPAAFKYFDTTIDRKRYTSTKEVLDATLIHQSITGLYETRIDLSQLGGDGGGGGPAPGGSGGTLNIEDEYRLHETSKGPDVPLGSTWLSDFPQAWAETGGMGLAVRQAPLIIPLKATSTPVSIKQYPMSQEARLGIKPHIQRLLDQGILVPCQSPWNTPLLPVKKPGTNDYRPVQDLREVNKRVEDIHPTVPNPYNLLSGLPPSHQWYTVLDLKDAFFCLRLHPTSQSLFAFEWRDPEMGISGQLTWTRLPQGFKNSPTLFNEALHRDLADFRIQHPDLILLQYVDDLLLAATSELDCQQGTRALLQTLGDLGYRASAKKAQICQKQVKYLGYLLKEGQRWLTEARKETVMGQPTPKTPRQLREFLGTAGFCRLWIPGFAEMAAPLYPLTKPGTLFEWGPDQQKAYQEIKQALLTAPALGLPDLTKPFELFVDEKQGYAKGVLTQKLGPWRRPVAYLSKKLDPVAAGWPPCLRMVAAIAVLTKDAGKLTMGQPLVILAPHAVEALVKQPPDRWLSNARMTHYQALLLDTDRVQFGPIVALNPATLLPLPEEGLQHDCLDILAEAHGTRPDLTDQPLPDADHTWYTDGSSFLQEGQRKAGAAVTTETEVVWAKALPAGTSAQRAELIALTQALKMAEGKKLNVYTDSRYAFATAHIHGEIYRRRGWLTSEGKEIKNKDEILALLKALFLPKRLSIIHCPGHQKGNRAEARGNRMADQAAREVATRETPETSTLLAGKRTADGSEFEKRTADGSEFESPKKKAKVE

SEQ ID NO: 2497 - protein, 2091 aa, synthetic construct
  source 1..2091: note = Description of Artificial Sequence: Synthetic polypeptide
MPAAKRVKLDGGDKKYSIGLDIGTNSVGWAVITDEYKVPSKKFKVLGNTDRHSIKKNLIGALLFDSGETAEATRLKRTARRRYTRRKNRICYLQEIFSNEMAKVDDSFFHRLEESFLVEEDKKHERHPIFGNIVDEVAYHEKYPTIYHLRKKLVDSTDKADLRLIYLALAHMIKFRGHFLIEGDLNPDNSDVDKLFIQLVQTYNQLFEENPINASGVDAKAILSARLSKSRRLENLIAQLPGEKKNGLFGNLIALSLGLTPNFKSNFDLAEDAKLQLSKDTYDDDLDNLLAQIGDQYADLFLAAKNLSDAILLSDILRVNTEITKAPLSASMIKRYDEHHQDLTLLKALVRQQLPEKYKEIFFDQSKNGYAGYIDGGASQEEFYKFIKPILEKMDGTEELLVKLNREDLLRKQRTFDNGSIPHQIHLGELHAILRRQEDFYPFLKDNREKIEKILTFRIPYYVGPLARGNSRFAWMTRKSEETITPWNFEEVVDKGASAQSFIERMTNFDKNLPNEKVLPKHSLLYEYFTVYNELTKVKYVTEGMRKPAFLSGEQKKAIVDLLFKTNRKVTVKQLKEDYFKKIECFDSVEISGVEDRFNASLGTYHDLLKIIKDKDFLDNEENEDILEDIVLTLTLFEDREMIEERLKTYAHLFDDKVMKQLKRRRYTGWGRLSRKLINGIRDKQSGKTILDFLKSDGFANRNFMQLIHDDSLTFKEDIQKAQVSGQGDSLHEHIANLAGSPAIKKGILQTVKVVDELVKVMGRHKPENIVIEMARENQTTQKGQKNSRERMKRIEEGIKELGSQILKEHPVENTQLQNEKLYLYYLQNGRDMYVDQELDINRLSDYDVDHIVPQSFLKDDSIDNKVLTRSDKARGKSDNVPSEEVVKKMKNYWRQLLNAKLITQRKFDNLTKAERGGLSELDKAGFIKRQLVETRQITKHVAQILDSRMNTKYDENDKLIREVKVITLKSKLVSDFRKDFQFYKVREINNYHHAHDAYLNAVVGTALIKKYPKLESEFVYGDYKVYDVRKMIAKSEQEIGKATAKYFFYSNIMNFFKTEITLANGEIRKRPLIETNGETGEIVWDKGRDFATVRKVLSMPQVNIVKKTEVQTGGFSKESILPKRNSDKLIARKKDWDPKKYGGFDSPTVAYSVLVVAKVEKGKSKKLKSVKELLGITIMERSSFEKNPIDFLEAKGYKEVKKDLIIKLPKYSLFELENGRKRMLASAGELQKGNELALPSKYVNFLYLASHYEKLKGSPEDNEQKQLFVEQHKHYLDEIIEQISEFSKRVILADANLDKVLSAYNKHRDKPIREQAENIIHLFTLTNLGAPAAFKYFDTTIDRKRYTSTKEVLDATLIHQSITGLYETRIDLSQLGGDGGPAPGGSGGTLNIEDEYRLHETSKGPDVPLGSTWLSDFPQAWAETGGMGLAVRQAPLIIPLKATSTPVSIKQYPMSQEARLGIKPHIQRLLDQGILVPCQSPWNTPLLPVKKPGTNDYRPVQDLREVNKRVEDIHPTVPNPYNLLSGLPPSHQWYTVLDLKDAFFCLRLHPTSQSLFAFEWRDPEMGISGQLTWTRLPQGFKNSPTLFNEALHRDLADFRIQHPDLILLQYVDDLLLAATSELDCQQGTRALLQTLGDLGYRASAKKAQICQKQVKYLGYLLKEGQRWLTEARKETVMGQPTPKTPRQLREFLGTAGFCRLWIPGFAEMAAPLYPLTKPGTLFEWGPDQQKAYQEIKQALLTAPALGLPDLTKPFELFVDEKQGYAKGVLTQKLGPWRRPVAYLSKKLDPVAAGWPPCLRMVAAIAVLTKDAGKLTMGQPLVILAPHAVEALVKQPPDRWLSNARMTHYQALLLDTDRVQFGPIVALNPATLLPLPEEGLQHDCLDILAEAHGTRPDLTDQPLPDADHTWYTDGSSFLQEGQRKAGAAVTTETEVVWAKALPAGTSAQRAELIALTQALKMAEGKKLNVYTDSRYAFATAHIHGEIYRRRGWLTSEGKEIKNKDEILALLKALFLPKRLSIIHCPGHQKGNRAEARGNRMADQAAREVATRETPETSTLLAGKRTADGSEFEKRTADGSEFESPKKKAKVE

SEQ ID NO: 2498 - protein, 2094 aa, synthetic construct
  source 1..2094: note = Description of Artificial Sequence: Synthetic polypeptide
MPAAKRVKLDGGDKKYSIGLDIGTNSVGWAVITDEYKVPSKKFKVLGNTDRHSIKKNLIGALLFDSGETAEATRLKRTARRRYTRRKNRICYLQEIFSNEMAKVDDSFFHRLEESFLVEEDKKHERHPIFGNIVDEVAYHEKYPTIYHLRKKLVDSTDKADLRLIYLALAHMIKFRGHFLIEGDLNPDNSDVDKLFIQLVQTYNQLFEENPINASGVDAKAILSARLSKSRRLENLIAQLPGEKKNGLFGNLIALSLGLTPNFKSNFDLAEDAKLQLSKDTYDDDLDNLLAQIGDQYADLFLAAKNLSDAILLSDILRVNTEITKAPLSASMIKRYDEHHQDLTLLKALVRQQLPEKYKEIFFDQSKNGYAGYIDGGASQEEFYKFIKPILEKMDGTEELLVKLNREDLLRKQRTFDNGSIPHQIHLGELHAILRRQEDFYPFLKDNREKIEKILTFRIPYYVGPLARGNSRFAWMTRKSEETITPWNFEEVVDKGASAQSFIERMTNFDKNLPNEKVLPKHSLLYEYFTVYNELTKVKYVTEGMRKPAFLSGEQKKAIVDLLFKTNRKVTVKQLKEDYFKKIECFDSVEISGVEDRFNASLGTYHDLLKIIKDKDFLDNEENEDILEDIVLTLTLFEDREMIEERLKTYAHLFDDKVMKQLKRRRYTGWGRLSRKLINGIRDKQSGKTILDFLKSDGFANRNFMQLIHDDSLTFKEDIQKAQVSGQGDSLHEHIANLAGSPAIKKGILQTVKVVDELVKVMGRHKPENIVIEMARENQTTQKGQKNSRERMKRIEEGIKELGSQILKEHPVENTQLQNEKLYLYYLQNGRDMYVDQELDINRLSDYDVDHIVPQSFLKDDSIDNKVLTRSDKARGKSDNVPSEEVVKKMKNYWRQLLNAKLITQRKFDNLTKAERGGLSELDKAGFIKRQLVETRQITKHVAQILDSRMNTKYDENDKLIREVKVITLKSKLVSDFRKDFQFYKVREINNYHHAHDAYLNAVVGTALIKKYPKLESEFVYGDYKVYDVRKMIAKSEQEIGKATAKYFFYSNIMNFFKTEITLANGEIRKRPLIETNGETGEIVWDKGRDFATVRKVLSMPQVNIVKKTEVQTGGFSKESILPKRNSDKLIARKKDWDPKKYGGFDSPTVAYSVLVVAKVEKGKSKKLKSVKELLGITIMERSSFEKNPIDFLEAKGYKEVKKDLIIKLPKYSLFELENGRKRMLASAGELQKGNELALPSKYVNFLYLASHYEKLKGSPEDNEQKQLFVEQHKHYLDEIIEQISEFSKRVILADANLDKVLSAYNKHRDKPIREQAENIIHLFTLTNLGAPAAFKYFDTTIDRKRYTSTKEVLDATLIHQSITGLYETRIDLSQLGGDGGGGGGGSPAPGGTLNIEDEYRLHETSKGPDVPLGSTWLSDFPQAWAETGGMGLAVRQAPLIIPLKATSTPVSIKQYPMSQEARLGIKPHIQRLLDQGILVPCQSPWNTPLLPVKKPGTNDYRPVQDLREVNKRVEDIHPTVPNPYNLLSGLPPSHQWYTVLDLKDAFFCLRLHPTSQSLFAFEWRDPEMGISGQLTWTRLPQGFKNSPTLFNEALHRDLADFRIQHPDLILLQYVDDLLLAATSELDCQQGTRALLQTLGDLGYRASAKKAQICQKQVKYLGYLLKEGQRWLTEARKETVMGQPTPKTPRQLREFLGTAGFCRLWIPGFAEMAAPLYPLTKPGTLFEWGPDQQKAYQEIKQALLTAPALGLPDLTKPFELFVDEKQGYAKGVLTQKLGPWRRPVAYLSKKLDPVAAGWPPCLRMVAAIAVLTKDAGKLTMGQPLVILAPHAVEALVKQPPDRWLSNARMTHYQALLLDTDRVQFGPIVALNPATLLPLPEEGLQHDCLDILAEAHGTRPDLTDQPLPDADHTWYTDGSSFLQEGQRKAGAAVTTETEVVWAKALPAGTSAQRAELIALTQALKMAEGKKLNVYTDSRYAFATAHIHGEIYRRRGWLTSEGKEIKNKDEILALLKALFLPKRLSIIHCPGHQKGNRAEARGNRMADQAAREVATRETPETSTLLAGKRTADGSEFEKRTADGSEFESPKKKAKVE

SEQ ID NO: 2499 - protein, 2094 aa, synthetic construct
  source 1..2094: note = Description of Artificial Sequence: Synthetic polypeptide
MPAAKRVKLDGGDKKYSIGLDIGTNSVGWAVITDEYKVPSKKFKVLGNTDRHSIKKNLIGALLFDSGETAEATRLKRTARRRYTRRKNRICYLQEIFSNEMAKVDDSFFHRLEESFLVEEDKKHERHPIFGNIVDEVAYHEKYPTIYHLRKKLVDSTDKADLRLIYLALAHMIKFRGHFLIEGDLNPDNSDVDKLFIQLVQTYNQLFEENPINASGVDAKAILSARLSKSRRLENLIAQLPGEKKNGLFGNLIALSLGLTPNFKSNFDLAEDAKLQLSKDTYDDDLDNLLAQIGDQYADLFLAAKNLSDAILLSDILRVNTEITKAPLSASMIKRYDEHHQDLTLLKALVRQQLPEKYKEIFFDQSKNGYAGYIDGGASQEEFYKFIKPILEKMDGTEELLVKLNREDLLRKQRTFDNGSIPHQIHLGELHAILRRQEDFYPFLKDNREKIEKILTFRIPYYVGPLARGNSRFAWMTRKSEETITPWNFEEVVDKGASAQSFIERMTNFDKNLPNEKVLPKHSLLYEYFTVYNELTKVKYVTEGMRKPAFLSGEQKKAIVDLLFKTNRKVTVKQLKEDYFKKIECFDSVEISGVEDRFNASLGTYHDLLKIIKDKDFLDNEENEDILEDIVLTLTLFEDREMIEERLKTYAHLFDDKVMKQLKRRRYTGWGRLSRKLINGIRDKQSGKTILDFLKSDGFANRNFMQLIHDDSLTFKEDIQKAQVSGQGDSLHEHIANLAGSPAIKKGILQTVKVVDELVKVMGRHKPENIVIEMARENQTTQKGQKNSRERMKRIEEGIKELGSQILKEHPVENTQLQNEKLYLYYLQNGRDMYVDQELDINRLSDYDVDHIVPQSFLKDDSIDNKVLTRSDKARGKSDNVPSEEVVKKMKNYWRQLLNAKLITQRKFDNLTKAERGGLSELDKAGFIKRQLVETRQITKHVAQILDSRMNTKYDENDKLIREVKVITLKSKLVSDFRKDFQFYKVREINNYHHAHDAYLNAVVGTALIKKYPKLESEFVYGDYKVYDVRKMIAKSEQEIGKATAKYFFYSNIMNFFKTEITLANGEIRKRPLIETNGETGEIVWDKGRDFATVRKVLSMPQVNIVKKTEVQTGGFSKESILPKRNSDKLIARKKDWDPKKYGGFDSPTVAYSVLVVAKVEKGKSKKLKSVKELLGITIMERSSFEKNPIDFLEAKGYKEVKKDLIIKLPKYSLFELENGRKRMLASAGELQKGNELALPSKYVNFLYLASHYEKLKGSPEDNEQKQLFVEQHKHYLDEIIEQISEFSKRVILADANLDKVLSAYNKHRDKPIREQAENIIHLFTLTNLGAPAAFKYFDTTIDRKRYTSTKEVLDATLIHQSITGLYETRIDLSQLGGDGGGGSGGSGGSGGTLNIEDEYRLHETSKGPDVPLGSTWLSDFPQAWAETGGMGLAVRQAPLIIPLKATSTPVSIKQYPMSQEARLGIKPHIQRLLDQGILVPCQSPWNTPLLPVKKPGTNDYRPVQDLREVNKRVEDIHPTVPNPYNLLSGLPPSHQWYTVLDLKDAFFCLRLHPTSQSLFAFEWRDPEMGISGQLTWTRLPQGFKNSPTLFNEALHRDLADFRIQHPDLILLQYVDDLLLAATSELDCQQGTRALLQTLGDLGYRASAKKAQICQKQVKYLGYLLKEGQRWLTEARKETVMGQPTPKTPRQLREFLGTAGFCRLWIPGFAEMAAPLYPLTKPGTLFEWGPDQQKAYQEIKQALLTAPALGLPDLTKPFELFVDEKQGYAKGVLTQKLGPWRRPVAYLSKKLDPVAAGWPPCLRMVAAIAVLTKDAGKLTMGQPLVILAPHAVEALVKQPPDRWLSNARMTHYQALLLDTDRVQFGPIVALNPATLLPLPEEGLQHDCLDILAEAHGTRPDLTDQPLPDADHTWYTDGSSFLQEGQRKAGAAVTTETEVVWAKALPAGTSAQRAELIALTQALKMAEGKKLNVYTDSRYAFATAHIHGEIYRRRGWLTSEGKEIKNKDEILALLKALFLPKRLSIIHCPGHQKGNRAEARGNRMADQAAREVATRETPETSTLLAGKRTADGSEFEKRTADGSEFESPKKKAKVE

SEQ ID NO: 2500 - protein, 2093 aa, synthetic construct
  source 1..2093: note = Description of Artificial Sequence: Synthetic polypeptide
MPAAKRVKLDGGDKKYSIGLDIGTNSVGWAVITDEYKVPSKKFKVLGNTDRHSIKKNLIGALLFDSGETAEATRLKRTARRRYTRRKNRICYLQEIFSNEMAKVDDSFFHRLEESFLVEEDKKHERHPIFGNIVDEVAYHEKYPTIYHLRKKLVDSTDKADLRLIYLALAHMIKFRGHFLIEGDLNPDNSDVDKLFIQLVQTYNQLFEENPINASGVDAKAILSARLSKSRRLENLIAQLPGEKKNGLFGNLIALSLGLTPNFKSNFDLAEDAKLQLSKDTYDDDLDNLLAQIGDQYADLFLAAKNLSDAILLSDILRVNTEITKAPLSASMIKRYDEHHQDLTLLKALVRQQLPEKYKEIFFDQSKNGYAGYIDGGASQEEFYKFIKPILEKMDGTEELLVKLNREDLLRKQRTFDNGSIPHQIHLGELHAILRRQEDFYPFLKDNREKIEKILTFRIPYYVGPLARGNSRFAWMTRKSEETITPWNFEEVVDKGASAQSFIERMTNFDKNLPNEKVLPKHSLLYEYFTVYNELTKVKYVTEGMRKPAFLSGEQKKAIVDLLFKTNRKVTVKQLKEDYFKKIECFDSVEISGVEDRFNASLGTYHDLLKIIKDKDFLDNEENEDILEDIVLTLTLFEDREMIEERLKTYAHLFDDKVMKQLKRRRYTGWGRLSRKLINGIRDKQSGKTILDFLKSDGFANRNFMQLIHDDSLTFKEDIQKAQVSGQGDSLHEHIANLAGSPAIKKGILQTVKVVDELVKVMGRHKPENIVIEMARENQTTQKGQKNSRERMKRIEEGIKELGSQILKEHPVENTQLQNEKLYLYYLQNGRDMYVDQELDINRLSDYDVDHIVPQSFLKDDSIDNKVLTRSDKARGKSDNVPSEEVVKKMKNYWRQLLNAKLITQRKFDNLTKAERGGLSELDKAGFIKRQLVETRQITKHVAQILDSRMNTKYDENDKLIREVKVITLKSKLVSDFRKDFQFYKVREINNYHHAHDAYLNAVVGTALIKKYPKLESEFVYGDYKVYDVRKMIAKSEQEIGKATAKYFFYSNIMNFFKTEITLANGEIRKRPLIETNGETGEIVWDKGRDFATVRKVLSMPQVNIVKKTEVQTGGFSKESILPKRNSDKLIARKKDWDPKKYGGFDSPTVAYSVLVVAKVEKGKSKKLKSVKELLGITIMERSSFEKNPIDFLEAKGYKEVKKDLIIKLPKYSLFELENGRKRMLASAGELQKGNELALPSKYVNFLYLASHYEKLKGSPEDNEQKQLFVEQHKHYLDEIIEQISEFSKRVILADANLDKVLSAYNKHRDKPIREQAENIIHLFTLTNLGAPAAFKYFDTTIDRKRYTSTKEVLDATLIHQSITGLYETRIDLSQLGGDGGGGGGGGGGGGTLNIEDEYRLHETSKGPDVPLGSTWLSDFPQAWAETGGMGLAVRQAPLIIPLKATSTPVSIKQYPMSQEARLGIKPHIQRLLDQGILVPCQSPWNTPLLPVKKPGTNDYRPVQDLREVNKRVEDIHPTVPNPYNLLSGLPPSHQWYTVLDLKDAFFCLRLHPTSQSLFAFEWRDPEMGISGQLTWTRLPQGFKNSPTLFNEALHRDLADFRIQHPDLILLQYVDDLLLAATSELDCQQGTRALLQTLGDLGYRASAKKAQICQKQVKYLGYLLKEGQRWLTEARKETVMGQPTPKTPRQLREFLGTAGFCRLWIPGFAEMAAPLYPLTKPGTLFEWGPDQQKAYQEIKQALLTAPALGLPDLTKPFELFVDEKQGYAKGVLTQKLGPWRRPVAYLSKKLDPVAAGWPPCLRMVAAIAVLTKDAGKLTMGQPLVILAPHAVEALVKQPPDRWLSNARMTHYQALLLDTDRVQFGPIVALNPATLLPLPEEGLQHDCLDILAEAHGTRPDLTDQPLPDADHTWYTDGSSFLQEGQRKAGAAVTTETEVVWAKALPAGTSAQRAELIALTQALKMAEGKKLNVYTDSRYAFATAHIHGEIYRRRGWLTSEGKEIKNKDEILALLKALFLPKRLSIIHCPGHQKGNRAEARGNRMADQAAREVATRETPETSTLLAGKRTADGSEFEKRTADGSEFESPKKKAKVE

SEQ ID NO: 2501 - protein, 2094 aa, synthetic construct
  source 1..2094: note = Description of Artificial Sequence: Synthetic polypeptide
MPAAKRVKLDGGDKKYSIGLDIGTNSVGWAVITDEYKVPSKKFKVLGNTDRHSIKKNLIGALLFDSGETAEATRLKRTARRRYTRRKNRICYLQEIFSNEMAKVDDSFFHRLEESFLVEEDKKHERHPIFGNIVDEVAYHEKYPTIYHLRKKLVDSTDKADLRLIYLALAHMIKFRGHFLIEGDLNPDNSDVDKLFIQLVQTYNQLFEENPINASGVDAKAILSARLSKSRRLENLIAQLPGEKKNGLFGNLIALSLGLTPNFKSNFDLAEDAKLQLSKDTYDDDLDNLLAQIGDQYADLFLAAKNLSDAILLSDILRVNTEITKAPLSASMIKRYDEHHQDLTLLKALVRQQLPEKYKEIFFDQSKNGYAGYIDGGASQEEFYKFIKPILEKMDGTEELLVKLNREDLLRKQRTFDNGSIPHQIHLGELHAILRRQEDFYPFLKDNREKIEKILTFRIPYYVGPLARGNSRFAWMTRKSEETITPWNFEEVVDKGASAQSFIERMTNFDKNLPNEKVLPKHSLLYEYFTVYNELTKVKYVTEGMRKPAFLSGEQKKAIVDLLFKTNRKVTVKQLKEDYFKKIECFDSVEISGVEDRFNASLGTYHDLLKIIKDKDFLDNEENEDILEDIVLTLTLFEDREMIEERLKTYAHLFDDKVMKQLKRRRYTGWGRLSRKLINGIRDKQSGKTILDFLKSDGFANRNFMQLIHDDSLTFKEDIQKAQVSGQGDSLHEHIANLAGSPAIKKGILQTVKVVDELVKVMGRHKPENIVIEMARENQTTQKGQKNSRERMKRIEEGIKELGSQILKEHPVENTQLQNEKLYLYYLQNGRDMYVDQELDINRLSDYDVDHIVPQSFLKDDSIDNKVLTRSDKARGKSDNVPSEEVVKKMKNYWRQLLNAKLITQRKFDNLTKAERGGLSELDKAGFIKRQLVETRQITKHVAQILDSRMNTKYDENDKLIREVKVITLKSKLVSDFRKDFQFYKVREINNYHHAHDAYLNAVVGTALIKKYPKLESEFVYGDYKVYDVRKMIAKSEQEIGKATAKYFFYSNIMNFFKTEITLANGEIRKRPLIETNGETGEIVWDKGRDFATVRKVLSMPQVNIVKKTEVQTGGFSKESILPKRNSDKLIARKKDWDPKKYGGFDSPTVAYSVLVVAKVEKGKSKKLKSVKELLGITIMERSSFEKNPIDFLEAKGYKEVKKDLIIKLPKYSLFELENGRKRMLASAGELQKGNELALPSKYVNFLYLASHYEKLKGSPEDNEQKQLFVEQHKHYLDEIIEQISEFSKRVILADANLDKVLSAYNKHRDKPIREQAENIIHLFTLTNLGAPAAFKYFDTTIDRKRYTSTKEVLDATLIHQSITGLYETRIDLSQLGGDGGGSSPAPGGSGGTLNIEDEYRLHETSKGPDVPLGSTWLSDFPQAWAETGGMGLAVRQAPLIIPLKATSTPVSIKQYPMSQEARLGIKPHIQRLLDQGILVPCQSPWNTPLLPVKKPGTNDYRPVQDLREVNKRVEDIHPTVPNPYNLLSGLPPSHQWYTVLDLKDAFFCLRLHPTSQSLFAFEWRDPEMGISGQLTWTRLPQGFKNSPTLFNEALHRDLADFRIQHPDLILLQYVDDLLLAATSELDCQQGTRALLQTLGDLGYRASAKKAQICQKQVKYLGYLLKEGQRWLTEARKETVMGQPTPKTPRQLREFLGTAGFCRLWIPGFAEMAAPLYPLTKPGTLFEWGPDQQKAYQEIKQALLTAPALGLPDLTKPFELFVDEKQGYAKGVLTQKLGPWRRPVAYLSKKLDPVAAGWPPCLRMVAAIAVLTKDAGKLTMGQPLVILAPHAVEALVKQPPDRWLSNARMTHYQALLLDTDRVQFGPIVALNPATLLPLPEEGLQHDCLDILAEAHGTRPDLTDQPLPDADHTWYTDGSSFLQEGQRKAGAAVTTETEVVWAKALPAGTSAQRAELIALTQALKMAEGKKLNVYTDSRYAFATAHIHGEIYRRRGWLTSEGKEIKNKDEILALLKALFLPKRLSIIHCPGHQKGNRAEARGNRMADQAAREVATRETPETSTLLAGKRTADGSEFEKRTADGSEFESPKKKAKVE

SEQ ID NO: 2502 - protein, 2094 aa, synthetic construct
  source 1..2094: note = Description of Artificial Sequence: Synthetic polypeptide
MPAAKRVKLDGGDKKYSIGLDIGTNSVGWAVITDEYKVPSKKFKVLGNTDRHSIKKNLIGALLFDSGETAEATRLKRTARRRYTRRKNRICYLQEIFSNEMAKVDDSFFHRLEESFLVEEDKKHERHPIFGNIVDEVAYHEKYPTIYHLRKKLVDSTDKADLRLIYLALAHMIKFRGHFLIEGDLNPDNSDVDKLFIQLVQTYNQLFEENPINASGVDAKAILSARLSKSRRLENLIAQLPGEKKNGLFGNLIALSLGLTPNFKSNFDLAEDAKLQLSKDTYDDDLDNLLAQIGDQYADLFLAAKNLSDAILLSDILRVNTEITKAPLSASMIKRYDEHHQDLTLLKALVRQQLPEKYKEIFFDQSKNGYAGYIDGGASQEEFYKFIKPILEKMDGTEELLVKLNREDLLRKQRTFDNGSIPHQIHLGELHAILRRQEDFYPFLKDNREKIEKILTFRIPYYVGPLARGNSRFAWMTRKSEETITPWNFEEVVDKGASAQSFIERMTNFDKNLPNEKVLPKHSLLYEYFTVYNELTKVKYVTEGMRKPAFLSGEQKKAIVDLLFKTNRKVTVKQLKEDYFKKIECFDSVEISGVEDRFNASLGTYHDLLKIIKDKDFLDNEENEDILEDIVLTLTLFEDREMIEERLKTYAHLFDDKVMKQLKRRRYTGWGRLSRKLINGIRDKQSGKTILDFLKSDGFANRNFMQLIHDDSLTFKEDIQKAQVSGQGDSLHEHIANLAGSPAIKKGILQTVKVVDELVKVMGRHKPENIVIEMARENQTTQKGQKNSRERMKRIEEGIKELGSQILKEHPVENTQLQNEKLYLYYLQNGRDMYVDQELDINRLSDYDVDHIVPQSFLKDDSIDNKVLTRSDKARGKSDNVPSEEVVKKMKNYWRQLLNAKLITQRKFDNLTKAERGGLSELDKAGFIKRQLVETRQITKHVAQILDSRMNTKYDENDKLIREVKVITLKSKLVSDFRKDFQFYKVREINNYHHAHDAYLNAVVGTALIKKYPKLESEFVYGDYKVYDVRKMIAKSEQEIGKATAKYFFYSNIMNFFKTEITLANGEIRKRPLIETNGETGEIVWDKGRDFATVRKVLSMPQVNIVKKTEVQTGGFSKESILPKRNSDKLIARKKDWDPKKYGGFDSPTVAYSVLVVAKVEKGKSKKLKSVKELLGITIMERSSFEKNPIDFLEAKGYKEVKKDLIIKLPKYSLFELENGRKRMLASAGELQKGNELALPSKYVNFLYLASHYEKLKGSPEDNEQKQLFVEQHKHYLDEIIEQISEFSKRVILADANLDKVLSAYNKHRDKPIREQAENIIHLFTLTNLGAPAAFKYFDTTIDRKRYTSTKEVLDATLIHQSITGLYETRIDLSQLGGDGGPAPGGGGGSGGTLNIEDEYRLHETSKGPDVPLGSTWLSDFPQAWAETGGMGLAVRQAPLIIPLKATSTPVSIKQYPMSQEARLGIKPHIQRLLDQGILVPCQSPWNTPLLPVKKPGTNDYRPVQDLREVNKRVEDIHPTVPNPYNLLSGLPPSHQWYTVLDLKDAFFCLRLHPTSQSLFAFEWRDPEMGISGQLTWTRLPQGFKNSPTLFNEALHRDLADFRIQHPDLILLQYVDDLLLAATSELDCQQGTRALLQTLGDLGYRASAKKAQICQKQVKYLGYLLKEGQRWLTEARKETVMGQPTPKTPRQLREFLGTAGFCRLWIPGFAEMAAPLYPLTKPGTLFEWGPDQQKAYQEIKQALLTAPALGLPDLTKPFELFVDEKQGYAKGVLTQKLGPWRRPVAYLSKKLDPVAAGWPPCLRMVAAIAVLTKDAGKLTMGQPLVILAPHAVEALVKQPPDRWLSNARMTHYQALLLDTDRVQFGPIVALNPATLLPLPEEGLQHDCLDILAEAHGTRPDLTDQPLPDADHTWYTDGSSFLQEGQRKAGAAVTTETEVVWAKALPAGTSAQRAELIALTQALKMAEGKKLNVYTDSRYAFATAHIHGEIYRRRGWLTSEGKEIKNKDEILALLKALFLPKRLSIIHCPGHQKGNRAEARGNRMADQAAREVATRETPETSTLLAGKRTADGSEFEKRTADGSEFESPKKKAKVE

SEQ ID NO: 2503 - protein, 2093 aa, synthetic construct
  source 1..2093: note = Description of Artificial Sequence: Synthetic polypeptide
MPAAKRVKLDGGDKKYSIGLDIGTNSVGWAVITDEYKVPSKKFKVLGNTDRHSIKKNLIGALLFDSGETAEATRLKRTARRRYTRRKNRICYLQEIFSNEMAKVDDSFFHRLEESFLVEEDKKHERHPIFGNIVDEVAYHEKYPTIYHLRKKLVDSTDKADLRLIYLALAHMIKFRGHFLIEGDLNPDNSDVDKLFIQLVQTYNQLFEENPINASGVDAKAILSARLSKSRRLENLIAQLPGEKKNGLFGNLIALSLGLTPNFKSNFDLAEDAKLQLSKDTYDDDLDNLLAQIGDQYADLFLAAKNLSDAILLSDILRVNTEITKAPLSASMIKRYDEHHQDLTLLKALVRQQLPEKYKEIFFDQSKNGYAGYIDGGASQEEFYKFIKPILEKMDGTEELLVKLNREDLLRKQRTFDNGSIPHQIHLGELHAILRRQEDFYPFLKDNREKIEKILTFRIPYYVGPLARGNSRFAWMTRKSEETITPWNFEEVVDKGASAQSFIERMTNFDKNLPNEKVLPKHSLLYEYFTVYNELTKVKYVTEGMRKPAFLSGEQKKAIVDLLFKTNRKVTVKQLKEDYFKKIECFDSVEISGVEDRFNASLGTYHDLLKIIKDKDFLDNEENEDILEDIVLTLTLFEDREMIEERLKTYAHLFDDKVMKQLKRRRYTGWGRLSRKLINGIRDKQSGKTILDFLKSDGFANRNFMQLIHDDSLTFKEDIQKAQVSGQGDSLHEHIANLAGSPAIKKGILQTVKVVDELVKVMGRHKPENIVIEMARENQTTQKGQKNSRERMKRIEEGIKELGSQILKEHPVENTQLQNEKLYLYYLQNGRDMYVDQELDINRLSDYDVDHIVPQSFLKDDSIDNKVLTRSDKARGKSDNVPSEEVVKKMKNYWRQLLNAKLITQRKFDNLTKAERGGLSELDKAGFIKRQLVETRQITKHVAQILDSRMNTKYDENDKLIREVKVITLKSKLVSDFRKDFQFYKVREINNYHHAHDAYLNAVVGTALIKKYPKLESEFVYGDYKVYDVRKMIAKSEQEIGKATAKYFFYSNIMNFFKTEITLANGEIRKRPLIETNGETGEIVWDKGRDFATVRKVLSMPQVNIVKKTEVQTGGFSKESILPKRNSDKLIARKKDWDPKKYGGFDSPTVAYSVLVVAKVEKGKSKKLKSVKELLGITIMERSSFEKNPIDFLEAKGYKEVKKDLIIKLPKYSLFELENGRKRMLASAGELQKGNELALPSKYVNFLYLASHYEKLKGSPEDNEQKQLFVEQHKHYLDEIIEQISEFSKRVILADANLDKVLSAYNKHRDKPIREQAENIIHLFTLTNLGAPAAFKYFDTTIDRKRYTSTKEVLDATLIHQSITGLYETRIDLSQLGGDGGGSSEAAAKGGTLNIEDEYRLHETSKGPDVPLGSTWLSDFPQAWAETGGMGLAVRQAPLIIPLKATSTPVSIKQYPMSQEARLGIKPHIQRLLDQGILVPCQSPWNTPLLPVKKPGTNDYRPVQDLREVNKRVEDIHPTVPNPYNLLSGLPPSHQWYTVLDLKDAFFCLRLHPTSQSLFAFEWRDPEMGISGQLTWTRLPQGFKNSPTLFNEALHRDLADFRIQHPDLILLQYVDDLLLAATSELDCQQGTRALLQTLGDLGYRASAKKAQICQKQVKYLGYLLKEGQRWLTEARKETVMGQPTPKTPRQLREFLGKAGFCRLFIPGFAEMAAPLYPLTKPGTLFEWGPDQQKAYQEIKQALLTAPALGLPDLTKPFELFVDEKQGYAKGVLTQKLGPWRRPVAYLSKKLDPVAAGWPPCLRMVAAIAVLTKDAGKLTMGQPLVILAPHAVEALVKQPPDRWLSNARMTHYQALLLDTDRVQFGPIVALNPATLLPLPEEGLQHDCLDILAEAHGTRPDLTDQPLPDADHTWYTDGSSFLQEGQRKAGAAVTTETEVVWAKALPAGTSAQRAELIALTQALKMAEGKKLNVYTDSRYAFATAHIHGEIYRRRGWLTSEGKEIKNKDEILALLKALFLPKRLSIIHCPGHQKGNRAEARGNRMADQAAREVATRETPETSTLLAGKRTADGSEFEKRTADGSEFESPKKKAKVE

SEQ ID NO: 2504 - protein, 2090 aa, synthetic construct
  source 1..2090: note = Description of Artificial Sequence: Synthetic polypeptide
MPAAKRVKLDGGDKKYSIGLDIGTNSVGWAVITDEYKVPSKKFKVLGNTDRHSIKKNLIGALLFDSGETAEATRLKRTARRRYTRRKNRICYLQEIFSNEMAKVDDSFFHRLEESFLVEEDKKHERHPIFGNIVDEVAYHEKYPTIYHLRKKLVDSTDKADLRLIYLALAHMIKFRGHFLIEGDLNPDNSDVDKLFIQLVQTYNQLFEENPINASGVDAKAILSARLSKSRRLENLIAQLPGEKKNGLFGNLIALSLGLTPNFKSNFDLAEDAKLQLSKDTYDDDLDNLLAQIGDQYADLFLAAKNLSDAILLSDILRVNTEITKAPLSASMIKRYDEHHQDLTLLKALVRQQLPEKYKEIFFDQSKNGYAGYIDGGASQEEFYKFIKPILEKMDGTEELLVKLNREDLLRKQRTFDNGSIPHQIHLGELHAILRRQEDFYPFLKDNREKIEKILTFRIPYYVGPLARGNSRFAWMTRKSEETITPWNFEEVVDKGASAQSFIERMTNFDKNLPNEKVLPKHSLLYEYFTVYNELTKVKYVTEGMRKPAFLSGEQKKAIVDLLFKTNRKVTVKQLKEDYFKKIECFDSVEISGVEDRFNASLGTYHDLLKIIKDKDFLDNEENEDILEDIVLTLTLFEDREMIEERLKTYAHLFDDKVMKQLKRRRYTGWGRLSRKLINGIRDKQSGKTILDFLKSDGFANRNFMQLIHDDSLTFKEDIQKAQVSGQGDSLHEHIANLAGSPAIKKGILQTVKVVDELVKVMGRHKPENIVIEMARENQTTQKGQKNSRERMKRIEEGIKELGSQILKEHPVENTQLQNEKLYLYYLQNGRDMYVDQELDINRLSDYDVDHIVPQSFLKDDSIDNKVLTRSDKARGKSDNVPSEEVVKKMKNYWRQLLNAKLITQRKFDNLTKAERGGLSELDKAGFIKRQLVETRQITKHVAQILDSRMNTKYDENDKLIREVKVITLKSKLVSDFRKDFQFYKVREINNYHHAHDAYLNAVVGTALIKKYPKLESEFVYGDYKVYDVRKMIAKSEQEIGKATAKYFFYSNIMNFFKTEITLANGEIRKRPLIETNGETGEIVWDKGRDFATVRKVLSMPQVNIVKKTEVQTGGFSKESILPKRNSDKLIARKKDWDPKKYGGFDSPTVAYSVLVVAKVEKGKSKKLKSVKELLGITIMERSSFEKNPIDFLEAKGYKEVKKDLIIKLPKYSLFELENGRKRMLASAGELQKGNELALPSKYVNFLYLASHYEKLKGSPEDNEQKQLFVEQHKHYLDEIIEQISEFSKRVILADANLDKVLSAYNKHRDKPIREQAENIIHLFTLTNLGAPAAFKYFDTTIDRKRYTSTKEVLDATLIHQSITGLYETRIDLSQLGGDGGGGGGSGGTLNIEDEYRLHETSKGPDVPLGSTWLSDFPQAWAETGGMGLAVRQAPLIIPLKATSTPVSIKQYPMSQEARLGIKPHIQRLLDQGILVPCQSPWNTPLLPVKKPGTNDYRPVQDLREVNKRVEDIHPTVPNPYNLLSGLPPSHQWYTVLDLKDAFFCLRLHPTSQSLFAFEWRDPEMGISGQLTWTRLPQGFKNSPTLFNEALHRDLADFRIQHPDLILLQYVDDLLLAATSELDCQQGTRALLQTLGDLGYRASAKKAQICQKQVKYLGYLLKEGQRWLTEARKETVMGQPTPKTPRQLREFLGKAGFCRLFIPGFAEMAAPLYPLTKPGTLFEWGPDQQKAYQEIKQALLTAPALGLPDLTKPFELFVDEKQGYAKGVLTQKLGPWRRPVAYLSKKLDPVAAGWPPCLRMVAAIAVLTKDAGKLTMGQPLVILAPHAVEALVKQPPDRWLSNARMTHYQALLLDTDRVQFGPIVALNPATLLPLPEEGLQHDCLDILAEAHGTRPDLTDQPLPDADHTWYTDGSSFLQEGQRKAGAAVTTETEVVWAKALPAGTSAQRAELIALTQALKMAEGKKLNVYTDSRYAFATAHIHGEIYRRRGWLTSEGKEIKNKDEILALLKALFLPKRLSIIHCPGHQKGNRAEARGNRMADQAAREVATRETPETSTLLAGKRTADGSEFEKRTADGSEFESPKKKAKVE

SEQ ID NO: 2505 - protein, 2093 aa, synthetic construct
  source 1..2093: note = Description of Artificial Sequence: Synthetic polypeptide
MPAAKRVKLDGGDKKYSIGLDIGTNSVGWAVITDEYKVPSKKFKVLGNTDRHSIKKNLIGALLFDSGETAEATRLKRTARRRYTRRKNRICYLQEIFSNEMAKVDDSFFHRLEESFLVEEDKKHERHPIFGNIVDEVAYHEKYPTIYHLRKKLVDSTDKADLRLIYLALAHMIKFRGHFLIEGDLNPDNSDVDKLFIQLVQTYNQLFEENPINASGVDAKAILSARLSKSRRLENLIAQLPGEKKNGLFGNLIALSLGLTPNFKSNFDLAEDAKLQLSKDTYDDDLDNLLAQIGDQYADLFLAAKNLSDAILLSDILRVNTEITKAPLSASMIKRYDEHHQDLTLLKALVRQQLPEKYKEIFFDQSKNGYAGYIDGGASQEEFYKFIKPILEKMDGTEELLVKLNREDLLRKQRTFDNGSIPHQIHLGELHAILRRQEDFYPFLKDNREKIEKILTFRIPYYVGPLARGNSRFAWMTRKSEETITPWNFEEVVDKGASAQSFIERMTNFDKNLPNEKVLPKHSLLYEYFTVYNELTKVKYVTEGMRKPAFLSGEQKKAIVDLLFKTNRKVTVKQLKEDYFKKIECFDSVEISGVEDRFNASLGTYHDLLKIIKDKDFLDNEENEDILEDIVLTLTLFEDREMIEERLKTYAHLFDDKVMKQLKRRRYTGWGRLSRKLINGIRDKQSGKTILDFLKSDGFANRNFMQLIHDDSLTFKEDIQKAQVSGQGDSLHEHIANLAGSPAIKKGILQTVKVVDELVKVMGRHKPENIVIEMARENQTTQKGQKNSRERMKRIEEGIKELGSQILKEHPVENTQLQNEKLYLYYLQNGRDMYVDQELDINRLSDYDVDHIVPQSFLKDDSIDNKVLTRSDKARGKSDNVPSEEVVKKMKNYWRQLLNAKLITQRKFDNLTKAERGGLSELDKAGFIKRQLVETRQITKHVAQILDSRMNTKYDENDKLIREVKVITLKSKLVSDFRKDFQFYKVREINNYHHAHDAYLNAVVGTALIKKYPKLESEFVYGDYKVYDVRKMIAKSEQEIGKATAKYFFYSNIMNFFKTEITLANGEIRKRPLIETNGETGEIVWDKGRDFATVRKVLSMPQVNIVKKTEVQTGGFSKESILPKRNSDKLIARKKDWDPKKYGGFDSPTVAYSVLVVAKVEKGKSKKLKSVKELLGITIMERSSFEKNPIDFLEAKGYKEVKKDLIIKLPKYSLFELENGRKRMLASAGELQKGNELALPSKYVNFLYLASHYEKLKGSPEDNEQKQLFVEQHKHYLDEIIEQISEFSKRVILADANLDKVLSAYNKHRDKPIREQAENIIHLFTLTNLGAPAAFKYFDTTIDRKRYTSTKEVLDATLIHQSITGLYETRIDLSQLGGDGGPAPEAAAKGGTLNIEDEYRLHETSKGPDVPLGSTWLSDFPQAWAETGGMGLAVRQAPLIIPLKATSTPVSIKQYPMSQEARLGIKPHIQRLLDQGILVPCQSPWNTPLLPVKKPGTNDYRPVQDLREVNKRVEDIHPTVPNPYNLLSGLPPSHQWYTVLDLKDAFFCLRLHPTSQSLFAFEWRDPEMGISGQLTWTRLPQGFKNSPTLFNEALHRDLADFRIQHPDLILLQYVDDLLLAATSELDCQQGTRALLQTLGDLGYRASAKKAQICQKQVKYLGYLLKEGQRWLTEARKETVMGQPTPKTPRQLREFLGKAGFCRLFIPGFAEMAAPLYPLTKPGTLFEWGPDQQKAYQEIKQALLTAPALGLPDLTKPFELFVDEKQGYAKGVLTQKLGPWRRPVAYLSKKLDPVAAGWPPCLRMVAAIAVLTKDAGKLTMGQPLVILAPHAVEALVKQPPDRWLSNARMTHYQALLLDTDRVQFGPIVALNPATLLPLPEEGLQHDCLDILAEAHGTRPDLTDQPLPDADHTWYTDGSSFLQEGQRKAGAAVTTETEVVWAKALPAGTSAQRAELIALTQALKMAEGKKLNVYTDSRYAFATAHIHGEIYRRRGWLTSEGKEIKNKDEILALLKALFLPKRLSIIHCPGHQKGNRAEARGNRMADQAAREVATRETPETSTLLAGKRTADGSEFEKRTADGSEFESPKKKAKVE

SEQ ID NO: 2506 - protein, 2096 aa, synthetic construct
  source 1..2096: note = Description of Artificial Sequence: Synthetic polypeptide
MPAAKRVKLDGGDKKYSIGLDIGTNSVGWAVITDEYKVPSKKFKVLGNTDRHSIKKNLIGALLFDSGETAEATRLKRTARRRYTRRKNRICYLQEIFSNEMAKVDDSFFHRLEESFLVEEDKKHERHPIFGNIVDEVAYHEKYPTIYHLRKKLVDSTDKADLRLIYLALAHMIKFRGHFLIEGDLNPDNSDVDKLFIQLVQTYNQLFEENPINASGVDAKAILSARLSKSRRLENLIAQLPGEKKNGLFGNLIALSLGLTPNFKSNFDLAEDAKLQLSKDTYDDDLDNLLAQIGDQYADLFLAAKNLSDAILLSDILRVNTEITKAPLSASMIKRYDEHHQDLTLLKALVRQQLPEKYKEIFFDQSKNGYAGYIDGGASQEEFYKFIKPILEKMDGTEELLVKLNREDLLRKQRTFDNGSIPHQIHLGELHAILRRQEDFYPFLKDNREKIEKILTFRIPYYVGPLARGNSRFAWMTRKSEETITPWNFEEVVDKGASAQSFIERMTNFDKNLPNEKVLPKHSLLYEYFTVYNELTKVKYVTEGMRKPAFLSGEQKKAIVDLLFKTNRKVTVKQLKEDYFKKIECFDSVEISGVEDRFNASLGTYHDLLKIIKDKDFLDNEENEDILEDIVLTLTLFEDREMIEERLKTYAHLFDDKVMKQLKRRRYTGWGRLSRKLINGIRDKQSGKTILDFLKSDGFANRNFMQLIHDDSLTFKEDIQKAQVSGQGDSLHEHIANLAGSPAIKKGILQTVKVVDELVKVMGRHKPENIVIEMARENQTTQKGQKNSRERMKRIEEGIKELGSQILKEHPVENTQLQNEKLYLYYLQNGRDMYVDQELDINRLSDYDVDHIVPQSFLKDDSIDNKVLTRSDKARGKSDNVPSEEVVKKMKNYWRQLLNAKLITQRKFDNLTKAERGGLSELDKAGFIKRQLVETRQITKHVAQILDSRMNTKYDENDKLIREVKVITLKSKLVSDFRKDFQFYKVREINNYHHAHDAYLNAVVGTALIKKYPKLESEFVYGDYKVYDVRKMIAKSEQEIGKATAKYFFYSNIMNFFKTEITLANGEIRKRPLIETNGETGEIVWDKGRDFATVRKVLSMPQVNIVKKTEVQTGGFSKESILPKRNSDKLIARKKDWDPKKYGGFDSPTVAYSVLVVAKVEKGKSKKLKSVKELLGITIMERSSFEKNPIDFLEAKGYKEVKKDLIIKLPKYSLFELENGRKRMLASAGELQKGNELALPSKYVNFLYLASHYEKLKGSPEDNEQKQLFVEQHKHYLDEIIEQISEFSKRVILADANLDKVLSAYNKHRDKPIREQAENIIHLFTLTNLGAPAAFKYFDTTIDRKRYTSTKEVLDATLIHQSITGLYETRIDLSQLGGDGGEAAAKPAPGGGGGTLNIEDEYRLHETSKGPDVPLGSTWLSDFPQAWAETGGMGLAVRQAPLIIPLKATSTPVSIKQYPMSQEARLGIKPHIQRLLDQGILVPCQSPWNTPLLPVKKPGTNDYRPVQDLREVNKRVEDIHPTVPNPYNLLSGLPPSHQWYTVLDLKDAFFCLRLHPTSQSLFAFEWRDPEMGISGQLTWTRLPQGFKNSPTLFNEALHRDLADFRIQHPDLILLQYVDDLLLAATSELDCQQGTRALLQTLGDLGYRASAKKAQICQKQVKYLGYLLKEGQRWLTEARKETVMGQPTPKTPRQLREFLGKAGFCRLFIPGFAEMAAPLYPLTKPGTLFEWGPDQQKAYQEIKQALLTAPALGLPDLTKPFELFVDEKQGYAKGVLTQKLGPWRRPVAYLSKKLDPVAAGWPPCLRMVAAIAVLTKDAGKLTMGQPLVILAPHAVEALVKQPPDRWLSNARMTHYQALLLDTDRVQFGPIVALNPATLLPLPEEGLQHDCLDILAEAHGTRPDLTDQPLPDADHTWYTDGSSFLQEGQRKAGAAVTTETEVVWAKALPAGTSAQRAELIALTQALKMAEGKKLNVYTDSRYAFATAHIHGEIYRRRGWLTSEGKEIKNKDEILALLKALFLPKRLSIIHCPGHQKGNRAEARGNRMADQAAREVATRETPETSTLLAGKRTADGSEFEKRTADGSEFESPKKKAKVE

SEQ ID NO: 2507 - protein, 2100 aa, synthetic construct
  source 1..2100: note = Description of Artificial Sequence: Synthetic polypeptide
MPAAKRVKLDGGDKKYSIGLDIGTNSVGWAVITDEYKVPSKKFKVLGNTDRHSIKKNLIGALLFDSGETAEATRLKRTARRRYTRRKNRICYLQEIFSNEMAKVDDSFFHRLEESFLVEEDKKHERHPIFGNIVDEVAYHEKYPTIYHLRKKLVDSTDKADLRLIYLALAHMIKFRGHFLIEGDLNPDNSDVDKLFIQLVQTYNQLFEENPINASGVDAKAILSARLSKSRRLENLIAQLPGEKKNGLFGNLIALSLGLTPNFKSNFDLAEDAKLQLSKDTYDDDLDNLLAQIGDQYADLFLAAKNLSDAILLSDILRVNTEITKAPLSASMIKRYDEHHQDLTLLKALVRQQLPEKYKEIFFDQSKNGYAGYIDGGASQEEFYKFIKPILEKMDGTEELLVKLNREDLLRKQRTFDNGSIPHQIHLGELHAILRRQEDFYPFLKDNREKIEKILTFRIPYYVGPLARGNSRFAWMTRKSEETITPWNFEEVVDKGASAQSFIERMTNFDKNLPNEKVLPKHSLLYEYFTVYNELTKVKYVTEGMRKPAFLSGEQKKAIVDLLFKTNRKVTVKQLKEDYFKKIECFDSVEISGVEDRFNASLGTYHDLLKIIKDKDFLDNEENEDILEDIVLTLTLFEDREMIEERLKTYAHLFDDKVMKQLKRRRYTGWGRLSRKLINGIRDKQSGKTILDFLKSDGFANRNFMQLIHDDSLTFKEDIQKAQVSGQGDSLHEHIANLAGSPAIKKGILQTVKVVDELVKVMGRHKPENIVIEMARENQTTQKGQKNSRERMKRIEEGIKELGSQILKEHPVENTQLQNEKLYLYYLQNGRDMYVDQELDINRLSDYDVDHIVPQSFLKDDSIDNKVLTRSDKARGKSDNVPSEEVVKKMKNYWRQLLNAKLITQRKFDNLTKAERGGLSELDKAGFIKRQLVETRQITKHVAQILDSRMNTKYDENDKLIREVKVITLKSKLVSDFRKDFQFYKVREINNYHHAHDAYLNAVVGTALIKKYPKLESEFVYGDYKVYDVRKMIAKSEQEIGKATAKYFFYSNIMNFFKTEITLANGEIRKRPLIETNGETGEIVWDKGRDFATVRKVLSMPQVNIVKKTEVQTGGFSKESILPKRNSDKLIARKKDWDPKKYGGFDSPTVAYSVLVVAKVEKGKSKKLKSVKELLGITIMERSSFEKNPIDFLEAKGYKEVKKDLIIKLPKYSLFELENGRKRMLASAGELQKGNELALPSKYVNFLYLASHYEKLKGSPEDNEQKQLFVEQHKHYLDEIIEQISEFSKRVILADANLDKVLSAYNKHRDKPIREQAENIIHLFTLTNLGAPAAFKYFDTTIDRKRYTSTKEVLDATLIHQSITGLYETRIDLSQLGGDGGEAAAKEAAAKEAAAKGGTLNIEDEYRLHETSKGPDVPLGSTWLSDFPQAWAETGGMGLAVRQAPLIIPLKATSTPVSIKQYPMSQEARLGIKPHIQRLLDQGILVPCQSPWNTPLLPVKKPGTNDYRPVQDLREVNKRVEDIHPTVPNPYNLLSGLPPSHQWYTVLDLKDAFFCLRLHPTSQSLFAFEWRDPEMGISGQLTWTRLPQGFKNSPTLFNEALHRDLADFRIQHPDLILLQYVDDLLLAATSELDCQQGTRALLQTLGDLGYRASAKKAQICQKQVKYLGYLLKEGQRWLTEARKETVMGQPTPKTPRQLREFLGKAGFCRLFIPGFAEMAAPLYPLTKPGTLFEWGPDQQKAYQEIKQALLTAPALGLPDLTKPFELFVDEKQGYAKGVLTQKLGPWRRPVAYLSKKLDPVAAGWPPCLRMVAAIAVLTKDAGKLTMGQPLVILAPHAVEALVKQPPDRWLSNARMTHYQALLLDTDRVQFGPIVALNPATLLPLPEEGLQHDCLDILAEAHGTRPDLTDQPLPDADHTWYTDGSSFLQEGQRKAGAAVTTETEVVWAKALPAGTSAQRAELIALTQALKMAEGKKLNVYTDSRYAFATAHIHGEIYRRRGWLTSEGKEIKNKDEILALLKALFLPKRLSIIHCPGHQKGNRAEARGNRMADQAAREVATRETPETSTLLAGKRTADGSEFEKRTADGSEFESPKKKAKVE

SEQ ID NO: 2508 - protein, 2088 aa, synthetic construct
  source 1..2088: note = Description of Artificial Sequence: Synthetic polypeptide
MPAAKRVKLDGGDKKYSIGLDIGTNSVGWAVITDEYKVPSKKFKVLGNTDRHSIKKNLIGALLFDSGETAEATRLKRTARRRYTRRKNRICYLQEIFSNEMAKVDDSFFHRLEESFLVEEDKKHERHPIFGNIVDEVAYHEKYPTIYHLRKKLVDSTDKADLRLIYLALAHMIKFRGHFLIEGDLNPDNSDVDKLFIQLVQTYNQLFEENPINASGVDAKAILSARLSKSRRLENLIAQLPGEKKNGLFGNLIALSLGLTPNFKSNFDLAEDAKLQLSKDTYDDDLDNLLAQIGDQYADLFLAAKNLSDAILLSDILRVNTEITKAPLSASMIKRYDEHHQDLTLLKALVRQQLPEKYKEIFFDQSKNGYAGYIDGGASQEEFYKFIKPILEKMDGTEELLVKLNREDLLRKQRTFDNGSIPHQIHLGELHAILRRQEDFYPFLKDNREKIEKILTFRIPYYVGPLARGNSRFAWMTRKSEETITPWNFEEVVDKGASAQSFIERMTNFDKNLPNEKVLPKHSLLYEYFTVYNELTKVKYVTEGMRKPAFLSGEQKKAIVDLLFKTNRKVTVKQLKEDYFKKIECFDSVEISGVEDRFNASLGTYHDLLKIIKDKDFLDNEENEDILEDIVLTLTLFEDREMIEERLKTYAHLFDDKVMKQLKRRRYTGWGRLSRKLINGIRDKQSGKTILDFLKSDGFANRNFMQLIHDDSLTFKEDIQKAQVSGQGDSLHEHIANLAGSPAIKKGILQTVKVVDELVKVMGRHKPENIVIEMARENQTTQKGQKNSRERMKRIEEGIKELGSQILKEHPVENTQLQNEKLYLYYLQNGRDMYVDQELDINRLSDYDVDHIVPQSFLKDDSIDNKVLTRSDKARGKSDNVPSEEVVKKMKNYWRQLLNAKLITQRKFDNLTKAERGGLSELDKAGFIKRQLVETRQITKHVAQILDSRMNTKYDENDKLIREVKVITLKSKLVSDFRKDFQFYKVREINNYHHAHDAYLNAVVGTALIKKYPKLESEFVYGDYKVYDVRKMIAKSEQEIGKATAKYFFYSNIMNFFKTEITLANGEIRKRPLIETNGETGEIVWDKGRDFATVRKVLSMPQVNIVKKTEVQTGGFSKESILPKRNSDKLIARKKDWDPKKYGGFDSPTVAYSVLVVAKVEKGKSKKLKSVKELLGITIMERSSFEKNPIDFLEAKGYKEVKKDLIIKLPKYSLFELENGRKRMLASAGELQKGNELALPSKYVNFLYLASHYEKLKGSPEDNEQKQLFVEQHKHYLDEIIEQISEFSKRVILADANLDKVLSAYNKHRDKPIREQAENIIHLFTLTNLGAPAAFKYFDTTIDRKRYTSTKEVLDATLIHQSITGLYETRIDLSQLGGDGGGSSGGTLNIEDEYRLHETSKGPDVPLGSTWLSDFPQAWAETGGMGLAVRQAPLIIPLKATSTPVSIKQYPMSQEARLGIKPHIQRLLDQGILVPCQSPWNTPLLPVKKPGTNDYRPVQDLREVNKRVEDIHPTVPNPYNLLSGLPPSHQWYTVLDLKDAFFCLRLHPTSQSLFAFEWRDPEMGISGQLTWTRLPQGFKNSPTLFNEALHRDLADFRIQHPDLILLQYVDDLLLAATSELDCQQGTRALLQTLGDLGYRASAKKAQICQKQVKYLGYLLKEGQRWLTEARKETVMGQPTPKTPRQLREFLGKAGFCRLFIPGFAEMAAPLYPLTKPGTLFEWGPDQQKAYQEIKQALLTAPALGLPDLTKPFELFVDEKQGYAKGVLTQKLGPWRRPVAYLSKKLDPVAAGWPPCLRMVAAIAVLTKDAGKLTMGQPLVILAPHAVEALVKQPPDRWLSNARMTHYQALLLDTDRVQFGPIVALNPATLLPLPEEGLQHDCLDILAEAHGTRPDLTDQPLPDADHTWYTDGSSFLQEGQRKAGAAVTTETEVVWAKALPAGTSAQRAELIALTQALKMAEGKKLNVYTDSRYAFATAHIHGEIYRRRGWLTSEGKEIKNKDEILALLKALFLPKRLSIIHCPGHQKGNRAEARGNRMADQAAREVATRETPETSTLLAGKRTADGSEFEKRTADGSEFESPKKKAKVE

SEQ ID NO: 2509 - protein, 2096 aa, synthetic construct
  source 1..2096: note = Description of Artificial Sequence: Synthetic polypeptide
MPAAKRVKLDGGDKKYSIGLDIGTNSVGWAVITDEYKVPSKKFKVLGNTDRHSIKKNLIGALLFDSGETAEATRLKRTARRRYTRRKNRICYLQEIFSNEMAKVDDSFFHRLEESFLVEEDKKHERHPIFGNIVDEVAYHEKYPTIYHLRKKLVDSTDKADLRLIYLALAHMIKFRGHFLIEGDLNPDNSDVDKLFIQLVQTYNQLFEENPINASGVDAKAILSARLSKSRRLENLIAQLPGEKKNGLFGNLIALSLGLTPNFKSNFDLAEDAKLQLSKDTYDDDLDNLLAQIGDQYADLFLAAKNLSDAILLSDILRVNTEITKAPLSASMIKRYDEHHQDLTLLKALVRQQLPEKYKEIFFDQSKNGYAGYIDGGASQEEFYKFIKPILEKMDGTEELLVKLNREDLLRKQRTFDNGSIPHQIHLGELHAILRRQEDFYPFLKDNREKIEKILTFRIPYYVGPLARGNSRFAWMTRKSEETITPWNFEEVVDKGASAQSFIERMTNFDKNLPNEKVLPKHSLLYEYFTVYNELTKVKYVTEGMRKPAFLSGEQKKAIVDLLFKTNRKVTVKQLKEDYFKKIECFDSVEISGVEDRFNASLGTYHDLLKIIKDKDFLDNEENEDILEDIVLTLTLFEDREMIEERLKTYAHLFDDKVMKQLKRRRYTGWGRLSRKLINGIRDKQSGKTILDFLKSDGFANRNFMQLIHDDSLTFKEDIQKAQVSGQGDSLHEHIANLAGSPAIKKGILQTVKVVDELVKVMGRHKPENIVIEMARENQTTQKGQKNSRERMKRIEEGIKELGSQILKEHPVENTQLQNEKLYLYYLQNGRDMYVDQELDINRLSDYDVDHIVPQSFLKDDSIDNKVLTRSDKARGKSDNVPSEEVVKKMKNYWRQLLNAKLITQRKFDNLTKAERGGLSELDKAGFIKRQLVETRQITKHVAQILDSRMNTKYDENDKLIREVKVITLKSKLVSDFRKDFQFYKVREINNYHHAHDAYLNAVVGTALIKKYPKLESEFVYGDYKVYDVRKMIAKSEQEIGKATAKYFFYSNIMNFFKTEITLANGEIRKRPLIETNGETGEIVWDKGRDFATVRKVLSMPQVNIVKKTEVQTGGFSKESILPKRNSDKLIARKKDWDPKKYGGFDSPTVAYSVLVVAKVEKGKSKKLKSVKELLGITIMERSSFEKNPIDFLEAKGYKEVKKDLIIKLPKYSLFELENGRKRMLASAGELQKGNELALPSKYVNFLYLASHYEKLKGSPEDNEQKQLFVEQHKHYLDEIIEQISEFSKRVILADANLDKVLSAYNKHRDKPIREQAENIIHLFTLTNLGAPAAFKYFDTTIDRKRYTSTKEVLDATLIHQSITGLYETRIDLSQLGGDGGEAAAKGSSPAPGGTLNIEDEYRLHETSKGPDVPLGSTWLSDFPQAWAETGGMGLAVRQAPLIIPLKATSTPVSIKQYPMSQEARLGIKPHIQRLLDQGILVPCQSPWNTPLLPVKKPGTNDYRPVQDLREVNKRVEDIHPTVPNPYNLLSGLPPSHQWYTVLDLKDAFFCLRLHPTSQSLFAFEWRDPEMGISGQLTWTRLPQGFKNSPTLFNEALHRDLADFRIQHPDLILLQYVDDLLLAATSELDCQQGTRALLQTLGDLGYRASAKKAQICQKQVKYLGYLLKEGQRWLTEARKETVMGQPTPKTPRQLREFLGKAGFCRLFIPGFAEMAAPLYPLTKPGTLFEWGPDQQKAYQEIKQALLTAPALGLPDLTKPFELFVDEKQGYAKGVLTQKLGPWRRPVAYLSKKLDPVAAGWPPCLRMVAAIAVLTKDAGKLTMGQPLVILAPHAVEALVKQPPDRWLSNARMTHYQALLLDTDRVQFGPIVALNPATLLPLPEEGLQHDCLDILAEAHGTRPDLTDQPLPDADHTWYTDGSSFLQEGQRKAGAAVTTETEVVWAKALPAGTSAQRAELIALTQALKMAEGKKLNVYTDSRYAFATAHIHGEIYRRRGWLTSEGKEIKNKDEILALLKALFLPKRLSIIHCPGHQKGNRAEARGNRMADQAAREVATRETPETSTLLAGKRTADGSEFEKRTADGSEFESPKKKAKVE

SEQ ID NO: 2510 - protein, 2096 aa, synthetic construct
  source 1..2096: note = Description of Artificial Sequence: Synthetic polypeptide
MPAAKRVKLDGGDKKYSIGLDIGTNSVGWAVITDEYKVPSKKFKVLGNTDRHSIKKNLIGALLFDSGETAEATRLKRTARRRYTRRKNRICYLQEIFSNEMAKVDDSFFHRLEESFLVEEDKKHERHPIFGNIVDEVAYHEKYPTIYHLRKKLVDSTDKADLRLIYLALAHMIKFRGHFLIEGDLNPDNSDVDKLFIQLVQTYNQLFEENPINASGVDAKAILSARLSKSRRLENLIAQLPGEKKNGLFGNLIALSLGLTPNFKSNFDLAEDAKLQLSKDTYDDDLDNLLAQIGDQYADLFLAAKNLSDAILLSDILRVNTEITKAPLSASMIKRYDEHHQDLTLLKALVRQQLPEKYKEIFFDQSKNGYAGYIDGGASQEEFYKFIKPILEKMDGTEELLVKLNREDLLRKQRTFDNGSIPHQIHLGELHAILRRQEDFYPFLKDNREKIEKILTFRIPYYVGPLARGNSRFAWMTRKSEETITPWNFEEVVDKGASAQSFIERMTNFDKNLPNEKVLPKHSLLYEYFTVYNELTKVKYVTEGMRKPAFLSGEQKKAIVDLLFKTNRKVTVKQLKEDYFKKIECFDSVEISGVEDRFNASLGTYHDLLKIIKDKDFLDNEENEDILEDIVLTLTLFEDREMIEERLKTYAHLFDDKVMKQLKRRRYTGWGRLSRKLINGIRDKQSGKTILDFLKSDGFANRNFMQLIHDDSLTFKEDIQKAQVSGQGDSLHEHIANLAGSPAIKKGILQTVKVVDELVKVMGRHKPENIVIEMARENQTTQKGQKNSRERMKRIEEGIKELGSQILKEHPVENTQLQNEKLYLYYLQNGRDMYVDQELDINRLSDYDVDHIVPQSFLKDDSIDNKVLTRSDKARGKSDNVPSEEVVKKMKNYWRQLLNAKLITQRKFDNLTKAERGGLSELDKAGFIKRQLVETRQITKHVAQILDSRMNTKYDENDKLIREVKVITLKSKLVSDFRKDFQFYKVREINNYHHAHDAYLNAVVGTALIKKYPKLESEFVYGDYKVYDVRKMIAKSEQEIGKATAKYFFYSNIMNFFKTEITLANGEIRKRPLIETNGETGEIVWDKGRDFATVRKVLSMPQVNIVKKTEVQTGGFSKESILPKRNSDKLIARKKDWDPKKYGGFDSPTVAYSVLVVAKVEKGKSKKLKSVKELLGITIMERSSFEKNPIDFLEAKGYKEVKKDLIIKLPKYSLFELENGRKRMLASAGELQKGNELALPSKYVNFLYLASHYEKLKGSPEDNEQKQLFVEQHKHYLDEIIEQISEFSKRVILADANLDKVLSAYNKHRDKPIREQAENIIHLFTLTNLGAPAAFKYFDTTIDRKRYTSTKEVLDATLIHQSITGLYETRIDLSQLGGDGGPAPAPAPAPAPGGTLNIEDEYRLHETSKGPDVPLGSTWLSDFPQAWAETGGMGLAVRQAPLIIPLKATSTPVSIKQYPMSQEARLGIKPHIQRLLDQGILVPCQSPWNTPLLPVKKPGTNDYRPVQDLREVNKRVEDIHPTVPNPYNLLSGLPPSHQWYTVLDLKDAFFCLRLHPTSQSLFAFEWRDPEMGISGQLTWTRLPQGFKNSPTLFNEALHRDLADFRIQHPDLILLQYVDDLLLAATSELDCQQGTRALLQTLGDLGYRASAKKAQICQKQVKYLGYLLKEGQRWLTEARKETVMGQPTPKTPRQLREFLGKAGFCRLFIPGFAEMAAPLYPLTKPGTLFEWGPDQQKAYQEIKQALLTAPALGLPDLTKPFELFVDEKQGYAKGVLTQKLGPWRRPVAYLSKKLDPVAAGWPPCLRMVAAIAVLTKDAGKLTMGQPLVILAPHAVEALVKQPPDRWLSNARMTHYQALLLDTDRVQFGPIVALNPATLLPLPEEGLQHDCLDILAEAHGTRPDLTDQPLPDADHTWYTDGSSFLQEGQRKAGAAVTTETEVVWAKALPAGTSAQRAELIALTQALKMAEGKKLNVYTDSRYAFATAHIHGEIYRRRGWLTSEGKEIKNKDEILALLKALFLPKRLSIIHCPGHQKGNRAEARGNRMADQAAREVATRETPETSTLLAGKRTADGSEFEKRTADGSEFESPKKKAKVE

SEQ ID NO: 2511 - protein, 2095 aa, synthetic construct
  source 1..2095: note = Description of Artificial Sequence: Synthetic polypeptide
MPAAKRVKLDGGDKKYSIGLDIGTNSVGWAVITDEYKVPSKKFKVLGNTDRHSIKKNLIGALLFDSGETAEATRLKRTARRRYTRRKNRICYLQEIFSNEMAKVDDSFFHRLEESFLVEEDKKHERHPIFGNIVDEVAYHEKYPTIYHLRKKLVDSTDKADLRLIYLALAHMIKFRGHFLIEGDLNPDNSDVDKLFIQLVQTYNQLFEENPINASGVDAKAILSARLSKSRRLENLIAQLPGEKKNGLFGNLIALSLGLTPNFKSNFDLAEDAKLQLSKDTYDDDLDNLLAQIGDQYADLFLAAKNLSDAILLSDILRVNTEITKAPLSASMIKRYDEHHQDLTLLKALVRQQLPEKYKEIFFDQSKNGYAGYIDGGASQEEFYKFIKPILEKMDGTEELLVKLNREDLLRKQRTFDNGSIPHQIHLGELHAILRRQEDFYPFLKDNREKIEKILTFRIPYYVGPLARGNSRFAWMTRKSEETITPWNFEEVVDKGASAQSFIERMTNFDKNLPNEKVLPKHSLLYEYFTVYNELTKVKYVTEGMRKPAFLSGEQKKAIVDLLFKTNRKVTVKQLKEDYFKKIECFDSVEISGVEDRFNASLGTYHDLLKIIKDKDFLDNEENEDILEDIVLTLTLFEDREMIEERLKTYAHLFDDKVMKQLKRRRYTGWGRLSRKLINGIRDKQSGKTILDFLKSDGFANRNFMQLIHDDSLTFKEDIQKAQVSGQGDSLHEHIANLAGSPAIKKGILQTVKVVDELVKVMGRHKPENIVIEMARENQTTQKGQKNSRERMKRIEEGIKELGSQILKEHPVENTQLQNEKLYLYYLQNGRDMYVDQELDINRLSDYDVDHIVPQSFLKDDSIDNKVLTRSDKARGKSDNVPSEEVVKKMKNYWRQLLNAKLITQRKFDNLTKAERGGLSELDKAGFIKRQLVETRQITKHVAQILDSRMNTKYDENDKLIREVKVITLKSKLVSDFRKDFQFYKVREINNYHHAHDAYLNAVVGTALIKKYPKLESEFVYGDYKVYDVRKMIAKSEQEIGKATAKYFFYSNIMNFFKTEITLANGEIRKRPLIETNGETGEIVWDKGRDFATVRKVLSMPQVNIVKKTEVQTGGFSKESILPKRNSDKLIARKKDWDPKKYGGFDSPTVAYSVLVVAKVEKGKSKKLKSVKELLGITIMERSSFEKNPIDFLEAKGYKEVKKDLIIKLPKYSLFELENGRKRMLASAGELQKGNELALPSKYVNFLYLASHYEKLKGSPEDNEQKQLFVEQHKHYLDEIIEQISEFSKRVILADANLDKVLSAYNKHRDKPIREQAENIIHLFTLTNLGAPAAFKYFDTTIDRKRYTSTKEVLDATLIHQSITGLYETRIDLSQLGGDGGGGGGSGGGGSGGTLNIEDEYRLHETSKGPDVPLGSTWLSDFPQAWAETGGMGLAVRQAPLIIPLKATSTPVSIKQYPMSQEARLGIKPHIQRLLDQGILVPCQSPWNTPLLPVKKPGTNDYRPVQDLREVNKRVEDIHPTVPNPYNLLSGLPPSHQWYTVLDLKDAFFCLRLHPTSQSLFAFEWRDPEMGISGQLTWTRLPQGFKNSPTLFNEALHRDLADFRIQHPDLILLQYVDDLLLAATSELDCQQGTRALLQTLGDLGYRASAKKAQICQKQVKYLGYLLKEGQRWLTEARKETVMGQPTPKTPRQLREFLGKAGFCRLFIPGFAEMAAPLYPLTKPGTLFEWGPDQQKAYQEIKQALLTAPALGLPDLTKPFELFVDEKQGYAKGVLTQKLGPWRRPVAYLSKKLDPVAAGWPPCLRMVAAIAVLTKDAGKLTMGQPLVILAPHAVEALVKQPPDRWLSNARMTHYQALLLDTDRVQFGPIVALNPATLLPLPEEGLQHDCLDILAEAHGTRPDLTDQPLPDADHTWYTDGSSFLQEGQRKAGAAVTTETEVVWAKALPAGTSAQRAELIALTQALKMAEGKKLNVYTDSRYAFATAHIHGEIYRRRGWLTSEGKEIKNKDEILALLKALFLPKRLSIIHCPGHQKGNRAEARGNRMADQAAREVATRETPETSTLLAGKRTADGSEFEKRTADGSEFESPKKKAKVE

SEQ ID NO: 2512 - protein, 2096 aa, synthetic construct
  source 1..2096: note = Description of Artificial Sequence: Synthetic polypeptide
MPAAKRVKLDGGDKKYSIGLDIGTNSVGWAVITDEYKVPSKKFKVLGNTDRHSIKKNLIGALLFDSGETAEATRLKRTARRRYTRRKNRICYLQEIFSNEMAKVDDSFFHRLEESFLVEEDKKHERHPIFGNIVDEVAYHEKYPTIYHLRKKLVDSTDKADLRLIYLALAHMIKFRGHFLIEGDLNPDNSDVDKLFIQLVQTYNQLFEENPINASGVDAKAILSARLSKSRRLENLIAQLPGEKKNGLFGNLIALSLGLTPNFKSNFDLAEDAKLQLSKDTYDDDLDNLLAQIGDQYADLFLAAKNLSDAILLSDILRVNTEITKAPLSASMIKRYDEHHQDLTLLKALVRQQLPEKYKEIFFDQSKNGYAGYIDGGASQEEFYKFIKPILEKMDGTEELLVKLNREDLLRKQRTFDNGSIPHQIHLGELHAILRRQEDFYPFLKDNREKIEKILTFRIPYYVGPLARGNSRFAWMTRKSEETITPWNFEEVVDKGASAQSFIERMTNFDKNLPNEKVLPKHSLLYEYFTVYNELTKVKYVTEGMRKPAFLSGEQKKAIVDLLFKTNRKVTVKQLKEDYFKKIECFDSVEISGVEDRFNASLGTYHDLLKIIKDKDFLDNEENEDILEDIVLTLTLFEDREMIEERLKTYAHLFDDKVMKQLKRRRYTGWGRLSRKLINGIRDKQSGKTILDFLKSDGFANRNFMQLIHDDSLTFKEDIQKAQVSGQGDSLHEHIANLAGSPAIKKGILQTVKVVDELVKVMGRHKPENIVIEMARENQTTQKGQKNSRERMKRIEEGIKELGSQILKEHPVENTQLQNEKLYLYYLQNGRDMYVDQELDINRLSDYDVDHIVPQSFLKDDSIDNKVLTRSDKARGKSDNVPSEEVVKKMKNYWRQLLNAKLITQRKFDNLTKAERGGLSELDKAGFIKRQLVETRQITKHVAQILDSRMNTKYDENDKLIREVKVITLKSKLVSDFRKDFQFYKVREINNYHHAHDAYLNAVVGTALIKKYPKLESEFVYGDYKVYDVRKMIAKSEQEIGKATAKYFFYSNIMNFFKTEITLANGEIRKRPLIETNGETGEIVWDKGRDFATVRKVLSMPQVNIVKKTEVQTGGFSKESILPKRNSDKLIARKKDWDPKKYGGFDSPTVAYSVLVVAKVEKGKSKKLKSVKELLGITIMERSSFEKNPIDFLEAKGYKEVKKDLIIKLPKYSLFELENGRKRMLASAGELQKGNELALPSKYVNFLYLASHYEKLKGSPEDNEQKQLFVEQHKHYLDEIIEQISEFSKRVILADANLDKVLSAYNKHRDKPIREQAENIIHLFTLTNLGAPAAFKYFDTTIDRKRYTSTKEVLDATLIHQSITGLYETRIDLSQLGGDGGEAAAKPAPGGSGGTLNIEDEYRLHETSKGPDVPLGSTWLSDFPQAWAETGGMGLAVRQAPLIIPLKATSTPVSIKQYPMSQEARLGIKPHIQRLLDQGILVPCQSPWNTPLLPVKKPGTNDYRPVQDLREVNKRVEDIHPTVPNPYNLLSGLPPSHQWYTVLDLKDAFFCLRLHPTSQSLFAFEWRDPEMGISGQLTWTRLPQGFKNSPTLFNEALHRDLADFRIQHPDLILLQYVDDLLLAATSELDCQQGTRALLQTLGDLGYRASAKKAQICQKQVKYLGYLLKEGQRWLTEARKETVMGQPTPKTPRQLREFLGKAGFCRLFIPGFAEMAAPLYPLTKPGTLFEWGPDQQKAYQEIKQALLTAPALGLPDLTKPFELFVDEKQGYAKGVLTQKLGPWRRPVAYLSKKLDPVAAGWPPCLRMVAAIAVLTKDAGKLTMGQPLVILAPHAVEALVKQPPDRWLSNARMTHYQALLLDTDRVQFGPIVALNPATLLPLPEEGLQHDCLDILAEAHGTRPDLTDQPLPDADHTWYTDGSSFLQEGQRKAGAAVTTETEVVWAKALPAGTSAQRAELIALTQALKMAEGKKLNVYTDSRYAFATAHIHGEIYRRRGWLTSEGKEIKNKDEILALLKALFLPKRLSIIHCPGHQKGNRAEARGNRMADQAAREVATRETPETSTLLAGKRTADGSEFEKRTADGSEFESPKKKAKVE

SEQ ID NO: 2513 - protein, 2103 aa, synthetic construct
  source 1..2103: note = Description of Artificial Sequence: Synthetic polypeptide
MPAAKRVKLDGGDKKYSIGLDIGTNSVGWAVITDEYKVPSKKFKVLGNTDRHSIKKNLIGALLFDSGETAEATRLKRTARRRYTRRKNRICYLQEIFSNEMAKVDDSFFHRLEESFLVEEDKKHERHPIFGNIVDEVAYHEKYPTIYHLRKKLVDSTDKADLRLIYLALAHMIKFRGHFLIEGDLNPDNSDVDKLFIQLVQTYNQLFEENPINASGVDAKAILSARLSKSRRLENLIAQLPGEKKNGLFGNLIALSLGLTPNFKSNFDLAEDAKLQLSKDTYDDDLDNLLAQIGDQYADLFLAAKNLSDAILLSDILRVNTEITKAPLSASMIKRYDEHHQDLTLLKALVRQQLPEKYKEIFFDQSKNGYAGYIDGGASQEEFYKFIKPILEKMDGTEELLVKLNREDLLRKQRTFDNGSIPHQIHLGELHAILRRQEDFYPFLKDNREKIEKILTFRIPYYVGPLARGNSRFAWMTRKSEETITPWNFEEVVDKGASAQSFIERMTNFDKNLPNEKVLPKHSLLYEYFTVYNELTKVKYVTEGMRKPAFLSGEQKKAIVDLLFKTNRKVTVKQLKEDYFKKIECFDSVEISGVEDRFNASLGTYHDLLKIIKDKDFLDNEENEDILEDIVLTLTLFEDREMIEERLKTYAHLFDDKVMKQLKRRRYTGWGRLSRKLINGIRDKQSGKTILDFLKSDGFANRNFMQLIHDDSLTFKEDIQKAQVSGQGDSLHEHIANLAGSPAIKKGILQTVKVVDELVKVMGRHKPENIVIEMARENQTTQKGQKNSRERMKRIEEGIKELGSQILKEHPVENTQLQNEKLYLYYLQNGRDMYVDQELDINRLSDYDVDHIVPQSFLKDDSIDNKVLTRSDKARGKSDNVPSEEVVKKMKNYWRQLLNAKLITQRKFDNLTKAERGGLSELDKAGFIKRQLVETRQITKHVAQILDSRMNTKYDENDKLIREVKVITLKSKLVSDFRKDFQFYKVREINNYHHAHDAYLNAVVGTALIKKYPKLESEFVYGDYKVYDVRKMIAKSEQEIGKATAKYFFYSNIMNFFKTEITLANGEIRKRPLIETNGETGEIVWDKGRDFATVRKVLSMPQVNIVKKTEVQTGGFSKESILPKRNSDKLIARKKDWDPKKYGGFDSPTVAYSVLVVAKVEKGKSKKLKSVKELLGITIMERSSFEKNPIDFLEAKGYKEVKKDLIIKLPKYSLFELENGRKRMLASAGELQKGNELALPSKYVNFLYLASHYEKLKGSPEDNEQKQLFVEQHKHYLDEIIEQISEFSKRVILADANLDKVLSAYNKHRDKPIREQAENIIHLFTLTNLGAPAAFKYFDTTIDRKRYTSTKEVLDATLIHQSITGLYETRIDLSQLGGDGGGGSGGSGGSGGSGGSGGSGGTLNIEDEYRLHETSKGPDVPLGSTWLSDFPQAWAETGGMGLAVRQAPLIIPLKATSTPVSIKQYPMSQEARLGIKPHIQRLLDQGILVPCQSPWNTPLLPVKKPGTNDYRPVQDLREVNKRVEDIHPTVPNPYNLLSGLPPSHQWYTVLDLKDAFFCLRLHPTSQSLFAFEWRDPEMGISGQLTWTRLPQGFKNSPTLFNEALHRDLADFRIQHPDLILLQYVDDLLLAATSELDCQQGTRALLQTLGDLGYRASAKKAQICQKQVKYLGYLLKEGQRWLTEARKETVMGQPTPKTPRQLREFLGKAGFCRLFIPGFAEMAAPLYPLTKPGTLFEWGPDQQKAYQEIKQALLTAPALGLPDLTKPFELFVDEKQGYAKGVLTQKLGPWRRPVAYLSKKLDPVAAGWPPCLRMVAAIAVLTKDAGKLTMGQPLVILAPHAVEALVKQPPDRWLSNARMTHYQALLLDTDRVQFGPIVALNPATLLPLPEEGLQHDCLDILAEAHGTRPDLTDQPLPDADHTWYTDGSSFLQEGQRKAGAAVTTETEVVWAKALPAGTSAQRAELIALTQALKMAEGKKLNVYTDSRYAFATAHIHGEIYRRRGWLTSEGKEIKNKDEILALLKALFLPKRLSIIHCPGHQKGNRAEARGNRMADQAAREVATRETPETSTLLAGKRTADGSEFEKRTADGSEFESPKKKAKVE

SEQ ID NO: 2514 - protein, 2096 aa, synthetic construct
  source 1..2096: note = Description of Artificial Sequence: Synthetic polypeptide
MPAAKRVKLDGGDKKYSIGLDIGTNSVGWAVITDEYKVPSKKFKVLGNTDRHSIKKNLIGALLFDSGETAEATRLKRTARRRYTRRKNRICYLQEIFSNEMAKVDDSFFHRLEESFLVEEDKKHERHPIFGNIVDEVAYHEKYPTIYHLRKKLVDSTDKADLRLIYLALAHMIKFRGHFLIEGDLNPDNSDVDKLFIQLVQTYNQLFEENPINASGVDAKAILSARLSKSRRLENLIAQLPGEKKNGLFGNLIALSLGLTPNFKSNFDLAEDAKLQLSKDTYDDDLDNLLAQIGDQYADLFLAAKNLSDAILLSDILRVNTEITKAPLSASMIKRYDEHHQDLTLLKALVRQQLPEKYKEIFFDQSKNGYAGYIDGGASQEEFYKFIKPILEKMDGTEELLVKLNREDLLRKQRTFDNGSIPHQIHLGELHAILRRQEDFYPFLKDNREKIEKILTFRIPYYVGPLARGNSRFAWMTRKSEETITPWNFEEVVDKGASAQSFIERMTNFDKNLPNEKVLPKHSLLYEYFTVYNELTKVKYVTEGMRKPAFLSGEQKKAIVDLLFKTNRKVTVKQLKEDYFKKIECFDSVEISGVEDRFNASLGTYHDLLKIIKDKDFLDNEENEDILEDIVLTLTLFEDREMIEERLKTYAHLFDDKVMKQLKRRRYTGWGRLSRKLINGIRDKQSGKTILDFLKSDGFANRNFMQLIHDDSLTFKEDIQKAQVSGQGDSLHEHIANLAGSPAIKKGILQTVKVVDELVKVMGRHKPENIVIEMARENQTTQKGQKNSRERMKRIEEGIKELGSQILKEHPVENTQLQNEKLYLYYLQNGRDMYVDQELDINRLSDYDVDHIVPQSFLKDDSIDNKVLTRSDKARGKSDNVPSEEVVKKMKNYWRQLLNAKLITQRKFDNLTKAERGGLSELDKAGFIKRQLVETRQITKHVAQILDSRMNTKYDENDKLIREVKVITLKSKLVSDFRKDFQFYKVREINNYHHAHDAYLNAVVGTALIKKYPKLESEFVYGDYKVYDVRKMIAKSEQEIGKATAKYFFYSNIMNFFKTEITLANGEIRKRPLIETNGETGEIVWDKGRDFATVRKVLSMPQVNIVKKTEVQTGGFSKESILPKRNSDKLIARKKDWDPKKYGGFDSPTVAYSVLVVAKVEKGKSKKLKSVKELLGITIMERSSFEKNPIDFLEAKGYKEVKKDLIIKLPKYSLFELENGRKRMLASAGELQKGNELALPSKYVNFLYLASHYEKLKGSPEDNEQKQLFVEQHKHYLDEIIEQISEFSKRVILADANLDKVLSAYNKHRDKPIREQAENIIHLFTLTNLGAPAAFKYFDTTIDRKRYTSTKEVLDATLIHQSITGLYETRIDLSQLGGDGGPAPEAAAKGSSGGTLNIEDEYRLHETSKGPDVPLGSTWLSDFPQAWAETGGMGLAVRQAPLIIPLKATSTPVSIKQYPMSQEARLGIKPHIQRLLDQGILVPCQSPWNTPLLPVKKPGTNDYRPVQDLREVNKRVEDIHPTVPNPYNLLSGLPPSHQWYTVLDLKDAFFCLRLHPTSQSLFAFEWRDPEMGISGQLTWTRLPQGFKNSPTLFNEALHRDLADFRIQHPDLILLQYVDDLLLAATSELDCQQGTRALLQTLGDLGYRASAKKAQICQKQVKYLGYLLKEGQRWLTEARKETVMGQPTPKTPRQLREFLGKAGFCRLFIPGFAEMAAPLYPLTKPGTLFEWGPDQQKAYQEIKQALLTAPALGLPDLTKPFELFVDEKQGYAKGVLTQKLGPWRRPVAYLSKKLDPVAAGWPPCLRMVAAIAVLTKDAGKLTMGQPLVILAPHAVEALVKQPPDRWLSNARMTHYQALLLDTDRVQFGPIVALNPATLLPLPEEGLQHDCLDILAEAHGTRPDLTDQPLPDADHTWYTDGSSFLQEGQRKAGAAVTTETEVVWAKALPAGTSAQRAELIALTQALKMAEGKKLNVYTDSRYAFATAHIHGEIYRRRGWLTSEGKEIKNKDEILALLKALFLPKRLSIIHCPGHQKGNRAEARGNRMADQAAREVATRETPETSTLLAGKRTADGSEFEKRTADGSEFESPKKKAKVE

SEQ ID NO: 2515 - protein, 2096 aa, synthetic construct
  source 1..2096: note = Description of Artificial Sequence: Synthetic polypeptide
MPAAKRVKLDGGDKKYSIGLDIGTNSVGWAVITDEYKVPSKKFKVLGNTDRHSIKKNLIGALLFDSGETAEATRLKRTARRRYTRRKNRICYLQEIFSNEMAKVDDSFFHRLEESFLVEEDKKHERHPIFGNIVDEVAYHEKYPTIYHLRKKLVDSTDKADLRLIYLALAHMIKFRGHFLIEGDLNPDNSDVDKLFIQLVQTYNQLFEENPINASGVDAKAILSARLSKSRRLENLIAQLPGEKKNGLFGNLIALSLGLTPNFKSNFDLAEDAKLQLSKDTYDDDLDNLLAQIGDQYADLFLAAKNLSDAILLSDILRVNTEITKAPLSASMIKRYDEHHQDLTLLKALVRQQLPEKYKEIFFDQSKNGYAGYIDGGASQEEFYKFIKPILEKMDGTEELLVKLNREDLLRKQRTFDNGSIPHQIHLGELHAILRRQEDFYPFLKDNREKIEKILTFRIPYYVGPLARGNSRFAWMTRKSEETITPWNFEEVVDKGASAQSFIERMTNFDKNLPNEKVLPKHSLLYEYFTVYNELTKVKYVTEGMRKPAFLSGEQKKAIVDLLFKTNRKVTVKQLKEDYFKKIECFDSVEISGVEDRFNASLGTYHDLLKIIKDKDFLDNEENEDILEDIVLTLTLFEDREMIEERLKTYAHLFDDKVMKQLKRRRYTGWGRLSRKLINGIRDKQSGKTILDFLKSDGFANRNFMQLIHDDSLTFKEDIQKAQVSGQGDSLHEHIANLAGSPAIKKGILQTVKVVDELVKVMGRHKPENIVIEMARENQTTQKGQKNSRERMKRIEEGIKELGSQILKEHPVENTQLQNEKLYLYYLQNGRDMYVDQELDINRLSDYDVDHIVPQSFLKDDSIDNKVLTRSDKARGKSDNVPSEEVVKKMKNYWRQLLNAKLITQRKFDNLTKAERGGLSELDKAGFIKRQLVETRQITKHVAQILDSRMNTKYDENDKLIREVKVITLKSKLVSDFRKDFQFYKVREINNYHHAHDAYLNAVVGTALIKKYPKLESEFVYGDYKVYDVRKMIAKSEQEIGKATAKYFFYSNIMNFFKTEITLANGEIRKRPLIETNGETGEIVWDKGRDFATVRKVLSMPQVNIVKKTEVQTGGFSKESILPKRNSDKLIARKKDWDPKKYGGFDSPTVAYSVLVVAKVEKGKSKKLKSVKELLGITIMERSSFEKNPIDFLEAKGYKEVKKDLIIKLPKYSLFELENGRKRMLASAGELQKGNELALPSKYVNFLYLASHYEKLKGSPEDNEQKQLFVEQHKHYLDEIIEQISEFSKRVILADANLDKVLSAYNKHRDKPIREQAENIIHLFTLTNLGAPAAFKYFDTTIDRKRYTSTKEVLDATLIHQSITGLYETRIDLSQLGGDGGGSSGGGEAAAKGGTLNIEDEYRLHETSKGPDVPLGSTWLSDFPQAWAETGGMGLAVRQAPLIIPLKATSTPVSIKQYPMSQEARLGIKPHIQRLLDQGILVPCQSPWNTPLLPVKKPGTNDYRPVQDLREVNKRVEDIHPTVPNPYNLLSGLPPSHQWYTVLDLKDAFFCLRLHPTSQSLFAFEWRDPEMGISGQLTWTRLPQGFKNSPTLFNEALHRDLADFRIQHPDLILLQYVDDLLLAATSELDCQQGTRALLQTLGDLGYRASAKKAQICQKQVKYLGYLLKEGQRWLTEARKETVMGQPTPKTPRQLREFLGKAGFCRLFIPGFAEMAAPLYPLTKPGTLFEWGPDQQKAYQEIKQALLTAPALGLPDLTKPFELFVDEKQGYAKGVLTQKLGPWRRPVAYLSKKLDPVAAGWPPCLRMVAAIAVLTKDAGKLTMGQPLVILAPHAVEALVKQPPDRWLSNARMTHYQALLLDTDRVQFGPIVALNPATLLPLPEEGLQHDCLDILAEAHGTRPDLTDQPLPDADHTWYTDGSSFLQEGQRKAGAAVTTETEVVWAKALPAGTSAQRAELIALTQALKMAEGKKLNVYTDSRYAFATAHIHGEIYRRRGWLTSEGKEIKNKDEILALLKALFLPKRLSIIHCPGHQKGNRAEARGNRMADQAAREVATRETPETSTLLAGKRTADGSEFEKRTADGSEFESPKKKAKVE

SEQ ID NO: 2516 - protein, 2100 aa, synthetic construct
  source 1..2100: note = Description of Artificial Sequence: Synthetic polypeptide
MPAAKRVKLDGGDKKYSIGLDIGTNSVGWAVITDEYKVPSKKFKVLGNTDRHSIKKNLIGALLFDSGETAEATRLKRTARRRYTRRKNRICYLQEIFSNEMAKVDDSFFHRLEESFLVEEDKKHERHPIFGNIVDEVAYHEKYPTIYHLRKKLVDSTDKADLRLIYLALAHMIKFRGHFLIEGDLNPDNSDVDKLFIQLVQTYNQLFEENPINASGVDAKAILSARLSKSRRLENLIAQLPGEKKNGLFGNLIALSLGLTPNFKSNFDLAEDAKLQLSKDTYDDDLDNLLAQIGDQYADLFLAAKNLSDAILLSDILRVNTEITKAPLSASMIKRYDEHHQDLTLLKALVRQQLPEKYKEIFFDQSKNGYAGYIDGGASQEEFYKFIKPILEKMDGTEELLVKLNREDLLRKQRTFDNGSIPHQIHLGELHAILRRQEDFYPFLKDNREKIEKILTFRIPYYVGPLARGNSRFAWMTRKSEETITPWNFEEVVDKGASAQSFIERMTNFDKNLPNEKVLPKHSLLYEYFTVYNELTKVKYVTEGMRKPAFLSGEQKKAIVDLLFKTNRKVTVKQLKEDYFKKIECFDSVEISGVEDRFNASLGTYHDLLKIIKDKDFLDNEENEDILEDIVLTLTLFEDREMIEERLKTYAHLFDDKVMKQLKRRRYTGWGRLSRKLINGIRDKQSGKTILDFLKSDGFANRNFMQLIHDDSLTFKEDIQKAQVSGQGDSLHEHIANLAGSPAIKKGILQTVKVVDELVKVMGRHKPENIVIEMARENQTTQKGQKNSRERMKRIEEGIKELGSQILKEHPVENTQLQNEKLYLYYLQNGRDMYVDQELDINRLSDYDVDHIVPQSFLKDDSIDNKVLTRSDKARGKSDNVPSEEVVKKMKNYWRQLLNAKLITQRKFDNLTKAERGGLSELDKAGFIKRQLVETRQITKHVAQILDSRMNTKYDENDKLIREVKVITLKSKLVSDFRKDFQFYKVREINNYHHAHDAYLNAVVGTALIKKYPKLESEFVYGDYKVYDVRKMIAKSEQEIGKATAKYFFYSNIMNFFKTEITLANGEIRKRPLIETNGETGEIVWDKGRDFATVRKVLSMPQVNIVKKTEVQTGGFSKESILPKRNSDKLIARKKDWDPKKYGGFDSPTVAYSVLVVAKVEKGKSKKLKSVKELLGITIMERSSFEKNPIDFLEAKGYKEVKKDLIIKLPKYSLFELENGRKRMLASAGELQKGNELALPSKYVNFLYLASHYEKLKGSPEDNEQKQLFVEQHKHYLDEIIEQISEFSKRVILADANLDKVLSAYNKHRDKPIREQAENIIHLFTLTNLGAPAAFKYFDTTIDRKRYTSTKEVLDATLIHQSITGLYETRIDLSQLGGDGGGGGGSGGGGSGGGGSGGTLNIEDEYRLHETSKGPDVPLGSTWLSDFPQAWAETGGMGLAVRQAPLIIPLKATSTPVSIKQYPMSQEARLGIKPHIQRLLDQGILVPCQSPWNTPLLPVKKPGTNDYRPVQDLREVNKRVEDIHPTVPNPYNLLSGLPPSHQWYTVLDLKDAFFCLRLHPTSQSLFAFEWRDPEMGISGQLTWTRLPQGFKNSPTLFNEALHRDLADFRIQHPDLILLQYVDDLLLAATSELDCQQGTRALLQTLGDLGYRASAKKAQICQKQVKYLGYLLKEGQRWLTEARKETVMGQPTPKTPRQLREFLGKAGFCRLFIPGFAEMAAPLYPLTKPGTLFEWGPDQQKAYQEIKQALLTAPALGLPDLTKPFELFVDEKQGYAKGVLTQKLGPWRRPVAYLSKKLDPVAAGWPPCLRMVAAIAVLTKDAGKLTMGQPLVILAPHAVEALVKQPPDRWLSNARMTHYQALLLDTDRVQFGPIVALNPATLLPLPEEGLQHDCLDILAEAHGTRPDLTDQPLPDADHTWYTDGSSFLQEGQRKAGAAVTTETEVVWAKALPAGTSAQRAELIALTQALKMAEGKKLNVYTDSRYAFATAHIHGEIYRRRGWLTSEGKEIKNKDEILALLKALFLPKRLSIIHCPGHQKGNRAEARGNRMADQAAREVATRETPETSTLLAGKRTADGSEFEKRTADGSEFESPKKKAKVE

SEQ ID NO: 2517 - protein, 2093 aa, synthetic construct
  source 1..2093: note = Description of Artificial Sequence: Synthetic polypeptide
MPAAKRVKLDGGDKKYSIGLDIGTNSVGWAVITDEYKVPSKKFKVLGNTDRHSIKKNLIGALLFDSGETAEATRLKRTARRRYTRRKNRICYLQEIFSNEMAKVDDSFFHRLEESFLVEEDKKHERHPIFGNIVDEVAYHEKYPTIYHLRKKLVDSTDKADLRLIYLALAHMIKFRGHFLIEGDLNPDNSDVDKLFIQLVQTYNQLFEENPINASGVDAKAILSARLSKSRRLENLIAQLPGEKKNGLFGNLIALSLGLTPNFKSNFDLAEDAKLQLSKDTYDDDLDNLLAQIGDQYADLFLAAKNLSDAILLSDILRVNTEITKAPLSASMIKRYDEHHQDLTLLKALVRQQLPEKYKEIFFDQSKNGYAGYIDGGASQEEFYKFIKPILEKMDGTEELLVKLNREDLLRKQRTFDNGSIPHQIHLGELHAILRRQEDFYPFLKDNREKIEKILTFRIPYYVGPLARGNSRFAWMTRKSEETITPWNFEEVVDKGASAQSFIERMTNFDKNLPNEKVLPKHSLLYEYFTVYNELTKVKYVTEGMRKPAFLSGEQKKAIVDLLFKTNRKVTVKQLKEDYFKKIECFDSVEISGVEDRFNASLGTYHDLLKIIKDKDFLDNEENEDILEDIVLTLTLFEDREMIEERLKTYAHLFDDKVMKQLKRRRYTGWGRLSRKLINGIRDKQSGKTILDFLKSDGFANRNFMQLIHDDSLTFKEDIQKAQVSGQGDSLHEHIANLAGSPAIKKGILQTVKVVDELVKVMGRHKPENIVIEMARENQTTQKGQKNSRERMKRIEEGIKELGSQILKEHPVENTQLQNEKLYLYYLQNGRDMYVDQELDINRLSDYDVDHIVPQSFLKDDSIDNKVLTRSDKARGKSDNVPSEEVVKKMKNYWRQLLNAKLITQRKFDNLTKAERGGLSELDKAGFIKRQLVETRQITKHVAQILDSRMNTKYDENDKLIREVKVITLKSKLVSDFRKDFQFYKVREINNYHHAHDAYLNAVVGTALIKKYPKLESEFVYGDYKVYDVRKMIAKSEQEIGKATAKYFFYSNIMNFFKTEITLANGEIRKRPLIETNGETGEIVWDKGRDFATVRKVLSMPQVNIVKKTEVQTGGFSKESILPKRNSDKLIARKKDWDPKKYGGFDSPTVAYSVLVVAKVEKGKSKKLKSVKELLGITIMERSSFEKNPIDFLEAKGYKEVKKDLIIKLPKYSLFELENGRKRMLASAGELQKGNELALPSKYVNFLYLASHYEKLKGSPEDNEQKQLFVEQHKHYLDEIIEQISEFSKRVILADANLDKVLSAYNKHRDKPIREQAENIIHLFTLTNLGAPAAFKYFDTTIDRKRYTSTKEVLDATLIHQSITGLYETRIDLSQLGGDGGEAAAKGGGGGTLNIEDEYRLHETSKGPDVPLGSTWLSDFPQAWAETGGMGLAVRQAPLIIPLKATSTPVSIKQYPMSQEARLGIKPHIQRLLDQGILVPCQSPWNTPLLPVKKPGTNDYRPVQDLREVNKRVEDIHPTVPNPYNLLSGLPPSHQWYTVLDLKDAFFCLRLHPTSQSLFAFEWRDPEMGISGQLTWTRLPQGFKNSPTLFNEALHRDLADFRIQHPDLILLQYVDDLLLAATSELDCQQGTRALLQTLGDLGYRASAKKAQICQKQVKYLGYLLKEGQRWLTEARKETVMGQPTPKTPRQLREFLGKAGFCRLFIPGFAEMAAPLYPLTKPGTLFEWGPDQQKAYQEIKQALLTAPALGLPDLTKPFELFVDEKQGYAKGVLTQKLGPWRRPVAYLSKKLDPVAAGWPPCLRMVAAIAVLTKDAGKLTMGQPLVILAPHAVEALVKQPPDRWLSNARMTHYQALLLDTDRVQFGPIVALNPATLLPLPEEGLQHDCLDILAEAHGTRPDLTDQPLPDADHTWYTDGSSFLQEGQRKAGAAVTTETEVVWAKALPAGTSAQRAELIALTQALKMAEGKKLNVYTDSRYAFATAHIHGEIYRRRGWLTSEGKEIKNKDEILALLKALFLPKRLSIIHCPGHQKGNRAEARGNRMADQAAREVATRETPETSTLLAGKRTADGSEFEKRTADGSEFESPKKKAKVE

SEQ ID NO: 2518 - protein, 2101 aa, synthetic construct
  source 1..2101: note = Description of Artificial Sequence: Synthetic polypeptide
MPAAKRVKLDGGDKKYSIGLDIGTNSVGWAVITDEYKVPSKKFKVLGNTDRHSIKKNLIGALLFDSGETAEATRLKRTARRRYTRRKNRICYLQEIFSNEMAKVDDSFFHRLEESFLVEEDKKHERHPIFGNIVDEVAYHEKYPTIYHLRKKLVDSTDKADLRLIYLALAHMIKFRGHFLIEGDLNPDNSDVDKLFIQLVQTYNQLFEENPINASGVDAKAILSARLSKSRRLENLIAQLPGEKKNGLFGNLIALSLGLTPNFKSNFDLAEDAKLQLSKDTYDDDLDNLLAQIGDQYADLFLAAKNLSDAILLSDILRVNTEITKAPLSASMIKRYDEHHQDLTLLKALVRQQLPEKYKEIFFDQSKNGYAGYIDGGASQEEFYKFIKPILEKMDGTEELLVKLNREDLLRKQRTFDNGSIPHQIHLGELHAILRRQEDFYPFLKDNREKIEKILTFRIPYYVGPLARGNSRFAWMTRKSEETITPWNFEEVVDKGASAQSFIERMTNFDKNLPNEKVLPKHSLLYEYFTVYNELTKVKYVTEGMRKPAFLSGEQKKAIVDLLFKTNRKVTVKQLKEDYFKKIECFDSVEISGVEDRFNASLGTYHDLLKIIKDKDFLDNEENEDILEDIVLTLTLFEDREMIEERLKTYAHLFDDKVMKQLKRRRYTGWGRLSRKLINGIRDKQSGKTILDFLKSDGFANRNFMQLIHDDSLTFKEDIQKAQVSGQGDSLHEHIANLAGSPAIKKGILQTVKVVDELVKVMGRHKPENIVIEMARENQTTQKGQKNSRERMKRIEEGIKELGSQILKEHPVENTQLQNEKLYLYYLQNGRDMYVDQELDINRLSDYDVDHIVPQSFLKDDSIDNKVLTRSDKARGKSDNVPSEEVVKKMKNYWRQLLNAKLITQRKFDNLTKAERGGLSELDKAGFIKRQLVETRQITKHVAQILDSRMNTKYDENDKLIREVKVITLKSKLVSDFRKDFQFYKVREINNYHHAHDAYLNAVVGTALIKKYPKLESEFVYGDYKVYDVRKMIAKSEQEIGKATAKYFFYSNIMNFFKTEITLANGEIRKRPLIETNGETGEIVWDKGRDFATVRKVLSMPQVNIVKKTEVQTGGFSKESILPKRNSDKLIARKKDWDPKKYGGFDSPTVAYSVLVVAKVEKGKSKKLKSVKELLGITIMERSSFEKNPIDFLEAKGYKEVKKDLIIKLPKYSLFELENGRKRMLASAGELQKGNELALPSKYVNFLYLASHYEKLKGSPEDNEQKQLFVEQHKHYLDEIIEQISEFSKRVILADANLDKVLSAYNKHRDKPIREQAENIIHLFTLTNLGAPAAFKYFDTTIDRKRYTSTKEVLDATLIHQSITGLYETRIDLSQLGGDGGSGSETPGTSESATPESGGTLNIEDEYRLHETSKGPDVPLGSTWLSDFPQAWAETGGMGLAVRQAPLIIPLKATSTPVSIKQYPMSQEARLGIKPHIQRLLDQGILVPCQSPWNTPLLPVKKPGTNDYRPVQDLREVNKRVEDIHPTVPNPYNLLSGLPPSHQWYTVLDLKDAFFCLRLHPTSQSLFAFEWRDPEMGISGQLTWTRLPQGFKNSPTLFNEALHRDLADFRIQHPDLILLQYVDDLLLAATSELDCQQGTRALLQTLGDLGYRASAKKAQICQKQVKYLGYLLKEGQRWLTEARKETVMGQPTPKTPRQLREFLGKAGFCRLFIPGFAEMAAPLYPLTKPGTLFEWGPDQQKAYQEIKQALLTAPALGLPDLTKPFELFVDEKQGYAKGVLTQKLGPWRRPVAYLSKKLDPVAAGWPPCLRMVAAIAVLTKDAGKLTMGQPLVILAPHAVEALVKQPPDRWLSNARMTHYQALLLDTDRVQFGPIVALNPATLLPLPEEGLQHDCLDILAEAHGTRPDLTDQPLPDADHTWYTDGSSFLQEGQRKAGAAVTTETEVVWAKALPAGTSAQRAELIALTQALKMAEGKKLNVYTDSRYAFATAHIHGEIYRRRGWLTSEGKEIKNKDEILALLKALFLPKRLSIIHCPGHQKGNRAEARGNRMADQAAREVATRETPETSTLLAGKRTADGSEFEKRTADGSEFESPKKKAKVE

SEQ ID NO: 2519 - protein, 2096 aa, synthetic construct
  source 1..2096: note = Description of Artificial Sequence: Synthetic polypeptide
MPAAKRVKLDGGDKKYSIGLDIGTNSVGWAVITDEYKVPSKKFKVLGNTDRHSIKKNLIGALLFDSGETAEATRLKRTARRRYTRRKNRICYLQEIFSNEMAKVDDSFFHRLEESFLVEEDKKHERHPIFGNIVDEVAYHEKYPTIYHLRKKLVDSTDKADLRLIYLALAHMIKFRGHFLIEGDLNPDNSDVDKLFIQLVQTYNQLFEENPINASGVDAKAILSARLSKSRRLENLIAQLPGEKKNGLFGNLIALSLGLTPNFKSNFDLAEDAKLQLSKDTYDDDLDNLLAQIGDQYADLFLAAKNLSDAILLSDILRVNTEITKAPLSASMIKRYDEHHQDLTLLKALVRQQLPEKYKEIFFDQSKNGYAGYIDGGASQEEFYKFIKPILEKMDGTEELLVKLNREDLLRKQRTFDNGSIPHQIHLGELHAILRRQEDFYPFLKDNREKIEKILTFRIPYYVGPLARGNSRFAWMTRKSEETITPWNFEEVVDKGASAQSFIERMTNFDKNLPNEKVLPKHSLLYEYFTVYNELTKVKYVTEGMRKPAFLSGEQKKAIVDLLFKTNRKVTVKQLKEDYFKKIECFDSVEISGVEDRFNASLGTYHDLLKIIKDKDFLDNEENEDILEDIVLTLTLFEDREMIEERLKTYAHLFDDKVMKQLKRRRYTGWGRLSRKLINGIRDKQSGKTILDFLKSDGFANRNFMQLIHDDSLTFKEDIQKAQVSGQGDSLHEHIANLAGSPAIKKGILQTVKVVDELVKVMGRHKPENIVIEMARENQTTQKGQKNSRERMKRIEEGIKELGSQILKEHPVENTQLQNEKLYLYYLQNGRDMYVDQELDINRLSDYDVDHIVPQSFLKDDSIDNKVLTRSDKARGKSDNVPSEEVVKKMKNYWRQLLNAKLITQRKFDNLTKAERGGLSELDKAGFIKRQLVETRQITKHVAQILDSRMNTKYDENDKLIREVKVITLKSKLVSDFRKDFQFYKVREINNYHHAHDAYLNAVVGTALIKKYPKLESEFVYGDYKVYDVRKMIAKSEQEIGKATAKYFFYSNIMNFFKTEITLANGEIRKRPLIETNGETGEIVWDKGRDFATVRKVLSMPQVNIVKKTEVQTGGFSKESILPKRNSDKLIARKKDWDPKKYGGFDSPTVAYSVLVVAKVEKGKSKKLKSVKELLGITIMERSSFEKNPIDFLEAKGYKEVKKDLIIKLPKYSLFELENGRKRMLASAGELQKGNELALPSKYVNFLYLASHYEKLKGSPEDNEQKQLFVEQHKHYLDEIIEQISEFSKRVILADANLDKVLSAYNKHRDKPIREQAENIIHLFTLTNLGAPAAFKYFDTTIDRKRYTSTKEVLDATLIHQSITGLYETRIDLSQLGGDGGEAAAKPAPGSSGGTLNIEDEYRLHETSKGPDVPLGSTWLSDFPQAWAETGGMGLAVRQAPLIIPLKATSTPVSIKQYPMSQEARLGIKPHIQRLLDQGILVPCQSPWNTPLLPVKKPGTNDYRPVQDLREVNKRVEDIHPTVPNPYNLLSGLPPSHQWYTVLDLKDAFFCLRLHPTSQSLFAFEWRDPEMGISGQLTWTRLPQGFKNSPTLFNEALHRDLADFRIQHPDLILLQYVDDLLLAATSELDCQQGTRALLQTLGDLGYRASAKKAQICQKQVKYLGYLLKEGQRWLTEARKETVMGQPTPKTPRQLREFLGKAGFCRLFIPGFAEMAAPLYPLTKPGTLFEWGPDQQKAYQEIKQALLTAPALGLPDLTKPFELFVDEKQGYAKGVLTQKLGPWRRPVAYLSKKLDPVAAGWPPCLRMVAAIAVLTKDAGKLTMGQPLVILAPHAVEALVKQPPDRWLSNARMTHYQALLLDTDRVQFGPIVALNPATLLPLPEEGLQHDCLDILAEAHGTRPDLTDQPLPDADHTWYTDGSSFLQEGQRKAGAAVTTETEVVWAKALPAGTSAQRAELIALTQALKMAEGKKLNVYTDSRYAFATAHIHGEIYRRRGWLTSEGKEIKNKDEILALLKALFLPKRLSIIHCPGHQKGNRAEARGNRMADQAAREVATRETPETSTLLAGKRTADGSEFEKRTADGSEFESPKKKAKVE

SEQ ID NO: 2520 - protein, 2091 aa, synthetic construct
  source 1..2091: note = Description of Artificial Sequence: Synthetic polypeptide
MPAAKRVKLDGGDKKYSIGLDIGTNSVGWAVITDEYKVPSKKFKVLGNTDRHSIKKNLIGALLFDSGETAEATRLKRTARRRYTRRKNRICYLQEIFSNEMAKVDDSFFHRLEESFLVEEDKKHERHPIFGNIVDEVAYHEKYPTIYHLRKKLVDSTDKADLRLIYLALAHMIKFRGHFLIEGDLNPDNSDVDKLFIQLVQTYNQLFEENPINASGVDAKAILSARLSKSRRLENLIAQLPGEKKNGLFGNLIALSLGLTPNFKSNFDLAEDAKLQLSKDTYDDDLDNLLAQIGDQYADLFLAAKNLSDAILLSDILRVNTEITKAPLSASMIKRYDEHHQDLTLLKALVRQQLPEKYKEIFFDQSKNGYAGYIDGGASQEEFYKFIKPILEKMDGTEELLVKLNREDLLRKQRTFDNGSIPHQIHLGELHAILRRQEDFYPFLKDNREKIEKILTFRIPYYVGPLARGNSRFAWMTRKSEETITPWNFEEVVDKGASAQSFIERMTNFDKNLPNEKVLPKHSLLYEYFTVYNELTKVKYVTEGMRKPAFLSGEQKKAIVDLLFKTNRKVTVKQLKEDYFKKIECFDSVEISGVEDRFNASLGTYHDLLKIIKDKDFLDNEENEDILEDIVLTLTLFEDREMIEERLKTYAHLFDDKVMKQLKRRRYTGWGRLSRKLINGIRDKQSGKTILDFLKSDGFANRNFMQLIHDDSLTFKEDIQKAQVSGQGDSLHEHIANLAGSPAIKKGILQTVKVVDELVKVMGRHKPENIVIEMARENQTTQKGQKNSRERMKRIEEGIKELGSQILKEHPVENTQLQNEKLYLYYLQNGRDMYVDQELDINRLSDYDVDHIVPQSFLKDDSIDNKVLTRSDKARGKSDNVPSEEVVKKMKNYWRQLLNAKLITQRKFDNLTKAERGGLSELDKAGFIKRQLVETRQITKHVAQILDSRMNTKYDENDKLIREVKVITLKSKLVSDFRKDFQFYKVREINNYHHAHDAYLNAVVGTALIKKYPKLESEFVYGDYKVYDVRKMIAKSEQEIGKATAKYFFYSNIMNFFKTEITLANGEIRKRPLIETNGETGEIVWDKGRDFATVRKVLSMPQVNIVKKTEVQTGGFSKESILPKRNSDKLIARKKDWDPKKYGGFDSPTVAYSVLVVAKVEKGKSKKLKSVKELLGITIMERSSFEKNPIDFLEAKGYKEVKKDLIIKLPKYSLFELENGRKRMLASAGELQKGNELALPSKYVNFLYLASHYEKLKGSPEDNEQKQLFVEQHKHYLDEIIEQISEFSKRVILADANLDKVLSAYNKHRDKPIREQAENIIHLFTLTNLGAPAAFKYFDTTIDRKRYTSTKEVLDATLIHQSITGLYETRIDLSQLGGDGGGSSGSSGGTLNIEDEYRLHETSKGPDVPLGSTWLSDFPQAWAETGGMGLAVRQAPLIIPLKATSTPVSIKQYPMSQEARLGIKPHIQRLLDQGILVPCQSPWNTPLLPVKKPGTNDYRPVQDLREVNKRVEDIHPTVPNPYNLLSGLPPSHQWYTVLDLKDAFFCLRLHPTSQSLFAFEWRDPEMGISGQLTWTRLPQGFKNSPTLFNEALHRDLADFRIQHPDLILLQYVDDLLLAATSELDCQQGTRALLQTLGDLGYRASAKKAQICQKQVKYLGYLLKEGQRWLTEARKETVMGQPTPKTPRQLREFLGKAGFCRLFIPGFAEMAAPLYPLTKPGTLFEWGPDQQKAYQEIKQALLTAPALGLPDLTKPFELFVDEKQGYAKGVLTQKLGPWRRPVAYLSKKLDPVAAGWPPCLRMVAAIAVLTKDAGKLTMGQPLVILAPHAVEALVKQPPDRWLSNARMTHYQALLLDTDRVQFGPIVALNPATLLPLPEEGLQHDCLDILAEAHGTRPDLTDQPLPDADHTWYTDGSSFLQEGQRKAGAAVTTETEVVWAKALPAGTSAQRAELIALTQALKMAEGKKLNVYTDSRYAFATAHIHGEIYRRRGWLTSEGKEIKNKDEILALLKALFLPKRLSIIHCPGHQKGNRAEARGNRMADQAAREVATRETPETSTLLAGKRTADGSEFEKRTADGSEFESPKKKAKVE

SEQ ID NO: 2521 - protein, 2096 aa, synthetic construct
  source 1..2096: note = Description of Artificial Sequence: Synthetic polypeptide
MPAAKRVKLDGGDKKYSIGLDIGTNSVGWAVITDEYKVPSKKFKVLGNTDRHSIKKNLIGALLFDSGETAEATRLKRTARRRYTRRKNRICYLQEIFSNEMAKVDDSFFHRLEESFLVEEDKKHERHPIFGNIVDEVAYHEKYPTIYHLRKKLVDSTDKADLRLIYLALAHMIKFRGHFLIEGDLNPDNSDVDKLFIQLVQTYNQLFEENPINASGVDAKAILSARLSKSRRLENLIAQLPGEKKNGLFGNLIALSLGLTPNFKSNFDLAEDAKLQLSKDTYDDDLDNLLAQIGDQYADLFLAAKNLSDAILLSDILRVNTEITKAPLSASMIKRYDEHHQDLTLLKALVRQQLPEKYKEIFFDQSKNGYAGYIDGGASQEEFYKFIKPILEKMDGTEELLVKLNREDLLRKQRTFDNGSIPHQIHLGELHAILRRQEDFYPFLKDNREKIEKILTFRIPYYVGPLARGNSRFAWMTRKSEETITPWNFEEVVDKGASAQSFIERMTNFDKNLPNEKVLPKHSLLYEYFTVYNELTKVKYVTEGMRKPAFLSGEQKKAIVDLLFKTNRKVTVKQLKEDYFKKIECFDSVEISGVEDRFNASLGTYHDLLKIIKDKDFLDNEENEDILEDIVLTLTLFEDREMIEERLKTYAHLFDDKVMKQLKRRRYTGWGRLSRKLINGIRDKQSGKTILDFLKSDGFANRNFMQLIHDDSLTFKEDIQKAQVSGQGDSLHEHIANLAGSPAIKKGILQTVKVVDELVKVMGRHKPENIVIEMARENQTTQKGQKNSRERMKRIEEGIKELGSQILKEHPVENTQLQNEKLYLYYLQNGRDMYVDQELDINRLSDYDVDHIVPQSFLKDDSIDNKVLTRSDKARGKSDNVPSEEVVKKMKNYWRQLLNAKLITQRKFDNLTKAERGGLSELDKAGFIKRQLVETRQITKHVAQILDSRMNTKYDENDKLIREVKVITLKSKLVSDFRKDFQFYKVREINNYHHAHDAYLNAVVGTALIKKYPKLESEFVYGDYKVYDVRKMIAKSEQEIGKATAKYFFYSNIMNFFKTEITLANGEIRKRPLIETNGETGEIVWDKGRDFATVRKVLSMPQVNIVKKTEVQTGGFSKESILPKRNSDKLIARKKDWDPKKYGGFDSPTVAYSVLVVAKVEKGKSKKLKSVKELLGITIMERSSFEKNPIDFLEAKGYKEVKKDLIIKLPKYSLFELENGRKRMLASAGELQKGNELALPSKYVNFLYLASHYEKLKGSPEDNEQKQLFVEQHKHYLDEIIEQISEFSKRVILADANLDKVLSAYNKHRDKPIREQAENIIHLFTLTNLGAPAAFKYFDTTIDRKRYTSTKEVLDATLIHQSITGLYETRIDLSQLGGDGGGGGEAAAKGGSGGTLNIEDEYRLHETSKGPDVPLGSTWLSDFPQAWAETGGMGLAVRQAPLIIPLKATSTPVSIKQYPMSQEARLGIKPHIQRLLDQGILVPCQSPWNTPLLPVKKPGTNDYRPVQDLREVNKRVEDIHPTVPNPYNLLSGLPPSHQWYTVLDLKDAFFCLRLHPTSQSLFAFEWRDPEMGISGQLTWTRLPQGFKNSPTLFNEALHRDLADFRIQHPDLILLQYVDDLLLAATSELDCQQGTRALLQTLGDLGYRASAKKAQICQKQVKYLGYLLKEGQRWLTEARKETVMGQPTPKTPRQLREFLGKAGFCRLFIPGFAEMAAPLYPLTKPGTLFEWGPDQQKAYQEIKQALLTAPALGLPDLTKPFELFVDEKQGYAKGVLTQKLGPWRRPVAYLSKKLDPVAAGWPPCLRMVAAIAVLTKDAGKLTMGQPLVILAPHAVEALVKQPPDRWLSNARMTHYQALLLDTDRVQFGPIVALNPATLLPLPEEGLQHDCLDILAEAHGTRPDLTDQPLPDADHTWYTDGSSFLQEGQRKAGAAVTTETEVVWAKALPAGTSAQRAELIALTQALKMAEGKKLNVYTDSRYAFATAHIHGEIYRRRGWLTSEGKEIKNKDEILALLKALFLPKRLSIIHCPGHQKGNRAEARGNRMADQAAREVATRETPETSTLLAGKRTADGSEFEKRTADGSEFESPKKKAKVE

SEQ ID NO: 2522 - protein, 2105 aa, synthetic construct
  source 1..2105: note = Description of Artificial Sequence: Synthetic polypeptide
MPAAKRVKLDGGDKKYSIGLDIGTNSVGWAVITDEYKVPSKKFKVLGNTDRHSIKKNLIGALLFDSGETAEATRLKRTARRRYTRRKNRICYLQEIFSNEMAKVDDSFFHRLEESFLVEEDKKHERHPIFGNIVDEVAYHEKYPTIYHLRKKLVDSTDKADLRLIYLALAHMIKFRGHFLIEGDLNPDNSDVDKLFIQLVQTYNQLFEENPINASGVDAKAILSARLSKSRRLENLIAQLPGEKKNGLFGNLIALSLGLTPNFKSNFDLAEDAKLQLSKDTYDDDLDNLLAQIGDQYADLFLAAKNLSDAILLSDILRVNTEITKAPLSASMIKRYDEHHQDLTLLKALVRQQLPEKYKEIFFDQSKNGYAGYIDGGASQEEFYKFIKPILEKMDGTEELLVKLNREDLLRKQRTFDNGSIPHQIHLGELHAILRRQEDFYPFLKDNREKIEKILTFRIPYYVGPLARGNSRFAWMTRKSEETITPWNFEEVVDKGASAQSFIERMTNFDKNLPNEKVLPKHSLLYEYFTVYNELTKVKYVTEGMRKPAFLSGEQKKAIVDLLFKTNRKVTVKQLKEDYFKKIECFDSVEISGVEDRFNASLGTYHDLLKIIKDKDFLDNEENEDILEDIVLTLTLFEDREMIEERLKTYAHLFDDKVMKQLKRRRYTGWGRLSRKLINGIRDKQSGKTILDFLKSDGFANRNFMQLIHDDSLTFKEDIQKAQVSGQGDSLHEHIANLAGSPAIKKGILQTVKVVDELVKVMGRHKPENIVIEMARENQTTQKGQKNSRERMKRIEEGIKELGSQILKEHPVENTQLQNEKLYLYYLQNGRDMYVDQELDINRLSDYDVDHIVPQSFLKDDSIDNKVLTRSDKARGKSDNVPSEEVVKKMKNYWRQLLNAKLITQRKFDNLTKAERGGLSELDKAGFIKRQLVETRQITKHVAQILDSRMNTKYDENDKLIREVKVITLKSKLVSDFRKDFQFYKVREINNYHHAHDAYLNAVVGTALIKKYPKLESEFVYGDYKVYDVRKMIAKSEQEIGKATAKYFFYSNIMNFFKTEITLANGEIRKRPLIETNGETGEIVWDKGRDFATVRKVLSMPQVNIVKKTEVQTGGFSKESILPKRNSDKLIARKKDWDPKKYGGFDSPTVAYSVLVVAKVEKGKSKKLKSVKELLGITIMERSSFEKNPIDFLEAKGYKEVKKDLIIKLPKYSLFELENGRKRMLASAGELQKGNELALPSKYVNFLYLASHYEKLKGSPEDNEQKQLFVEQHKHYLDEIIEQISEFSKRVILADANLDKVLSAYNKHRDKPIREQAENIIHLFTLTNLGAPAAFKYFDTTIDRKRYTSTKEVLDATLIHQSITGLYETRIDLSQLGGDGGEAAAKEAAAKEAAAKEAAAKGGTLNIEDEYRLHETSKGPDVPLGSTWLSDFPQAWAETGGMGLAVRQAPLIIPLKATSTPVSIKQYPMSQEARLGIKPHIQRLLDQGILVPCQSPWNTPLLPVKKPGTNDYRPVQDLREVNKRVEDIHPTVPNPYNLLSGLPPSHQWYTVLDLKDAFFCLRLHPTSQSLFAFEWRDPEMGISGQLTWTRLPQGFKNSPTLFNEALHRDLADFRIQHPDLILLQYVDDLLLAATSELDCQQGTRALLQTLGDLGYRASAKKAQICQKQVKYLGYLLKEGQRWLTEARKETVMGQPTPKTPRQLREFLGKAGFCRLFIPGFAEMAAPLYPLTKPGTLFEWGPDQQKAYQEIKQALLTAPALGLPDLTKPFELFVDEKQGYAKGVLTQKLGPWRRPVAYLSKKLDPVAAGWPPCLRMVAAIAVLTKDAGKLTMGQPLVILAPHAVEALVKQPPDRWLSNARMTHYQALLLDTDRVQFGPIVALNPATLLPLPEEGLQHDCLDILAEAHGTRPDLTDQPLPDADHTWYTDGSSFLQEGQRKAGAAVTTETEVVWAKALPAGTSAQRAELIALTQALKMAEGKKLNVYTDSRYAFATAHIHGEIYRRRGWLTSEGKEIKNKDEILALLKALFLPKRLSIIHCPGHQKGNRAEARGNRMADQAAREVATRETPETSTLLAGKRTADGSEFEKRTADGSEFESPKKKAKVE

SEQ ID NO: 2523 - protein, 2094 aa, synthetic construct
  source 1..2094: note = Description of Artificial Sequence: Synthetic polypeptide
MPAAKRVKLDGGDKKYSIGLDIGTNSVGWAVITDEYKVPSKKFKVLGNTDRHSIKKNLIGALLFDSGETAEATRLKRTARRRYTRRKNRICYLQEIFSNEMAKVDDSFFHRLEESFLVEEDKKHERHPIFGNIVDEVAYHEKYPTIYHLRKKLVDSTDKADLRLIYLALAHMIKFRGHFLIEGDLNPDNSDVDKLFIQLVQTYNQLFEENPINASGVDAKAILSARLSKSRRLENLIAQLPGEKKNGLFGNLIALSLGLTPNFKSNFDLAEDAKLQLSKDTYDDDLDNLLAQIGDQYADLFLAAKNLSDAILLSDILRVNTEITKAPLSASMIKRYDEHHQDLTLLKALVRQQLPEKYKEIFFDQSKNGYAGYIDGGASQEEFYKFIKPILEKMDGTEELLVKLNREDLLRKQRTFDNGSIPHQIHLGELHAILRRQEDFYPFLKDNREKIEKILTFRIPYYVGPLARGNSRFAWMTRKSEETITPWNFEEVVDKGASAQSFIERMTNFDKNLPNEKVLPKHSLLYEYFTVYNELTKVKYVTEGMRKPAFLSGEQKKAIVDLLFKTNRKVTVKQLKEDYFKKIECFDSVEISGVEDRFNASLGTYHDLLKIIKDKDFLDNEENEDILEDIVLTLTLFEDREMIEERLKTYAHLFDDKVMKQLKRRRYTGWGRLSRKLINGIRDKQSGKTILDFLKSDGFANRNFMQLIHDDSLTFKEDIQKAQVSGQGDSLHEHIANLAGSPAIKKGILQTVKVVDELVKVMGRHKPENIVIEMARENQTTQKGQKNSRERMKRIEEGIKELGSQILKEHPVENTQLQNEKLYLYYLQNGRDMYVDQELDINRLSDYDVDHIVPQSFLKDDSIDNKVLTRSDKARGKSDNVPSEEVVKKMKNYWRQLLNAKLITQRKFDNLTKAERGGLSELDKAGFIKRQLVETRQITKHVAQILDSRMNTKYDENDKLIREVKVITLKSKLVSDFRKDFQFYKVREINNYHHAHDAYLNAVVGTALIKKYPKLESEFVYGDYKVYDVRKMIAKSEQEIGKATAKYFFYSNIMNFFKTEITLANGEIRKRPLIETNGETGEIVWDKGRDFATVRKVLSMPQVNIVKKTEVQTGGFSKESILPKRNSDKLIARKKDWDPKKYGGFDSPTVAYSVLVVAKVEKGKSKKLKSVKELLGITIMERSSFEKNPIDFLEAKGYKEVKKDLIIKLPKYSLFELENGRKRMLASAGELQKGNELALPSKYVNFLYLASHYEKLKGSPEDNEQKQLFVEQHKHYLDEIIEQISEFSKRVILADANLDKVLSAYNKHRDKPIREQAENIIHLFTLTNLGAPAAFKYFDTTIDRKRYTSTKEVLDATLIHQSITGLYETRIDLSQLGGDGGGGSGGSGGSGGTLNIEDEYRLHETSKGPDVPLGSTWLSDFPQAWAETGGMGLAVRQAPLIIPLKATSTPVSIKQYPMSQEARLGIKPHIQRLLDQGILVPCQSPWNTPLLPVKKPGTNDYRPVQDLREVNKRVEDIHPTVPNPYNLLSGLPPSHQWYTVLDLKDAFFCLRLHPTSQSLFAFEWRDPEMGISGQLTWTRLPQGFKNSPTLFNEALHRDLADFRIQHPDLILLQYVDDLLLAATSELDCQQGTRALLQTLGDLGYRASAKKAQICQKQVKYLGYLLKEGQRWLTEARKETVMGQPTPKTPRQLREFLGKAGFCRLFIPGFAEMAAPLYPLTKPGTLFEWGPDQQKAYQEIKQALLTAPALGLPDLTKPFELFVDEKQGYAKGVLTQKLGPWRRPVAYLSKKLDPVAAGWPPCLRMVAAIAVLTKDAGKLTMGQPLVILAPHAVEALVKQPPDRWLSNARMTHYQALLLDTDRVQFGPIVALNPATLLPLPEEGLQHDCLDILAEAHGTRPDLTDQPLPDADHTWYTDGSSFLQEGQRKAGAAVTTETEVVWAKALPAGTSAQRAELIALTQALKMAEGKKLNVYTDSRYAFATAHIHGEIYRRRGWLTSEGKEIKNKDEILALLKALFLPKRLSIIHCPGHQKGNRAEARGNRMADQAAREVATRETPETSTLLAGKRTADGSEFEKRTADGSEFESPKKKAKVE

SEQ ID NO: 2524 - protein, 2088 aa, synthetic construct
  source 1..2088: note = Description of Artificial Sequence: Synthetic polypeptide
MPAAKRVKLDGGDKKYSIGLDIGTNSVGWAVITDEYKVPSKKFKVLGNTDRHSIKKNLIGALLFDSGETAEATRLKRTARRRYTRRKNRICYLQEIFSNEMAKVDDSFFHRLEESFLVEEDKKHERHPIFGNIVDEVAYHEKYPTIYHLRKKLVDSTDKADLRLIYLALAHMIKFRGHFLIEGDLNPDNSDVDKLFIQLVQTYNQLFEENPINASGVDAKAILSARLSKSRRLENLIAQLPGEKKNGLFGNLIALSLGLTPNFKSNFDLAEDAKLQLSKDTYDDDLDNLLAQIGDQYADLFLAAKNLSDAILLSDILRVNTEITKAPLSASMIKRYDEHHQDLTLLKALVRQQLPEKYKEIFFDQSKNGYAGYIDGGASQEEFYKFIKPILEKMDGTEELLVKLNREDLLRKQRTFDNGSIPHQIHLGELHAILRRQEDFYPFLKDNREKIEKILTFRIPYYVGPLARGNSRFAWMTRKSEETITPWNFEEVVDKGASAQSFIERMTNFDKNLPNEKVLPKHSLLYEYFTVYNELTKVKYVTEGMRKPAFLSGEQKKAIVDLLFKTNRKVTVKQLKEDYFKKIECFDSVEISGVEDRFNASLGTYHDLLKIIKDKDFLDNEENEDILEDIVLTLTLFEDREMIEERLKTYAHLFDDKVMKQLKRRRYTGWGRLSRKLINGIRDKQSGKTILDFLKSDGFANRNFMQLIHDDSLTFKEDIQKAQVSGQGDSLHEHIANLAGSPAIKKGILQTVKVVDELVKVMGRHKPENIVIEMARENQTTQKGQKNSRERMKRIEEGIKELGSQILKEHPVENTQLQNEKLYLYYLQNGRDMYVDQELDINRLSDYDVDHIVPQSFLKDDSIDNKVLTRSDKARGKSDNVPSEEVVKKMKNYWRQLLNAKLITQRKFDNLTKAERGGLSELDKAGFIKRQLVETRQITKHVAQILDSRMNTKYDENDKLIREVKVITLKSKLVSDFRKDFQFYKVREINNYHHAHDAYLNAVVGTALIKKYPKLESEFVYGDYKVYDVRKMIAKSEQEIGKATAKYFFYSNIMNFFKTEITLANGEIRKRPLIETNGETGEIVWDKGRDFATVRKVLSMPQVNIVKKTEVQTGGFSKESILPKRNSDKLIARKKDWDPKKYGGFDSPTVAYSVLVVAKVEKGKSKKLKSVKELLGITIMERSSFEKNPIDFLEAKGYKEVKKDLIIKLPKYSLFELENGRKRMLASAGELQKGNELALPSKYVNFLYLASHYEKLKGSPEDNEQKQLFVEQHKHYLDEIIEQISEFSKRVILADANLDKVLSAYNKHRDKPIREQAENIIHLFTLTNLGAPAAFKYFDTTIDRKRYTSTKEVLDATLIHQSITGLYETRIDLSQLGGDGGPAPGGTLNIEDEYRLHETSKGPDVPLGSTWLSDFPQAWAETGGMGLAVRQAPLIIPLKATSTPVSIKQYPMSQEARLGIKPHIQRLLDQGILVPCQSPWNTPLLPVKKPGTNDYRPVQDLREVNKRVEDIHPTVPNPYNLLSGLPPSHQWYTVLDLKDAFFCLRLHPTSQSLFAFEWRDPEMGISGQLTWTRLPQGFKNSPTLFNEALHRDLADFRIQHPDLILLQYVDDLLLAATSELDCQQGTRALLQTLGDLGYRASAKKAQICQKQVKYLGYLLKEGQRWLTEARKETVMGQPTPKTPRQLREFLGKAGFCRLFIPGFAEMAAPLYPLTKPGTLFEWGPDQQKAYQEIKQALLTAPALGLPDLTKPFELFVDEKQGYAKGVLTQKLGPWRRPVAYLSKKLDPVAAGWPPCLRMVAAIAVLTKDAGKLTMGQPLVILAPHAVEALVKQPPDRWLSNARMTHYQALLLDTDRVQFGPIVALNPATLLPLPEEGLQHDCLDILAEAHGTRPDLTDQPLPDADHTWYTDGSSFLQEGQRKAGAAVTTETEVVWAKALPAGTSAQRAELIALTQALKMAEGKKLNVYTDSRYAFATAHIHGEIYRRRGWLTSEGKEIKNKDEILALLKALFLPKRLSIIHCPGHQKGNRAEARGNRMADQAAREVATRETPETSTLLAGKRTADGSEFEKRTADGSEFESPKKKAKVE

SEQ ID NO: 2525 - protein, 2094 aa, synthetic construct
  source 1..2094: note = Description of Artificial Sequence: Synthetic polypeptide
MPAAKRVKLDGGDKKYSIGLDIGTNSVGWAVITDEYKVPSKKFKVLGNTDRHSIKKNLIGALLFDSGETAEATRLKRTARRRYTRRKNRICYLQEIFSNEMAKVDDSFFHRLEESFLVEEDKKHERHPIFGNIVDEVAYHEKYPTIYHLRKKLVDSTDKADLRLIYLALAHMIKFRGHFLIEGDLNPDNSDVDKLFIQLVQTYNQLFEENPINASGVDAKAILSARLSKSRRLENLIAQLPGEKKNGLFGNLIALSLGLTPNFKSNFDLAEDAKLQLSKDTYDDDLDNLLAQIGDQYADLFLAAKNLSDAILLSDILRVNTEITKAPLSASMIKRYDEHHQDLTLLKALVRQQLPEKYKEIFFDQSKNGYAGYIDGGASQEEFYKFIKPILEKMDGTEELLVKLNREDLLRKQRTFDNGSIPHQIHLGELHAILRRQEDFYPFLKDNREKIEKILTFRIPYYVGPLARGNSRFAWMTRKSEETITPWNFEEVVDKGASAQSFIERMTNFDKNLPNEKVLPKHSLLYEYFTVYNELTKVKYVTEGMRKPAFLSGEQKKAIVDLLFKTNRKVTVKQLKEDYFKKIECFDSVEISGVEDRFNASLGTYHDLLKIIKDKDFLDNEENEDILEDIVLTLTLFEDREMIEERLKTYAHLFDDKVMKQLKRRRYTGWGRLSRKLINGIRDKQSGKTILDFLKSDGFANRNFMQLIHDDSLTFKEDIQKAQVSGQGDSLHEHIANLAGSPAIKKGILQTVKVVDELVKVMGRHKPENIVIEMARENQTTQKGQKNSRERMKRIEEGIKELGSQILKEHPVENTQLQNEKLYLYYLQNGRDMYVDQELDINRLSDYDVDHIVPQSFLKDDSIDNKVLTRSDKARGKSDNVPSEEVVKKMKNYWRQLLNAKLITQRKFDNLTKAERGGLSELDKAGFIKRQLVETRQITKHVAQILDSRMNTKYDENDKLIREVKVITLKSKLVSDFRKDFQFYKVREINNYHHAHDAYLNAVVGTALIKKYPKLESEFVYGDYKVYDVRKMIAKSEQEIGKATAKYFFYSNIMNFFKTEITLANGEIRKRPLIETNGETGEIVWDKGRDFATVRKVLSMPQVNIVKKTEVQTGGFSKESILPKRNSDKLIARKKDWDPKKYGGFDSPTVAYSVLVVAKVEKGKSKKLKSVKELLGITIMERSSFEKNPIDFLEAKGYKEVKKDLIIKLPKYSLFELENGRKRMLASAGELQKGNELALPSKYVNFLYLASHYEKLKGSPEDNEQKQLFVEQHKHYLDEIIEQISEFSKRVILADANLDKVLSAYNKHRDKPIREQAENIIHLFTLTNLGAPAAFKYFDTTIDRKRYTSTKEVLDATLIHQSITGLYETRIDLSQLGGDGGPAPAPAPAPGGTLNIEDEYRLHETSKGPDVPLGSTWLSDFPQAWAETGGMGLAVRQAPLIIPLKATSTPVSIKQYPMSQEARLGIKPHIQRLLDQGILVPCQSPWNTPLLPVKKPGTNDYRPVQDLREVNKRVEDIHPTVPNPYNLLSGLPPSHQWYTVLDLKDAFFCLRLHPTSQSLFAFEWRDPEMGISGQLTWTRLPQGFKNSPTLFNEALHRDLADFRIQHPDLILLQYVDDLLLAATSELDCQQGTRALLQTLGDLGYRASAKKAQICQKQVKYLGYLLKEGQRWLTEARKETVMGQPTPKTPRQLREFLGKAGFCRLFIPGFAEMAAPLYPLTKPGTLFEWGPDQQKAYQEIKQALLTAPALGLPDLTKPFELFVDEKQGYAKGVLTQKLGPWRRPVAYLSKKLDPVAAGWPPCLRMVAAIAVLTKDAGKLTMGQPLVILAPHAVEALVKQPPDRWLSNARMTHYQALLLDTDRVQFGPIVALNPATLLPLPEEGLQHDCLDILAEAHGTRPDLTDQPLPDADHTWYTDGSSFLQEGQRKAGAAVTTETEVVWAKALPAGTSAQRAELIALTQALKMAEGKKLNVYTDSRYAFATAHIHGEIYRRRGWLTSEGKEIKNKDEILALLKALFLPKRLSIIHCPGHQKGNRAEARGNRMADQAAREVATRETPETSTLLAGKRTADGSEFEKRTADGSEFESPKKKAKVE

SEQ ID NO: 2526 - protein, 2096 aa, synthetic construct
  source 1..2096: note = Description of Artificial Sequence: Synthetic polypeptide
MPAAKRVKLDGGDKKYSIGLDIGTNSVGWAVITDEYKVPSKKFKVLGNTDRHSIKKNLIGALLFDSGETAEATRLKRTARRRYTRRKNRICYLQEIFSNEMAKVDDSFFHRLEESFLVEEDKKHERHPIFGNIVDEVAYHEKYPTIYHLRKKLVDSTDKADLRLIYLALAHMIKFRGHFLIEGDLNPDNSDVDKLFIQLVQTYNQLFEENPINASGVDAKAILSARLSKSRRLENLIAQLPGEKKNGLFGNLIALSLGLTPNFKSNFDLAEDAKLQLSKDTYDDDLDNLLAQIGDQYADLFLAAKNLSDAILLSDILRVNTEITKAPLSASMIKRYDEHHQDLTLLKALVRQQLPEKYKEIFFDQSKNGYAGYIDGGASQEEFYKFIKPILEKMDGTEELLVKLNREDLLRKQRTFDNGSIPHQIHLGELHAILRRQEDFYPFLKDNREKIEKILTFRIPYYVGPLARGNSRFAWMTRKSEETITPWNFEEVVDKGASAQSFIERMTNFDKNLPNEKVLPKHSLLYEYFTVYNELTKVKYVTEGMRKPAFLSGEQKKAIVDLLFKTNRKVTVKQLKEDYFKKIECFDSVEISGVEDRFNASLGTYHDLLKIIKDKDFLDNEENEDILEDIVLTLTLFEDREMIEERLKTYAHLFDDKVMKQLKRRRYTGWGRLSRKLINGIRDKQSGKTILDFLKSDGFANRNFMQLIHDDSLTFKEDIQKAQVSGQGDSLHEHIANLAGSPAIKKGILQTVKVVDELVKVMGRHKPENIVIEMARENQTTQKGQKNSRERMKRIEEGIKELGSQILKEHPVENTQLQNEKLYLYYLQNGRDMYVDQELDINRLSDYDVDHIVPQSFLKDDSIDNKVLTRSDKARGKSDNVPSEEVVKKMKNYWRQLLNAKLITQRKFDNLTKAERGGLSELDKAGFIKRQLVETRQITKHVAQILDSRMNTKYDENDKLIREVKVITLKSKLVSDFRKDFQFYKVREINNYHHAHDAYLNAVVGTALIKKYPKLESEFVYGDYKVYDVRKMIAKSEQEIGKATAKYFFYSNIMNFFKTEITLANGEIRKRPLIETNGETGEIVWDKGRDFATVRKVLSMPQVNIVKKTEVQTGGFSKESILPKRNSDKLIARKKDWDPKKYGGFDSPTVAYSVLVVAKVEKGKSKKLKSVKELLGITIMERSSFEKNPIDFLEAKGYKEVKKDLIIKLPKYSLFELENGRKRMLASAGELQKGNELALPSKYVNFLYLASHYEKLKGSPEDNEQKQLFVEQHKHYLDEIIEQISEFSKRVILADANLDKVLSAYNKHRDKPIREQAENIIHLFTLTNLGAPAAFKYFDTTIDRKRYTSTKEVLDATLIHQSITGLYETRIDLSQLGGDGGGGGEAAAKPAPGGTLNIEDEYRLHETSKGPDVPLGSTWLSDFPQAWAETGGMGLAVRQAPLIIPLKATSTPVSIKQYPMSQEARLGIKPHIQRLLDQGILVPCQSPWNTPLLPVKKPGTNDYRPVQDLREVNKRVEDIHPTVPNPYNLLSGLPPSHQWYTVLDLKDAFFCLRLHPTSQSLFAFEWRDPEMGISGQLTWTRLPQGFKNSPTLFNEALHRDLADFRIQHPDLILLQYVDDLLLAATSELDCQQGTRALLQTLGDLGYRASAKKAQICQKQVKYLGYLLKEGQRWLTEARKETVMGQPTPKTPRQLREFLGKAGFCRLFIPGFAEMAAPLYPLTKPGTLFEWGPDQQKAYQEIKQALLTAPALGLPDLTKPFELFVDEKQGYAKGVLTQKLGPWRRPVAYLSKKLDPVAAGWPPCLRMVAAIAVLTKDAGKLTMGQPLVILAPHAVEALVKQPPDRWLSNARMTHYQALLLDTDRVQFGPIVALNPATLLPLPEEGLQHDCLDILAEAHGTRPDLTDQPLPDADHTWYTDGSSFLQEGQRKAGAAVTTETEVVWAKALPAGTSAQRAELIALTQALKMAEGKKLNVYTDSRYAFATAHIHGEIYRRRGWLTSEGKEIKNKDEILALLKALFLPKRLSIIHCPGHQKGNRAEARGNRMADQAAREVATRETPETSTLLAGKRTADGSEFEKRTADGSEFESPKKKAKVE

SEQ ID NO: 2527 - protein, 2096 aa, synthetic construct
  source 1..2096: note = Description of Artificial Sequence: Synthetic polypeptide
MPAAKRVKLDGGDKKYSIGLDIGTNSVGWAVITDEYKVPSKKFKVLGNTDRHSIKKNLIGALLFDSGETAEATRLKRTARRRYTRRKNRICYLQEIFSNEMAKVDDSFFHRLEESFLVEEDKKHERHPIFGNIVDEVAYHEKYPTIYHLRKKLVDSTDKADLRLIYLALAHMIKFRGHFLIEGDLNPDNSDVDKLFIQLVQTYNQLFEENPINASGVDAKAILSARLSKSRRLENLIAQLPGEKKNGLFGNLIALSLGLTPNFKSNFDLAEDAKLQLSKDTYDDDLDNLLAQIGDQYADLFLAAKNLSDAILLSDILRVNTEITKAPLSASMIKRYDEHHQDLTLLKALVRQQLPEKYKEIFFDQSKNGYAGYIDGGASQEEFYKFIKPILEKMDGTEELLVKLNREDLLRKQRTFDNGSIPHQIHLGELHAILRRQEDFYPFLKDNREKIEKILTFRIPYYVGPLARGNSRFAWMTRKSEETITPWNFEEVVDKGASAQSFIERMTNFDKNLPNEKVLPKHSLLYEYFTVYNELTKVKYVTEGMRKPAFLSGEQKKAIVDLLFKTNRKVTVKQLKEDYFKKIECFDSVEISGVEDRFNASLGTYHDLLKIIKDKDFLDNEENEDILEDIVLTLTLFEDREMIEERLKTYAHLFDDKVMKQLKRRRYTGWGRLSRKLINGIRDKQSGKTILDFLKSDGFANRNFMQLIHDDSLTFKEDIQKAQVSGQGDSLHEHIANLAGSPAIKKGILQTVKVVDELVKVMGRHKPENIVIEMARENQTTQKGQKNSRERMKRIEEGIKELGSQILKEHPVENTQLQNEKLYLYYLQNGRDMYVDQELDINRLSDYDVDHIVPQSFLKDDSIDNKVLTRSDKARGKSDNVPSEEVVKKMKNYWRQLLNAKLITQRKFDNLTKAERGGLSELDKAGFIKRQLVETRQITKHVAQILDSRMNTKYDENDKLIREVKVITLKSKLVSDFRKDFQFYKVREINNYHHAHDAYLNAVVGTALIKKYPKLESEFVYGDYKVYDVRKMIAKSEQEIGKATAKYFFYSNIMNFFKTEITLANGEIRKRPLIETNGETGEIVWDKGRDFATVRKVLSMPQVNIVKKTEVQTGGFSKESILPKRNSDKLIARKKDWDPKKYGGFDSPTVAYSVLVVAKVEKGKSKKLKSVKELLGITIMERSSFEKNPIDFLEAKGYKEVKKDLIIKLPKYSLFELENGRKRMLASAGELQKGNELALPSKYVNFLYLASHYEKLKGSPEDNEQKQLFVEQHKHYLDEIIEQISEFSKRVILADANLDKVLSAYNKHRDKPIREQAENIIHLFTLTNLGAPAAFKYFDTTIDRKRYTSTKEVLDATLIHQSITGLYETRIDLSQLGGDGGGGSPAPEAAAKGGTLNIEDEYRLHETSKGPDVPLGSTWLSDFPQAWAETGGMGLAVRQAPLIIPLKATSTPVSIKQYPMSQEARLGIKPHIQRLLDQGILVPCQSPWNTPLLPVKKPGTNDYRPVQDLREVNKRVEDIHPTVPNPYNLLSGLPPSHQWYTVLDLKDAFFCLRLHPTSQSLFAFEWRDPEMGISGQLTWTRLPQGFKNSPTLFNEALHRDLADFRIQHPDLILLQYVDDLLLAATSELDCQQGTRALLQTLGDLGYRASAKKAQICQKQVKYLGYLLKEGQRWLTEARKETVMGQPTPKTPRQLREFLGKAGFCRLFIPGFAEMAAPLYPLTKPGTLFEWGPDQQKAYQEIKQALLTAPALGLPDLTKPFELFVDEKQGYAKGVLTQKLGPWRRPVAYLSKKLDPVAAGWPPCLRMVAAIAVLTKDAGKLTMGQPLVILAPHAVEALVKQPPDRWLSNARMTHYQALLLDTDRVQFGPIVALNPATLLPLPEEGLQHDCLDILAEAHGTRPDLTDQPLPDADHTWYTDGSSFLQEGQRKAGAAVTTETEVVWAKALPAGTSAQRAELIALTQALKMAEGKKLNVYTDSRYAFATAHIHGEIYRRRGWLTSEGKEIKNKDEILALLKALFLPKRLSIIHCPGHQKGNRAEARGNRMADQAAREVATRETPETSTLLAGKRTADGSEFEKRTADGSEFESPKKKAKVE

SEQ ID NO: 2528 - protein, 2100 aa, synthetic construct
  source 1..2100: note = Description of Artificial Sequence: Synthetic polypeptide
MPAAKRVKLDGGDKKYSIGLDIGTNSVGWAVITDEYKVPSKKFKVLGNTDRHSIKKNLIGALLFDSGETAEATRLKRTARRRYTRRKNRICYLQEIFSNEMAKVDDSFFHRLEESFLVEEDKKHERHPIFGNIVDEVAYHEKYPTIYHLRKKLVDSTDKADLRLIYLALAHMIKFRGHFLIEGDLNPDNSDVDKLFIQLVQTYNQLFEENPINASGVDAKAILSARLSKSRRLENLIAQLPGEKKNGLFGNLIALSLGLTPNFKSNFDLAEDAKLQLSKDTYDDDLDNLLAQIGDQYADLFLAAKNLSDAILLSDILRVNTEITKAPLSASMIKRYDEHHQDLTLLKALVRQQLPEKYKEIFFDQSKNGYAGYIDGGASQEEFYKFIKPILEKMDGTEELLVKLNREDLLRKQRTFDNGSIPHQIHLGELHAILRRQEDFYPFLKDNREKIEKILTFRIPYYVGPLARGNSRFAWMTRKSEETITPWNFEEVVDKGASAQSFIERMTNFDKNLPNEKVLPKHSLLYEYFTVYNELTKVKYVTEGMRKPAFLSGEQKKAIVDLLFKTNRKVTVKQLKEDYFKKIECFDSVEISGVEDRFNASLGTYHDLLKIIKDKDFLDNEENEDILEDIVLTLTLFEDREMIEERLKTYAHLFDDKVMKQLKRRRYTGWGRLSRKLINGIRDKQSGKTILDFLKSDGFANRNFMQLIHDDSLTFKEDIQKAQVSGQGDSLHEHIANLAGSPAIKKGILQTVKVVDELVKVMGRHKPENIVIEMARENQTTQKGQKNSRERMKRIEEGIKELGSQILKEHPVENTQLQNEKLYLYYLQNGRDMYVDQELDINRLSDYDVDHIVPQSFLKDDSIDNKVLTRSDKARGKSDNVPSEEVVKKMKNYWRQLLNAKLITQRKFDNLTKAERGGLSELDKAGFIKRQLVETRQITKHVAQILDSRMNTKYDENDKLIREVKVITLKSKLVSDFRKDFQFYKVREINNYHHAHDAYLNAVVGTALIKKYPKLESEFVYGDYKVYDVRKMIAKSEQEIGKATAKYFFYSNIMNFFKTEITLANGEIRKRPLIETNGETGEIVWDKGRDFATVRKVLSMPQVNIVKKTEVQTGGFSKESILPKRNSDKLIARKKDWDPKKYGGFDSPTVAYSVLVVAKVEKGKSKKLKSVKELLGITIMERSSFEKNPIDFLEAKGYKEVKKDLIIKLPKYSLFELENGRKRMLASAGELQKGNELALPSKYVNFLYLASHYEKLKGSPEDNEQKQLFVEQHKHYLDEIIEQISEFSKRVILADANLDKVLSAYNKHRDKPIREQAENIIHLFTLTNLGAPAAFKYFDTTIDRKRYTSTKEVLDATLIHQSITGLYETRIDLSQLGGDGGGGGGSEAAAKGGGGSGGTLNIEDEYRLHETSKGPDVPLGSTWLSDFPQAWAETGGMGLAVRQAPLIIPLKATSTPVSIKQYPMSQEARLGIKPHIQRLLDQGILVPCQSPWNTPLLPVKKPGTNDYRPVQDLREVNKRVEDIHPTVPNPYNLLSGLPPSHQWYTVLDLKDAFFCLRLHPTSQSLFAFEWRDPEMGISGQLTWTRLPQGFKNSPTLFNEALHRDLADFRIQHPDLILLQYVDDLLLAATSELDCQQGTRALLQTLGDLGYRASAKKAQICQKQVKYLGYLLKEGQRWLTEARKETVMGQPTPKTPRQLREFLGKAGFCRLFIPGFAEMAAPLYPLTKPGTLFEWGPDQQKAYQEIKQALLTAPALGLPDLTKPFELFVDEKQGYAKGVLTQKLGPWRRPVAYLSKKLDPVAAGWPPCLRMVAAIAVLTKDAGKLTMGQPLVILAPHAVEALVKQPPDRWLSNARMTHYQALLLDTDRVQFGPIVALNPATLLPLPEEGLQHDCLDILAEAHGTRPDLTDQPLPDADHTWYTDGSSFLQEGQRKAGAAVTTETEVVWAKALPAGTSAQRAELIALTQALKMAEGKKLNVYTDSRYAFATAHIHGEIYRRRGWLTSEGKEIKNKDEILALLKALFLPKRLSIIHCPGHQKGNRAEARGNRMADQAAREVATRETPETSTLLAGKRTADGSEFEKRTADGSEFESPKKKAKVE

SEQ ID NO: 2529 - protein, 2131 aa, synthetic construct
  source 1..2131: note = Description of Artificial Sequence: Synthetic polypeptide
MPAAKRVKLDGGDKKYSIGLDIGTNSVGWAVITDEYKVPSKKFKVLGNTDRHSIKKNLIGALLFDSGETAEATRLKRTARRRYTRRKNRICYLQEIFSNEMAKVDDSFFHRLEESFLVEEDKKHERHPIFGNIVDEVAYHEKYPTIYHLRKKLVDSTDKADLRLIYLALAHMIKFRGHFLIEGDLNPDNSDVDKLFIQLVQTYNQLFEENPINASGVDAKAILSARLSKSRRLENLIAQLPGEKKNGLFGNLIALSLGLTPNFKSNFDLAEDAKLQLSKDTYDDDLDNLLAQIGDQYADLFLAAKNLSDAILLSDILRVNTEITKAPLSASMIKRYDEHHQDLTLLKALVRQQLPEKYKEIFFDQSKNGYAGYIDGGASQEEFYKFIKPILEKMDGTEELLVKLNREDLLRKQRTFDNGSIPHQIHLGELHAILRRQEDFYPFLKDNREKIEKILTFRIPYYVGPLARGNSRFAWMTRKSEETITPWNFEEVVDKGASAQSFIERMTNFDKNLPNEKVLPKHSLLYEYFTVYNELTKVKYVTEGMRKPAFLSGEQKKAIVDLLFKTNRKVTVKQLKEDYFKKIECFDSVEISGVEDRFNASLGTYHDLLKIIKDKDFLDNEENEDILEDIVLTLTLFEDREMIEERLKTYAHLFDDKVMKQLKRRRYTGWGRLSRKLINGIRDKQSGKTILDFLKSDGFANRNFMQLIHDDSLTFKEDIQKAQVSGQGDSLHEHIANLAGSPAIKKGILQTVKVVDELVKVMGRHKPENIVIEMARENQTTQKGQKNSRERMKRIEEGIKELGSQILKEHPVENTQLQNEKLYLYYLQNGRDMYVDQELDINRLSDYDVDHIVPQSFLKDDSIDNKVLTRSDKARGKSDNVPSEEVVKKMKNYWRQLLNAKLITQRKFDNLTKAERGGLSELDKAGFIKRQLVETRQITKHVAQILDSRMNTKYDENDKLIREVKVITLKSKLVSDFRKDFQFYKVREINNYHHAHDAYLNAVVGTALIKKYPKLESEFVYGDYKVYDVRKMIAKSEQEIGKATAKYFFYSNIMNFFKTEITLANGEIRKRPLIETNGETGEIVWDKGRDFATVRKVLSMPQVNIVKKTEVQTGGFSKESILPKRNSDKLIARKKDWDPKKYGGFDSPTVAYSVLVVAKVEKGKSKKLKSVKELLGITIMERSSFEKNPIDFLEAKGYKEVKKDLIIKLPKYSLFELENGRKRMLASAGELQKGNELALPSKYVNFLYLASHYEKLKGSPEDNEQKQLFVEQHKHYLDEIIEQISEFSKRVILADANLDKVLSAYNKHRDKPIREQAENIIHLFTLTNLGAPAAFKYFDTTIDRKRYTSTKEVLDATLIHQSITGLYETRIDLSQLGGDGGAEAAAKEAAAKEAAAKEAAAKALEAEAAAKEAAAKEAAAKEAAAKAGGTLNIEDEYRLHETSKGPDVPLGSTWLSDFPQAWAETGGMGLAVRQAPLIIPLKATSTPVSIKQYPMSQEARLGIKPHIQRLLDQGILVPCQSPWNTPLLPVKKPGTNDYRPVQDLREVNKRVEDIHPTVPNPYNLLSGLPPSHQWYTVLDLKDAFFCLRLHPTSQSLFAFEWRDPEMGISGQLTWTRLPQGFKNSPTLFNEALHRDLADFRIQHPDLILLQYVDDLLLAATSELDCQQGTRALLQTLGDLGYRASAKKAQICQKQVKYLGYLLKEGQRWLTEARKETVMGQPTPKTPRQLREFLGKAGFCRLFIPGFAEMAAPLYPLTKPGTLFEWGPDQQKAYQEIKQALLTAPALGLPDLTKPFELFVDEKQGYAKGVLTQKLGPWRRPVAYLSKKLDPVAAGWPPCLRMVAAIAVLTKDAGKLTMGQPLVILAPHAVEALVKQPPDRWLSNARMTHYQALLLDTDRVQFGPIVALNPATLLPLPEEGLQHDCLDILAEAHGTRPDLTDQPLPDADHTWYTDGSSFLQEGQRKAGAAVTTETEVVWAKALPAGTSAQRAELIALTQALKMAEGKKLNVYTDSRYAFATAHIHGEIYRRRGWLTSEGKEIKNKDEILALLKALFLPKRLSIIHCPGHQKGNRAEARGNRMADQAAREVATRETPETSTLLAGKRTADGSEFEKRTADGSEFESPKKKAKVE

SEQ ID NO: 2530 - protein, 2096 aa, synthetic construct
  source 1..2096: note = Description of Artificial Sequence: Synthetic polypeptide
MPAAKRVKLDGGDKKYSIGLDIGTNSVGWAVITDEYKVPSKKFKVLGNTDRHSIKKNLIGALLFDSGETAEATRLKRTARRRYTRRKNRICYLQEIFSNEMAKVDDSFFHRLEESFLVEEDKKHERHPIFGNIVDEVAYHEKYPTIYHLRKKLVDSTDKADLRLIYLALAHMIKFRGHFLIEGDLNPDNSDVDKLFIQLVQTYNQLFEENPINASGVDAKAILSARLSKSRRLENLIAQLPGEKKNGLFGNLIALSLGLTPNFKSNFDLAEDAKLQLSKDTYDDDLDNLLAQIGDQYADLFLAAKNLSDAILLSDILRVNTEITKAPLSASMIKRYDEHHQDLTLLKALVRQQLPEKYKEIFFDQSKNGYAGYIDGGASQEEFYKFIKPILEKMDGTEELLVKLNREDLLRKQRTFDNGSIPHQIHLGELHAILRRQEDFYPFLKDNREKIEKILTFRIPYYVGPLARGNSRFAWMTRKSEETITPWNFEEVVDKGASAQSFIERMTNFDKNLPNEKVLPKHSLLYEYFTVYNELTKVKYVTEGMRKPAFLSGEQKKAIVDLLFKTNRKVTVKQLKEDYFKKIECFDSVEISGVEDRFNASLGTYHDLLKIIKDKDFLDNEENEDILEDIVLTLTLFEDREMIEERLKTYAHLFDDKVMKQLKRRRYTGWGRLSRKLINGIRDKQSGKTILDFLKSDGFANRNFMQLIHDDSLTFKEDIQKAQVSGQGDSLHEHIANLAGSPAIKKGILQTVKVVDELVKVMGRHKPENIVIEMARENQTTQKGQKNSRERMKRIEEGIKELGSQILKEHPVENTQLQNEKLYLYYLQNGRDMYVDQELDINRLSDYDVDHIVPQSFLKDDSIDNKVLTRSDKARGKSDNVPSEEVVKKMKNYWRQLLNAKLITQRKFDNLTKAERGGLSELDKAGFIKRQLVETRQITKHVAQILDSRMNTKYDENDKLIREVKVITLKSKLVSDFRKDFQFYKVREINNYHHAHDAYLNAVVGTALIKKYPKLESEFVYGDYKVYDVRKMIAKSEQEIGKATAKYFFYSNIMNFFKTEITLANGEIRKRPLIETNGETGEIVWDKGRDFATVRKVLSMPQVNIVKKTEVQTGGFSKESILPKRNSDKLIARKKDWDPKKYGGFDSPTVAYSVLVVAKVEKGKSKKLKSVKELLGITIMERSSFEKNPIDFLEAKGYKEVKKDLIIKLPKYSLFELENGRKRMLASAGELQKGNELALPSKYVNFLYLASHYEKLKGSPEDNEQKQLFVEQHKHYLDEIIEQISEFSKRVILADANLDKVLSAYNKHRDKPIREQAENIIHLFTLTNLGAPAAFKYFDTTIDRKRYTSTKEVLDATLIHQSITGLYETRIDLSQLGGDGGGGSEAAAKPAPGGTLNIEDEYRLHETSKGPDVPLGSTWLSDFPQAWAETGGMGLAVRQAPLIIPLKATSTPVSIKQYPMSQEARLGIKPHIQRLLDQGILVPCQSPWNTPLLPVKKPGTNDYRPVQDLREVNKRVEDIHPTVPNPYNLLSGLPPSHQWYTVLDLKDAFFCLRLHPTSQSLFAFEWRDPEMGISGQLTWTRLPQGFKNSPTLFNEALHRDLADFRIQHPDLILLQYVDDLLLAATSELDCQQGTRALLQTLGDLGYRASAKKAQICQKQVKYLGYLLKEGQRWLTEARKETVMGQPTPKTPRQLREFLGKAGFCRLFIPGFAEMAAPLYPLTKPGTLFEWGPDQQKAYQEIKQALLTAPALGLPDLTKPFELFVDEKQGYAKGVLTQKLGPWRRPVAYLSKKLDPVAAGWPPCLRMVAAIAVLTKDAGKLTMGQPLVILAPHAVEALVKQPPDRWLSNARMTHYQALLLDTDRVQFGPIVALNPATLLPLPEEGLQHDCLDILAEAHGTRPDLTDQPLPDADHTWYTDGSSFLQEGQRKAGAAVTTETEVVWAKALPAGTSAQRAELIALTQALKMAEGKKLNVYTDSRYAFATAHIHGEIYRRRGWLTSEGKEIKNKDEILALLKALFLPKRLSIIHCPGHQKGNRAEARGNRMADQAAREVATRETPETSTLLAGKRTADGSEFEKRTADGSEFESPKKKAKVE

SEQ ID NO: 2531 - protein, 2094 aa, synthetic construct
  source 1..2094: note = Description of Artificial Sequence: Synthetic polypeptide
MPAAKRVKLDGGDKKYSIGLDIGTNSVGWAVITDEYKVPSKKFKVLGNTDRHSIKKNLIGALLFDSGETAEATRLKRTARRRYTRRKNRICYLQEIFSNEMAKVDDSFFHRLEESFLVEEDKKHERHPIFGNIVDEVAYHEKYPTIYHLRKKLVDSTDKADLRLIYLALAHMIKFRGHFLIEGDLNPDNSDVDKLFIQLVQTYNQLFEENPINASGVDAKAILSARLSKSRRLENLIAQLPGEKKNGLFGNLIALSLGLTPNFKSNFDLAEDAKLQLSKDTYDDDLDNLLAQIGDQYADLFLAAKNLSDAILLSDILRVNTEITKAPLSASMIKRYDEHHQDLTLLKALVRQQLPEKYKEIFFDQSKNGYAGYIDGGASQEEFYKFIKPILEKMDGTEELLVKLNREDLLRKQRTFDNGSIPHQIHLGELHAILRRQEDFYPFLKDNREKIEKILTFRIPYYVGPLARGNSRFAWMTRKSEETITPWNFEEVVDKGASAQSFIERMTNFDKNLPNEKVLPKHSLLYEYFTVYNELTKVKYVTEGMRKPAFLSGEQKKAIVDLLFKTNRKVTVKQLKEDYFKKIECFDSVEISGVEDRFNASLGTYHDLLKIIKDKDFLDNEENEDILEDIVLTLTLFEDREMIEERLKTYAHLFDDKVMKQLKRRRYTGWGRLSRKLINGIRDKQSGKTILDFLKSDGFANRNFMQLIHDDSLTFKEDIQKAQVSGQGDSLHEHIANLAGSPAIKKGILQTVKVVDELVKVMGRHKPENIVIEMARENQTTQKGQKNSRERMKRIEEGIKELGSQILKEHPVENTQLQNEKLYLYYLQNGRDMYVDQELDINRLSDYDVDHIVPQSFLKDDSIDNKVLTRSDKARGKSDNVPSEEVVKKMKNYWRQLLNAKLITQRKFDNLTKAERGGLSELDKAGFIKRQLVETRQITKHVAQILDSRMNTKYDENDKLIREVKVITLKSKLVSDFRKDFQFYKVREINNYHHAHDAYLNAVVGTALIKKYPKLESEFVYGDYKVYDVRKMIAKSEQEIGKATAKYFFYSNIMNFFKTEITLANGEIRKRPLIETNGETGEIVWDKGRDFATVRKVLSMPQVNIVKKTEVQTGGFSKESILPKRNSDKLIARKKDWDPKKYGGFDSPTVAYSVLVVAKVEKGKSKKLKSVKELLGITIMERSSFEKNPIDFLEAKGYKEVKKDLIIKLPKYSLFELENGRKRMLASAGELQKGNELALPSKYVNFLYLASHYEKLKGSPEDNEQKQLFVEQHKHYLDEIIEQISEFSKRVILADANLDKVLSAYNKHRDKPIREQAENIIHLFTLTNLGAPAAFKYFDTTIDRKRYTSTKEVLDATLIHQSITGLYETRIDLSQLGGDGGPAPGSSGGGGGTLNIEDEYRLHETSKGPDVPLGSTWLSDFPQAWAETGGMGLAVRQAPLIIPLKATSTPVSIKQYPMSQEARLGIKPHIQRLLDQGILVPCQSPWNTPLLPVKKPGTNDYRPVQDLREVNKRVEDIHPTVPNPYNLLSGLPPSHQWYTVLDLKDAFFCLRLHPTSQSLFAFEWRDPEMGISGQLTWTRLPQGFKNSPTLFNEALHRDLADFRIQHPDLILLQYVDDLLLAATSELDCQQGTRALLQTLGDLGYRASAKKAQICQKQVKYLGYLLKEGQRWLTEARKETVMGQPTPKTPRQLREFLGKAGFCRLFIPGFAEMAAPLYPLTKPGTLFEWGPDQQKAYQEIKQALLTAPALGLPDLTKPFELFVDEKQGYAKGVLTQKLGPWRRPVAYLSKKLDPVAAGWPPCLRMVAAIAVLTKDAGKLTMGQPLVILAPHAVEALVKQPPDRWLSNARMTHYQALLLDTDRVQFGPIVALNPATLLPLPEEGLQHDCLDILAEAHGTRPDLTDQPLPDADHTWYTDGSSFLQEGQRKAGAAVTTETEVVWAKALPAGTSAQRAELIALTQALKMAEGKKLNVYTDSRYAFATAHIHGEIYRRRGWLTSEGKEIKNKDEILALLKALFLPKRLSIIHCPGHQKGNRAEARGNRMADQAAREVATRETPETSTLLAGKRTADGSEFEKRTADGSEFESPKKKAKVE

SEQ ID NO: 2532 - protein, 2100 aa, synthetic construct
  source 1..2100: note = Description of Artificial Sequence: Synthetic polypeptide
MPAAKRVKLDGGDKKYSIGLDIGTNSVGWAVITDEYKVPSKKFKVLGNTDRHSIKKNLIGALLFDSGETAEATRLKRTARRRYTRRKNRICYLQEIFSNEMAKVDDSFFHRLEESFLVEEDKKHERHPIFGNIVDEVAYHEKYPTIYHLRKKLVDSTDKADLRLIYLALAHMIKFRGHFLIEGDLNPDNSDVDKLFIQLVQTYNQLFEENPINASGVDAKAILSARLSKSRRLENLIAQLPGEKKNGLFGNLIALSLGLTPNFKSNFDLAEDAKLQLSKDTYDDDLDNLLAQIGDQYADLFLAAKNLSDAILLSDILRVNTEITKAPLSASMIKRYDEHHQDLTLLKALVRQQLPEKYKEIFFDQSKNGYAGYIDGGASQEEFYKFIKPILEKMDGTEELLVKLNREDLLRKQRTFDNGSIPHQIHLGELHAILRRQEDFYPFLKDNREKIEKILTFRIPYYVGPLARGNSRFAWMTRKSEETITPWNFEEVVDKGASAQSFIERMTNFDKNLPNEKVLPKHSLLYEYFTVYNELTKVKYVTEGMRKPAFLSGEQKKAIVDLLFKTNRKVTVKQLKEDYFKKIECFDSVEISGVEDRFNASLGTYHDLLKIIKDKDFLDNEENEDILEDIVLTLTLFEDREMIEERLKTYAHLFDDKVMKQLKRRRYTGWGRLSRKLINGIRDKQSGKTILDFLKSDGFANRNFMQLIHDDSLTFKEDIQKAQVSGQGDSLHEHIANLAGSPAIKKGILQTVKVVDELVKVMGRHKPENIVIEMARENQTTQKGQKNSRERMKRIEEGIKELGSQILKEHPVENTQLQNEKLYLYYLQNGRDMYVDQELDINRLSDYDVDHIVPQSFLKDDSIDNKVLTRSDKARGKSDNVPSEEVVKKMKNYWRQLLNAKLITQRKFDNLTKAERGGLSELDKAGFIKRQLVETRQITKHVAQILDSRMNTKYDENDKLIREVKVITLKSKLVSDFRKDFQFYKVREINNYHHAHDAYLNAVVGTALIKKYPKLESEFVYGDYKVYDVRKMIAKSEQEIGKATAKYFFYSNIMNFFKTEITLANGEIRKRPLIETNGETGEIVWDKGRDFATVRKVLSMPQVNIVKKTEVQTGGFSKESILPKRNSDKLIARKKDWDPKKYGGFDSPTVAYSVLVVAKVEKGKSKKLKSVKELLGITIMERSSFEKNPIDFLEAKGYKEVKKDLIIKLPKYSLFELENGRKRMLASAGELQKGNELALPSKYVNFLYLASHYEKLKGSPEDNEQKQLFVEQHKHYLDEIIEQISEFSKRVILADANLDKVLSAYNKHRDKPIREQAENIIHLFTLTNLGAPAAFKYFDTTIDRKRYTSTKEVLDATLIHQSITGLYETRIDLSQLGGDGGGSSGSSGSSGSSGSSGGTLNIEDEYRLHETSKGPDVPLGSTWLSDFPQAWAETGGMGLAVRQAPLIIPLKATSTPVSIKQYPMSQEARLGIKPHIQRLLDQGILVPCQSPWNTPLLPVKKPGTNDYRPVQDLREVNKRVEDIHPTVPNPYNLLSGLPPSHQWYTVLDLKDAFFCLRLHPTSQSLFAFEWRDPEMGISGQLTWTRLPQGFKNSPTLFNEALHRDLADFRIQHPDLILLQYVDDLLLAATSELDCQQGTRALLQTLGDLGYRASAKKAQICQKQVKYLGYLLKEGQRWLTEARKETVMGQPTPKTPRQLREFLGKAGFCRLFIPGFAEMAAPLYPLTKPGTLFEWGPDQQKAYQEIKQALLTAPALGLPDLTKPFELFVDEKQGYAKGVLTQKLGPWRRPVAYLSKKLDPVAAGWPPCLRMVAAIAVLTKDAGKLTMGQPLVILAPHAVEALVKQPPDRWLSNARMTHYQALLLDTDRVQFGPIVALNPATLLPLPEEGLQHDCLDILAEAHGTRPDLTDQPLPDADHTWYTDGSSFLQEGQRKAGAAVTTETEVVWAKALPAGTSAQRAELIALTQALKMAEGKKLNVYTDSRYAFATAHIHGEIYRRRGWLTSEGKEIKNKDEILALLKALFLPKRLSIIHCPGHQKGNRAEARGNRMADQAAREVATRETPETSTLLAGKRTADGSEFEKRTADGSEFESPKKKAKVE

SEQ ID NO: 2533 - protein, 2094 aa, synthetic construct
  source 1..2094: note = Description of Artificial Sequence: Synthetic polypeptide
MPAAKRVKLDGGDKKYSIGLDIGTNSVGWAVITDEYKVPSKKFKVLGNTDRHSIKKNLIGALLFDSGETAEATRLKRTARRRYTRRKNRICYLQEIFSNEMAKVDDSFFHRLEESFLVEEDKKHERHPIFGNIVDEVAYHEKYPTIYHLRKKLVDSTDKADLRLIYLALAHMIKFRGHFLIEGDLNPDNSDVDKLFIQLVQTYNQLFEENPINASGVDAKAILSARLSKSRRLENLIAQLPGEKKNGLFGNLIALSLGLTPNFKSNFDLAEDAKLQLSKDTYDDDLDNLLAQIGDQYADLFLAAKNLSDAILLSDILRVNTEITKAPLSASMIKRYDEHHQDLTLLKALVRQQLPEKYKEIFFDQSKNGYAGYIDGGASQEEFYKFIKPILEKMDGTEELLVKLNREDLLRKQRTFDNGSIPHQIHLGELHAILRRQEDFYPFLKDNREKIEKILTFRIPYYVGPLARGNSRFAWMTRKSEETITPWNFEEVVDKGASAQSFIERMTNFDKNLPNEKVLPKHSLLYEYFTVYNELTKVKYVTEGMRKPAFLSGEQKKAIVDLLFKTNRKVTVKQLKEDYFKKIECFDSVEISGVEDRFNASLGTYHDLLKIIKDKDFLDNEENEDILEDIVLTLTLFEDREMIEERLKTYAHLFDDKVMKQLKRRRYTGWGRLSRKLINGIRDKQSGKTILDFLKSDGFANRNFMQLIHDDSLTFKEDIQKAQVSGQGDSLHEHIANLAGSPAIKKGILQTVKVVDELVKVMGRHKPENIVIEMARENQTTQKGQKNSRERMKRIEEGIKELGSQILKEHPVENTQLQNEKLYLYYLQNGRDMYVDQELDINRLSDYDVDHIVPQSFLKDDSIDNKVLTRSDKARGKSDNVPSEEVVKKMKNYWRQLLNAKLITQRKFDNLTKAERGGLSELDKAGFIKRQLVETRQITKHVAQILDSRMNTKYDENDKLIREVKVITLKSKLVSDFRKDFQFYKVREINNYHHAHDAYLNAVVGTALIKKYPKLESEFVYGDYKVYDVRKMIAKSEQEIGKATAKYFFYSNIMNFFKTEITLANGEIRKRPLIETNGETGEIVWDKGRDFATVRKVLSMPQVNIVKKTEVQTGGFSKESILPKRNSDKLIARKKDWDPKKYGGFDSPTVAYSVLVVAKVEKGKSKKLKSVKELLGITIMERSSFEKNPIDFLEAKGYKEVKKDLIIKLPKYSLFELENGRKRMLASAGELQKGNELALPSKYVNFLYLASHYEKLKGSPEDNEQKQLFVEQHKHYLDEIIEQISEFSKRVILADANLDKVLSAYNKHRDKPIREQAENIIHLFTLTNLGAPAAFKYFDTTIDRKRYTSTKEVLDATLIHQSITGLYETRIDLSQLGGDGGPAPGGSGSSGGTLNIEDEYRLHETSKGPDVPLGSTWLSDFPQAWAETGGMGLAVRQAPLIIPLKATSTPVSIKQYPMSQEARLGIKPHIQRLLDQGILVPCQSPWNTPLLPVKKPGTNDYRPVQDLREVNKRVEDIHPTVPNPYNLLSGLPPSHQWYTVLDLKDAFFCLRLHPTSQSLFAFEWRDPEMGISGQLTWTRLPQGFKNSPTLFNEALHRDLADFRIQHPDLILLQYVDDLLLAATSELDCQQGTRALLQTLGDLGYRASAKKAQICQKQVKYLGYLLKEGQRWLTEARKETVMGQPTPKTPRQLREFLGKAGFCRLFIPGFAEMAAPLYPLTKPGTLFEWGPDQQKAYQEIKQALLTAPALGLPDLTKPFELFVDEKQGYAKGVLTQKLGPWRRPVAYLSKKLDPVAAGWPPCLRMVAAIAVLTKDAGKLTMGQPLVILAPHAVEALVKQPPDRWLSNARMTHYQALLLDTDRVQFGPIVALNPATLLPLPEEGLQHDCLDILAEAHGTRPDLTDQPLPDADHTWYTDGSSFLQEGQRKAGAAVTTETEVVWAKALPAGTSAQRAELIALTQALKMAEGKKLNVYTDSRYAFATAHIHGEIYRRRGWLTSEGKEIKNKDEILALLKALFLPKRLSIIHCPGHQKGNRAEARGNRMADQAAREVATRETPETSTLLAGKRTADGSEFEKRTADGSEFESPKKKAKVE

SEQ ID NO: 2534 - protein, 2098 aa, synthetic construct
  source 1..2098: note = Description of Artificial Sequence: Synthetic polypeptide
MPAAKRVKLDGGDKKYSIGLDIGTNSVGWAVITDEYKVPSKKFKVLGNTDRHSIKKNLIGALLFDSGETAEATRLKRTARRRYTRRKNRICYLQEIFSNEMAKVDDSFFHRLEESFLVEEDKKHERHPIFGNIVDEVAYHEKYPTIYHLRKKLVDSTDKADLRLIYLALAHMIKFRGHFLIEGDLNPDNSDVDKLFIQLVQTYNQLFEENPINASGVDAKAILSARLSKSRRLENLIAQLPGEKKNGLFGNLIALSLGLTPNFKSNFDLAEDAKLQLSKDTYDDDLDNLLAQIGDQYADLFLAAKNLSDAILLSDILRVNTEITKAPLSASMIKRYDEHHQDLTLLKALVRQQLPEKYKEIFFDQSKNGYAGYIDGGASQEEFYKFIKPILEKMDGTEELLVKLNREDLLRKQRTFDNGSIPHQIHLGELHAILRRQEDFYPFLKDNREKIEKILTFRIPYYVGPLARGNSRFAWMTRKSEETITPWNFEEVVDKGASAQSFIERMTNFDKNLPNEKVLPKHSLLYEYFTVYNELTKVKYVTEGMRKPAFLSGEQKKAIVDLLFKTNRKVTVKQLKEDYFKKIECFDSVEISGVEDRFNASLGTYHDLLKIIKDKDFLDNEENEDILEDIVLTLTLFEDREMIEERLKTYAHLFDDKVMKQLKRRRYTGWGRLSRKLINGIRDKQSGKTILDFLKSDGFANRNFMQLIHDDSLTFKEDIQKAQVSGQGDSLHEHIANLAGSPAIKKGILQTVKVVDELVKVMGRHKPENIVIEMARENQTTQKGQKNSRERMKRIEEGIKELGSQILKEHPVENTQLQNEKLYLYYLQNGRDMYVDQELDINRLSDYDVDHIVPQSFLKDDSIDNKVLTRSDKARGKSDNVPSEEVVKKMKNYWRQLLNAKLITQRKFDNLTKAERGGLSELDKAGFIKRQLVETRQITKHVAQILDSRMNTKYDENDKLIREVKVITLKSKLVSDFRKDFQFYKVREINNYHHAHDAYLNAVVGTALIKKYPKLESEFVYGDYKVYDVRKMIAKSEQEIGKATAKYFFYSNIMNFFKTEITLANGEIRKRPLIETNGETGEIVWDKGRDFATVRKVLSMPQVNIVKKTEVQTGGFSKESILPKRNSDKLIARKKDWDPKKYGGFDSPTVAYSVLVVAKVEKGKSKKLKSVKELLGITIMERSSFEKNPIDFLEAKGYKEVKKDLIIKLPKYSLFELENGRKRMLASAGELQKGNELALPSKYVNFLYLASHYEKLKGSPEDNEQKQLFVEQHKHYLDEIIEQISEFSKRVILADANLDKVLSAYNKHRDKPIREQAENIIHLFTLTNLGAPAAFKYFDTTIDRKRYTSTKEVLDATLIHQSITGLYETRIDLSQLGGDGGPAPAPAPAPAPAPGGTLNIEDEYRLHETSKGPDVPLGSTWLSDFPQAWAETGGMGLAVRQAPLIIPLKATSTPVSIKQYPMSQEARLGIKPHIQRLLDQGILVPCQSPWNTPLLPVKKPGTNDYRPVQDLREVNKRVEDIHPTVPNPYNLLSGLPPSHQWYTVLDLKDAFFCLRLHPTSQSLFAFEWRDPEMGISGQLTWTRLPQGFKNSPTLFNEALHRDLADFRIQHPDLILLQYVDDLLLAATSELDCQQGTRALLQTLGDLGYRASAKKAQICQKQVKYLGYLLKEGQRWLTEARKETVMGQPTPKTPRQLREFLGKAGFCRLFIPGFAEMAAPLYPLTKPGTLFEWGPDQQKAYQEIKQALLTAPALGLPDLTKPFELFVDEKQGYAKGVLTQKLGPWRRPVAYLSKKLDPVAAGWPPCLRMVAAIAVLTKDAGKLTMGQPLVILAPHAVEALVKQPPDRWLSNARMTHYQALLLDTDRVQFGPIVALNPATLLPLPEEGLQHDCLDILAEAHGTRPDLTDQPLPDADHTWYTDGSSFLQEGQRKAGAAVTTETEVVWAKALPAGTSAQRAELIALTQALKMAEGKKLNVYTDSRYAFATAHIHGEIYRRRGWLTSEGKEIKNKDEILALLKALFLPKRLSIIHCPGHQKGNRAEARGNRMADQAAREVATRETPETSTLLAGKRTADGSEFEKRTADGSEFESPKKKAKVE

SEQ ID NO: 2535 - protein, 2096 aa, synthetic construct
  source 1..2096: note = Description of Artificial Sequence: Synthetic polypeptide
MPAAKRVKLDGGDKKYSIGLDIGTNSVGWAVITDEYKVPSKKFKVLGNTDRHSIKKNLIGALLFDSGETAEATRLKRTARRRYTRRKNRICYLQEIFSNEMAKVDDSFFHRLEESFLVEEDKKHERHPIFGNIVDEVAYHEKYPTIYHLRKKLVDSTDKADLRLIYLALAHMIKFRGHFLIEGDLNPDNSDVDKLFIQLVQTYNQLFEENPINASGVDAKAILSARLSKSRRLENLIAQLPGEKKNGLFGNLIALSLGLTPNFKSNFDLAEDAKLQLSKDTYDDDLDNLLAQIGDQYADLFLAAKNLSDAILLSDILRVNTEITKAPLSASMIKRYDEHHQDLTLLKALVRQQLPEKYKEIFFDQSKNGYAGYIDGGASQEEFYKFIKPILEKMDGTEELLVKLNREDLLRKQRTFDNGSIPHQIHLGELHAILRRQEDFYPFLKDNREKIEKILTFRIPYYVGPLARGNSRFAWMTRKSEETITPWNFEEVVDKGASAQSFIERMTNFDKNLPNEKVLPKHSLLYEYFTVYNELTKVKYVTEGMRKPAFLSGEQKKAIVDLLFKTNRKVTVKQLKEDYFKKIECFDSVEISGVEDRFNASLGTYHDLLKIIKDKDFLDNEENEDILEDIVLTLTLFEDREMIEERLKTYAHLFDDKVMKQLKRRRYTGWGRLSRKLINGIRDKQSGKTILDFLKSDGFANRNFMQLIHDDSLTFKEDIQKAQVSGQGDSLHEHIANLAGSPAIKKGILQTVKVVDELVKVMGRHKPENIVIEMARENQTTQKGQKNSRERMKRIEEGIKELGSQILKEHPVENTQLQNEKLYLYYLQNGRDMYVDQELDINRLSDYDVDHIVPQSFLKDDSIDNKVLTRSDKARGKSDNVPSEEVVKKMKNYWRQLLNAKLITQRKFDNLTKAERGGLSELDKAGFIKRQLVETRQITKHVAQILDSRMNTKYDENDKLIREVKVITLKSKLVSDFRKDFQFYKVREINNYHHAHDAYLNAVVGTALIKKYPKLESEFVYGDYKVYDVRKMIAKSEQEIGKATAKYFFYSNIMNFFKTEITLANGEIRKRPLIETNGETGEIVWDKGRDFATVRKVLSMPQVNIVKKTEVQTGGFSKESILPKRNSDKLIARKKDWDPKKYGGFDSPTVAYSVLVVAKVEKGKSKKLKSVKELLGITIMERSSFEKNPIDFLEAKGYKEVKKDLIIKLPKYSLFELENGRKRMLASAGELQKGNELALPSKYVNFLYLASHYEKLKGSPEDNEQKQLFVEQHKHYLDEIIEQISEFSKRVILADANLDKVLSAYNKHRDKPIREQAENIIHLFTLTNLGAPAAFKYFDTTIDRKRYTSTKEVLDATLIHQSITGLYETRIDLSQLGGDGGGSSEAAAKPAPGGTLNIEDEYRLHETSKGPDVPLGSTWLSDFPQAWAETGGMGLAVRQAPLIIPLKATSTPVSIKQYPMSQEARLGIKPHIQRLLDQGILVPCQSPWNTPLLPVKKPGTNDYRPVQDLREVNKRVEDIHPTVPNPYNLLSGLPPSHQWYTVLDLKDAFFCLRLHPTSQSLFAFEWRDPEMGISGQLTWTRLPQGFKNSPTLFNEALHRDLADFRIQHPDLILLQYVDDLLLAATSELDCQQGTRALLQTLGDLGYRASAKKAQICQKQVKYLGYLLKEGQRWLTEARKETVMGQPTPKTPRQLREFLGKAGFCRLFIPGFAEMAAPLYPLTKPGTLFEWGPDQQKAYQEIKQALLTAPALGLPDLTKPFELFVDEKQGYAKGVLTQKLGPWRRPVAYLSKKLDPVAAGWPPCLRMVAAIAVLTKDAGKLTMGQPLVILAPHAVEALVKQPPDRWLSNARMTHYQALLLDTDRVQFGPIVALNPATLLPLPEEGLQHDCLDILAEAHGTRPDLTDQPLPDADHTWYTDGSSFLQEGQRKAGAAVTTETEVVWAKALPAGTSAQRAELIALTQALKMAEGKKLNVYTDSRYAFATAHIHGEIYRRRGWLTSEGKEIKNKDEILALLKALFLPKRLSIIHCPGHQKGNRAEARGNRMADQAAREVATRETPETSTLLAGKRTADGSEFEKRTADGSEFESPKKKAKVE

SEQ ID NO: 2536 - protein, 2110 aa, synthetic construct
  source 1..2110: note = Description of Artificial Sequence: Synthetic polypeptide
MPAAKRVKLDGGDKKYSIGLDIGTNSVGWAVITDEYKVPSKKFKVLGNTDRHSIKKNLIGALLFDSGETAEATRLKRTARRRYTRRKNRICYLQEIFSNEMAKVDDSFFHRLEESFLVEEDKKHERHPIFGNIVDEVAYHEKYPTIYHLRKKLVDSTDKADLRLIYLALAHMIKFRGHFLIEGDLNPDNSDVDKLFIQLVQTYNQLFEENPINASGVDAKAILSARLSKSRRLENLIAQLPGEKKNGLFGNLIALSLGLTPNFKSNFDLAEDAKLQLSKDTYDDDLDNLLAQIGDQYADLFLAAKNLSDAILLSDILRVNTEITKAPLSASMIKRYDEHHQDLTLLKALVRQQLPEKYKEIFFDQSKNGYAGYIDGGASQEEFYKFIKPILEKMDGTEELLVKLNREDLLRKQRTFDNGSIPHQIHLGELHAILRRQEDFYPFLKDNREKIEKILTFRIPYYVGPLARGNSRFAWMTRKSEETITPWNFEEVVDKGASAQSFIERMTNFDKNLPNEKVLPKHSLLYEYFTVYNELTKVKYVTEGMRKPAFLSGEQKKAIVDLLFKTNRKVTVKQLKEDYFKKIECFDSVEISGVEDRFNASLGTYHDLLKIIKDKDFLDNEENEDILEDIVLTLTLFEDREMIEERLKTYAHLFDDKVMKQLKRRRYTGWGRLSRKLINGIRDKQSGKTILDFLKSDGFANRNFMQLIHDDSLTFKEDIQKAQVSGQGDSLHEHIANLAGSPAIKKGILQTVKVVDELVKVMGRHKPENIVIEMARENQTTQKGQKNSRERMKRIEEGIKELGSQILKEHPVENTQLQNEKLYLYYLQNGRDMYVDQELDINRLSDYDVDHIVPQSFLKDDSIDNKVLTRSDKARGKSDNVPSEEVVKKMKNYWRQLLNAKLITQRKFDNLTKAERGGLSELDKAGFIKRQLVETRQITKHVAQILDSRMNTKYDENDKLIREVKVITLKSKLVSDFRKDFQFYKVREINNYHHAHDAYLNAVVGTALIKKYPKLESEFVYGDYKVYDVRKMIAKSEQEIGKATAKYFFYSNIMNFFKTEITLANGEIRKRPLIETNGETGEIVWDKGRDFATVRKVLSMPQVNIVKKTEVQTGGFSKESILPKRNSDKLIARKKDWDPKKYGGFDSPTVAYSVLVVAKVEKGKSKKLKSVKELLGITIMERSSFEKNPIDFLEAKGYKEVKKDLIIKLPKYSLFELENGRKRMLASAGELQKGNELALPSKYVNFLYLASHYEKLKGSPEDNEQKQLFVEQHKHYLDEIIEQISEFSKRVILADANLDKVLSAYNKHRDKPIREQAENIIHLFTLTNLGAPAAFKYFDTTIDRKRYTSTKEVLDATLIHQSITGLYETRIDLSQLGGDGGEAAAKEAAAKEAAAKEAAAKEAAAKGGTLNIEDEYRLHETSKGPDVPLGSTWLSDFPQAWAETGGMGLAVRQAPLIIPLKATSTPVSIKQYPMSQEARLGIKPHIQRLLDQGILVPCQSPWNTPLLPVKKPGTNDYRPVQDLREVNKRVEDIHPTVPNPYNLLSGLPPSHQWYTVLDLKDAFFCLRLHPTSQSLFAFEWRDPEMGISGQLTWTRLPQGFKNSPTLFNEALHRDLADFRIQHPDLILLQYVDDLLLAATSELDCQQGTRALLQTLGDLGYRASAKKAQICQKQVKYLGYLLKEGQRWLTEARKETVMGQPTPKTPRQLREFLGKAGFCRLFIPGFAEMAAPLYPLTKPGTLFEWGPDQQKAYQEIKQALLTAPALGLPDLTKPFELFVDEKQGYAKGVLTQKLGPWRRPVAYLSKKLDPVAAGWPPCLRMVAAIAVLTKDAGKLTMGQPLVILAPHAVEALVKQPPDRWLSNARMTHYQALLLDTDRVQFGPIVALNPATLLPLPEEGLQHDCLDILAEAHGTRPDLTDQPLPDADHTWYTDGSSFLQEGQRKAGAAVTTETEVVWAKALPAGTSAQRAELIALTQALKMAEGKKLNVYTDSRYAFATAHIHGEIYRRRGWLTSEGKEIKNKDEILALLKALFLPKRLSIIHCPGHQKGNRAEARGNRMADQAAREVATRETPETSTLLAGKRTADGSEFEKRTADGSEFESPKKKAKVE

SEQ ID NO: 2537 - protein, 2097 aa, synthetic construct
  source 1..2097: note = Description of Artificial Sequence: Synthetic polypeptide
MPAAKRVKLDGGDKKYSIGLDIGTNSVGWAVITDEYKVPSKKFKVLGNTDRHSIKKNLIGALLFDSGETAEATRLKRTARRRYTRRKNRICYLQEIFSNEMAKVDDSFFHRLEESFLVEEDKKHERHPIFGNIVDEVAYHEKYPTIYHLRKKLVDSTDKADLRLIYLALAHMIKFRGHFLIEGDLNPDNSDVDKLFIQLVQTYNQLFEENPINASGVDAKAILSARLSKSRRLENLIAQLPGEKKNGLFGNLIALSLGLTPNFKSNFDLAEDAKLQLSKDTYDDDLDNLLAQIGDQYADLFLAAKNLSDAILLSDILRVNTEITKAPLSASMIKRYDEHHQDLTLLKALVRQQLPEKYKEIFFDQSKNGYAGYIDGGASQEEFYKFIKPILEKMDGTEELLVKLNREDLLRKQRTFDNGSIPHQIHLGELHAILRRQEDFYPFLKDNREKIEKILTFRIPYYVGPLARGNSRFAWMTRKSEETITPWNFEEVVDKGASAQSFIERMTNFDKNLPNEKVLPKHSLLYEYFTVYNELTKVKYVTEGMRKPAFLSGEQKKAIVDLLFKTNRKVTVKQLKEDYFKKIECFDSVEISGVEDRFNASLGTYHDLLKIIKDKDFLDNEENEDILEDIVLTLTLFEDREMIEERLKTYAHLFDDKVMKQLKRRRYTGWGRLSRKLINGIRDKQSGKTILDFLKSDGFANRNFMQLIHDDSLTFKEDIQKAQVSGQGDSLHEHIANLAGSPAIKKGILQTVKVVDELVKVMGRHKPENIVIEMARENQTTQKGQKNSRERMKRIEEGIKELGSQILKEHPVENTQLQNEKLYLYYLQNGRDMYVDQELDINRLSDYDVDHIVPQSFLKDDSIDNKVLTRSDKARGKSDNVPSEEVVKKMKNYWRQLLNAKLITQRKFDNLTKAERGGLSELDKAGFIKRQLVETRQITKHVAQILDSRMNTKYDENDKLIREVKVITLKSKLVSDFRKDFQFYKVREINNYHHAHDAYLNAVVGTALIKKYPKLESEFVYGDYKVYDVRKMIAKSEQEIGKATAKYFFYSNIMNFFKTEITLANGEIRKRPLIETNGETGEIVWDKGRDFATVRKVLSMPQVNIVKKTEVQTGGFSKESILPKRNSDKLIARKKDWDPKKYGGFDSPTVAYSVLVVAKVEKGKSKKLKSVKELLGITIMERSSFEKNPIDFLEAKGYKEVKKDLIIKLPKYSLFELENGRKRMLASAGELQKGNELALPSKYVNFLYLASHYEKLKGSPEDNEQKQLFVEQHKHYLDEIIEQISEFSKRVILADANLDKVLSAYNKHRDKPIREQAENIIHLFTLTNLGAPAAFKYFDTTIDRKRYTSTKEVLDATLIHQSITGLYETRIDLSQLGGDGGGSSGSSGSSGSSGGTLNIEDEYRLHETSKGPDVPLGSTWLSDFPQAWAETGGMGLAVRQAPLIIPLKATSTPVSIKQYPMSQEARLGIKPHIQRLLDQGILVPCQSPWNTPLLPVKKPGTNDYRPVQDLREVNKRVEDIHPTVPNPYNLLSGLPPSHQWYTVLDLKDAFFCLRLHPTSQSLFAFEWRDPEMGISGQLTWTRLPQGFKNSPTLFNEALHRDLADFRIQHPDLILLQYVDDLLLAATSELDCQQGTRALLQTLGDLGYRASAKKAQICQKQVKYLGYLLKEGQRWLTEARKETVMGQPTPKTPRQLREFLGKAGFCRLFIPGFAEMAAPLYPLTKPGTLFEWGPDQQKAYQEIKQALLTAPALGLPDLTKPFELFVDEKQGYAKGVLTQKLGPWRRPVAYLSKKLDPVAAGWPPCLRMVAAIAVLTKDAGKLTMGQPLVILAPHAVEALVKQPPDRWLSNARMTHYQALLLDTDRVQFGPIVALNPATLLPLPEEGLQHDCLDILAEAHGTRPDLTDQPLPDADHTWYTDGSSFLQEGQRKAGAAVTTETEVVWAKALPAGTSAQRAELIALTQALKMAEGKKLNVYTDSRYAFATAHIHGEIYRRRGWLTSEGKEIKNKDEILALLKALFLPKRLSIIHCPGHQKGNRAEARGNRMADQAAREVATRETPETSTLLAGKRTADGSEFEKRTADGSEFESPKKKAKVE

SEQ ID NO: 2538 - protein, 2096 aa, synthetic construct
  source 1..2096: note = Description of Artificial Sequence: Synthetic polypeptide
MPAAKRVKLDGGDKKYSIGLDIGTNSVGWAVITDEYKVPSKKFKVLGNTDRHSIKKNLIGALLFDSGETAEATRLKRTARRRYTRRKNRICYLQEIFSNEMAKVDDSFFHRLEESFLVEEDKKHERHPIFGNIVDEVAYHEKYPTIYHLRKKLVDSTDKADLRLIYLALAHMIKFRGHFLIEGDLNPDNSDVDKLFIQLVQTYNQLFEENPINASGVDAKAILSARLSKSRRLENLIAQLPGEKKNGLFGNLIALSLGLTPNFKSNFDLAEDAKLQLSKDTYDDDLDNLLAQIGDQYADLFLAAKNLSDAILLSDILRVNTEITKAPLSASMIKRYDEHHQDLTLLKALVRQQLPEKYKEIFFDQSKNGYAGYIDGGASQEEFYKFIKPILEKMDGTEELLVKLNREDLLRKQRTFDNGSIPHQIHLGELHAILRRQEDFYPFLKDNREKIEKILTFRIPYYVGPLARGNSRFAWMTRKSEETITPWNFEEVVDKGASAQSFIERMTNFDKNLPNEKVLPKHSLLYEYFTVYNELTKVKYVTEGMRKPAFLSGEQKKAIVDLLFKTNRKVTVKQLKEDYFKKIECFDSVEISGVEDRFNASLGTYHDLLKIIKDKDFLDNEENEDILEDIVLTLTLFEDREMIEERLKTYAHLFDDKVMKQLKRRRYTGWGRLSRKLINGIRDKQSGKTILDFLKSDGFANRNFMQLIHDDSLTFKEDIQKAQVSGQGDSLHEHIANLAGSPAIKKGILQTVKVVDELVKVMGRHKPENIVIEMARENQTTQKGQKNSRERMKRIEEGIKELGSQILKEHPVENTQLQNEKLYLYYLQNGRDMYVDQELDINRLSDYDVDHIVPQSFLKDDSIDNKVLTRSDKARGKSDNVPSEEVVKKMKNYWRQLLNAKLITQRKFDNLTKAERGGLSELDKAGFIKRQLVETRQITKHVAQILDSRMNTKYDENDKLIREVKVITLKSKLVSDFRKDFQFYKVREINNYHHAHDAYLNAVVGTALIKKYPKLESEFVYGDYKVYDVRKMIAKSEQEIGKATAKYFFYSNIMNFFKTEITLANGEIRKRPLIETNGETGEIVWDKGRDFATVRKVLSMPQVNIVKKTEVQTGGFSKESILPKRNSDKLIARKKDWDPKKYGGFDSPTVAYSVLVVAKVEKGKSKKLKSVKELLGITIMERSSFEKNPIDFLEAKGYKEVKKDLIIKLPKYSLFELENGRKRMLASAGELQKGNELALPSKYVNFLYLASHYEKLKGSPEDNEQKQLFVEQHKHYLDEIIEQISEFSKRVILADANLDKVLSAYNKHRDKPIREQAENIIHLFTLTNLGAPAAFKYFDTTIDRKRYTSTKEVLDATLIHQSITGLYETRIDLSQLGGDGGGGSGSSEAAAKGGTLNIEDEYRLHETSKGPDVPLGSTWLSDFPQAWAETGGMGLAVRQAPLIIPLKATSTPVSIKQYPMSQEARLGIKPHIQRLLDQGILVPCQSPWNTPLLPVKKPGTNDYRPVQDLREVNKRVEDIHPTVPNPYNLLSGLPPSHQWYTVLDLKDAFFCLRLHPTSQSLFAFEWRDPEMGISGQLTWTRLPQGFKNSPTLFNEALHRDLADFRIQHPDLILLQYVDDLLLAATSELDCQQGTRALLQTLGDLGYRASAKKAQICQKQVKYLGYLLKEGQRWLTEARKETVMGQPTPKTPRQLREFLGKAGFCRLFIPGFAEMAAPLYPLTKPGTLFEWGPDQQKAYQEIKQALLTAPALGLPDLTKPFELFVDEKQGYAKGVLTQKLGPWRRPVAYLSKKLDPVAAGWPPCLRMVAAIAVLTKDAGKLTMGQPLVILAPHAVEALVKQPPDRWLSNARMTHYQALLLDTDRVQFGPIVALNPATLLPLPEEGLQHDCLDILAEAHGTRPDLTDQPLPDADHTWYTDGSSFLQEGQRKAGAAVTTETEVVWAKALPAGTSAQRAELIALTQALKMAEGKKLNVYTDSRYAFATAHIHGEIYRRRGWLTSEGKEIKNKDEILALLKALFLPKRLSIIHCPGHQKGNRAEARGNRMADQAAREVATRETPETSTLLAGKRTADGSEFEKRTADGSEFESPKKKAKVE

SEQ ID NO: 2539 - protein, 2090 aa, synthetic construct
  source 1..2090: note = Description of Artificial Sequence: Synthetic polypeptide
MPAAKRVKLDGGDKKYSIGLDIGTNSVGWAVITDEYKVPSKKFKVLGNTDRHSIKKNLIGALLFDSGETAEATRLKRTARRRYTRRKNRICYLQEIFSNEMAKVDDSFFHRLEESFLVEEDKKHERHPIFGNIVDEVAYHEKYPTIYHLRKKLVDSTDKADLRLIYLALAHMIKFRGHFLIEGDLNPDNSDVDKLFIQLVQTYNQLFEENPINASGVDAKAILSARLSKSRRLENLIAQLPGEKKNGLFGNLIALSLGLTPNFKSNFDLAEDAKLQLSKDTYDDDLDNLLAQIGDQYADLFLAAKNLSDAILLSDILRVNTEITKAPLSASMIKRYDEHHQDLTLLKALVRQQLPEKYKEIFFDQSKNGYAGYIDGGASQEEFYKFIKPILEKMDGTEELLVKLNREDLLRKQRTFDNGSIPHQIHLGELHAILRRQEDFYPFLKDNREKIEKILTFRIPYYVGPLARGNSRFAWMTRKSEETITPWNFEEVVDKGASAQSFIERMTNFDKNLPNEKVLPKHSLLYEYFTVYNELTKVKYVTEGMRKPAFLSGEQKKAIVDLLFKTNRKVTVKQLKEDYFKKIECFDSVEISGVEDRFNASLGTYHDLLKIIKDKDFLDNEENEDILEDIVLTLTLFEDREMIEERLKTYAHLFDDKVMKQLKRRRYTGWGRLSRKLINGIRDKQSGKTILDFLKSDGFANRNFMQLIHDDSLTFKEDIQKAQVSGQGDSLHEHIANLAGSPAIKKGILQTVKVVDELVKVMGRHKPENIVIEMARENQTTQKGQKNSRERMKRIEEGIKELGSQILKEHPVENTQLQNEKLYLYYLQNGRDMYVDQELDINRLSDYDVDHIVPQSFLKDDSIDNKVLTRSDKARGKSDNVPSEEVVKKMKNYWRQLLNAKLITQRKFDNLTKAERGGLSELDKAGFIKRQLVETRQITKHVAQILDSRMNTKYDENDKLIREVKVITLKSKLVSDFRKDFQFYKVREINNYHHAHDAYLNAVVGTALIKKYPKLESEFVYGDYKVYDVRKMIAKSEQEIGKATAKYFFYSNIMNFFKTEITLANGEIRKRPLIETNGETGEIVWDKGRDFATVRKVLSMPQVNIVKKTEVQTGGFSKESILPKRNSDKLIARKKDWDPKKYGGFDSPTVAYSVLVVAKVEKGKSKKLKSVKELLGITIMERSSFEKNPIDFLEAKGYKEVKKDLIIKLPKYSLFELENGRKRMLASAGELQKGNELALPSKYVNFLYLASHYEKLKGSPEDNEQKQLFVEQHKHYLDEIIEQISEFSKRVILADANLDKVLSAYNKHRDKPIREQAENIIHLFTLTNLGAPAAFKYFDTTIDRKRYTSTKEVLDATLIHQSITGLYETRIDLSQLGGDGGEAAAKGGTLNIEDEYRLHETSKGPDVPLGSTWLSDFPQAWAETGGMGLAVRQAPLIIPLKATSTPVSIKQYPMSQEARLGIKPHIQRLLDQGILVPCQSPWNTPLLPVKKPGTNDYRPVQDLREVNKRVEDIHPTVPNPYNLLSGLPPSHQWYTVLDLKDAFFCLRLHPTSQSLFAFEWRDPEMGISGQLTWTRLPQGFKNSPTLFNEALHRDLADFRIQHPDLILLQYVDDLLLAATSELDCQQGTRALLQTLGDLGYRASAKKAQICQKQVKYLGYLLKEGQRWLTEARKETVMGQPTPKTPRQLREFLGKAGFCRLFIPGFAEMAAPLYPLTKPGTLFEWGPDQQKAYQEIKQALLTAPALGLPDLTKPFELFVDEKQGYAKGVLTQKLGPWRRPVAYLSKKLDPVAAGWPPCLRMVAAIAVLTKDAGKLTMGQPLVILAPHAVEALVKQPPDRWLSNARMTHYQALLLDTDRVQFGPIVALNPATLLPLPEEGLQHDCLDILAEAHGTRPDLTDQPLPDADHTWYTDGSSFLQEGQRKAGAAVTTETEVVWAKALPAGTSAQRAELIALTQALKMAEGKKLNVYTDSRYAFATAHIHGEIYRRRGWLTSEGKEIKNKDEILALLKALFLPKRLSIIHCPGHQKGNRAEARGNRMADQAAREVATRETPETSTLLAGKRTADGSEFEKRTADGSEFESPKKKAKVE

SEQ ID NO: 2540 - protein, 2091 aa, synthetic construct
  source 1..2091: note = Description of Artificial Sequence: Synthetic polypeptide
MPAAKRVKLDGGDKKYSIGLDIGTNSVGWAVITDEYKVPSKKFKVLGNTDRHSIKKNLIGALLFDSGETAEATRLKRTARRRYTRRKNRICYLQEIFSNEMAKVDDSFFHRLEESFLVEEDKKHERHPIFGNIVDEVAYHEKYPTIYHLRKKLVDSTDKADLRLIYLALAHMIKFRGHFLIEGDLNPDNSDVDKLFIQLVQTYNQLFEENPINASGVDAKAILSARLSKSRRLENLIAQLPGEKKNGLFGNLIALSLGLTPNFKSNFDLAEDAKLQLSKDTYDDDLDNLLAQIGDQYADLFLAAKNLSDAILLSDILRVNTEITKAPLSASMIKRYDEHHQDLTLLKALVRQQLPEKYKEIFFDQSKNGYAGYIDGGASQEEFYKFIKPILEKMDGTEELLVKLNREDLLRKQRTFDNGSIPHQIHLGELHAILRRQEDFYPFLKDNREKIEKILTFRIPYYVGPLARGNSRFAWMTRKSEETITPWNFEEVVDKGASAQSFIERMTNFDKNLPNEKVLPKHSLLYEYFTVYNELTKVKYVTEGMRKPAFLSGEQKKAIVDLLFKTNRKVTVKQLKEDYFKKIECFDSVEISGVEDRFNASLGTYHDLLKIIKDKDFLDNEENEDILEDIVLTLTLFEDREMIEERLKTYAHLFDDKVMKQLKRRRYTGWGRLSRKLINGIRDKQSGKTILDFLKSDGFANRNFMQLIHDDSLTFKEDIQKAQVSGQGDSLHEHIANLAGSPAIKKGILQTVKVVDELVKVMGRHKPENIVIEMARENQTTQKGQKNSRERMKRIEEGIKELGSQILKEHPVENTQLQNEKLYLYYLQNGRDMYVDQELDINRLSDYDVDHIVPQSFLKDDSIDNKVLTRSDKARGKSDNVPSEEVVKKMKNYWRQLLNAKLITQRKFDNLTKAERGGLSELDKAGFIKRQLVETRQITKHVAQILDSRMNTKYDENDKLIREVKVITLKSKLVSDFRKDFQFYKVREINNYHHAHDAYLNAVVGTALIKKYPKLESEFVYGDYKVYDVRKMIAKSEQEIGKATAKYFFYSNIMNFFKTEITLANGEIRKRPLIETNGETGEIVWDKGRDFATVRKVLSMPQVNIVKKTEVQTGGFSKESILPKRNSDKLIARKKDWDPKKYGGFDSPTVAYSVLVVAKVEKGKSKKLKSVKELLGITIMERSSFEKNPIDFLEAKGYKEVKKDLIIKLPKYSLFELENGRKRMLASAGELQKGNELALPSKYVNFLYLASHYEKLKGSPEDNEQKQLFVEQHKHYLDEIIEQISEFSKRVILADANLDKVLSAYNKHRDKPIREQAENIIHLFTLTNLGAPAAFKYFDTTIDRKRYTSTKEVLDATLIHQSITGLYETRIDLSQLGGDGGPAPGGGGGTLNIEDEYRLHETSKGPDVPLGSTWLSDFPQAWAETGGMGLAVRQAPLIIPLKATSTPVSIKQYPMSQEARLGIKPHIQRLLDQGILVPCQSPWNTPLLPVKKPGTNDYRPVQDLREVNKRVEDIHPTVPNPYNLLSGLPPSHQWYTVLDLKDAFFCLRLHPTSQSLFAFEWRDPEMGISGQLTWTRLPQGFKNSPTLFNEALHRDLADFRIQHPDLILLQYVDDLLLAATSELDCQQGTRALLQTLGDLGYRASAKKAQICQKQVKYLGYLLKEGQRWLTEARKETVMGQPTPKTPRQLREFLGKAGFCRLFIPGFAEMAAPLYPLTKPGTLFEWGPDQQKAYQEIKQALLTAPALGLPDLTKPFELFVDEKQGYAKGVLTQKLGPWRRPVAYLSKKLDPVAAGWPPCLRMVAAIAVLTKDAGKLTMGQPLVILAPHAVEALVKQPPDRWLSNARMTHYQALLLDTDRVQFGPIVALNPATLLPLPEEGLQHDCLDILAEAHGTRPDLTDQPLPDADHTWYTDGSSFLQEGQRKAGAAVTTETEVVWAKALPAGTSAQRAELIALTQALKMAEGKKLNVYTDSRYAFATAHIHGEIYRRRGWLTSEGKEIKNKDEILALLKALFLPKRLSIIHCPGHQKGNRAEARGNRMADQAAREVATRETPETSTLLAGKRTADGSEFEKRTADGSEFESPKKKAKVE

SEQ ID NO: 2541 - protein, 2115 aa, synthetic construct
  source 1..2115: note = Description of Artificial Sequence: Synthetic polypeptide
MPAAKRVKLDGGDKKYSIGLDIGTNSVGWAVITDEYKVPSKKFKVLGNTDRHSIKKNLIGALLFDSGETAEATRLKRTARRRYTRRKNRICYLQEIFSNEMAKVDDSFFHRLEESFLVEEDKKHERHPIFGNIVDEVAYHEKYPTIYHLRKKLVDSTDKADLRLIYLALAHMIKFRGHFLIEGDLNPDNSDVDKLFIQLVQTYNQLFEENPINASGVDAKAILSARLSKSRRLENLIAQLPGEKKNGLFGNLIALSLGLTPNFKSNFDLAEDAKLQLSKDTYDDDLDNLLAQIGDQYADLFLAAKNLSDAILLSDILRVNTEITKAPLSASMIKRYDEHHQDLTLLKALVRQQLPEKYKEIFFDQSKNGYAGYIDGGASQEEFYKFIKPILEKMDGTEELLVKLNREDLLRKQRTFDNGSIPHQIHLGELHAILRRQEDFYPFLKDNREKIEKILTFRIPYYVGPLARGNSRFAWMTRKSEETITPWNFEEVVDKGASAQSFIERMTNFDKNLPNEKVLPKHSLLYEYFTVYNELTKVKYVTEGMRKPAFLSGEQKKAIVDLLFKTNRKVTVKQLKEDYFKKIECFDSVEISGVEDRFNASLGTYHDLLKIIKDKDFLDNEENEDILEDIVLTLTLFEDREMIEERLKTYAHLFDDKVMKQLKRRRYTGWGRLSRKLINGIRDKQSGKTILDFLKSDGFANRNFMQLIHDDSLTFKEDIQKAQVSGQGDSLHEHIANLAGSPAIKKGILQTVKVVDELVKVMGRHKPENIVIEMARENQTTQKGQKNSRERMKRIEEGIKELGSQILKEHPVENTQLQNEKLYLYYLQNGRDMYVDQELDINRLSDYDVDHIVPQSFLKDDSIDNKVLTRSDKARGKSDNVPSEEVVKKMKNYWRQLLNAKLITQRKFDNLTKAERGGLSELDKAGFIKRQLVETRQITKHVAQILDSRMNTKYDENDKLIREVKVITLKSKLVSDFRKDFQFYKVREINNYHHAHDAYLNAVVGTALIKKYPKLESEFVYGDYKVYDVRKMIAKSEQEIGKATAKYFFYSNIMNFFKTEITLANGEIRKRPLIETNGETGEIVWDKGRDFATVRKVLSMPQVNIVKKTEVQTGGFSKESILPKRNSDKLIARKKDWDPKKYGGFDSPTVAYSVLVVAKVEKGKSKKLKSVKELLGITIMERSSFEKNPIDFLEAKGYKEVKKDLIIKLPKYSLFELENGRKRMLASAGELQKGNELALPSKYVNFLYLASHYEKLKGSPEDNEQKQLFVEQHKHYLDEIIEQISEFSKRVILADANLDKVLSAYNKHRDKPIREQAENIIHLFTLTNLGAPAAFKYFDTTIDRKRYTSTKEVLDATLIHQSITGLYETRIDLSQLGGDGGEAAAKEAAAKEAAAKEAAAKEAAAKEAAAKGGTLNIEDEYRLHETSKGPDVPLGSTWLSDFPQAWAETGGMGLAVRQAPLIIPLKATSTPVSIKQYPMSQEARLGIKPHIQRLLDQGILVPCQSPWNTPLLPVKKPGTNDYRPVQDLREVNKRVEDIHPTVPNPYNLLSGLPPSHQWYTVLDLKDAFFCLRLHPTSQSLFAFEWRDPEMGISGQLTWTRLPQGFKNSPTLFNEALHRDLADFRIQHPDLILLQYVDDLLLAATSELDCQQGTRALLQTLGDLGYRASAKKAQICQKQVKYLGYLLKEGQRWLTEARKETVMGQPTPKTPRQLREFLGKAGFCRLFIPGFAEMAAPLYPLTKPGTLFEWGPDQQKAYQEIKQALLTAPALGLPDLTKPFELFVDEKQGYAKGVLTQKLGPWRRPVAYLSKKLDPVAAGWPPCLRMVAAIAVLTKDAGKLTMGQPLVILAPHAVEALVKQPPDRWLSNARMTHYQALLLDTDRVQFGPIVALNPATLLPLPEEGLQHDCLDILAEAHGTRPDLTDQPLPDADHTWYTDGSSFLQEGQRKAGAAVTTETEVVWAKALPAGTSAQRAELIALTQALKMAEGKKLNVYTDSRYAFATAHIHGEIYRRRGWLTSEGKEIKNKDEILALLKALFLPKRLSIIHCPGHQKGNRAEARGNRMADQAAREVATRETPETSTLLAGKRTADGSEFEKRTADGSEFESPKKKAKVE

SEQ ID NO: 2542 - protein, 2096 aa, synthetic construct
  source 1..2096: note = Description of Artificial Sequence: Synthetic polypeptide
MPAAKRVKLDGGDKKYSIGLDIGTNSVGWAVITDEYKVPSKKFKVLGNTDRHSIKKNLIGALLFDSGETAEATRLKRTARRRYTRRKNRICYLQEIFSNEMAKVDDSFFHRLEESFLVEEDKKHERHPIFGNIVDEVAYHEKYPTIYHLRKKLVDSTDKADLRLIYLALAHMIKFRGHFLIEGDLNPDNSDVDKLFIQLVQTYNQLFEENPINASGVDAKAILSARLSKSRRLENLIAQLPGEKKNGLFGNLIALSLGLTPNFKSNFDLAEDAKLQLSKDTYDDDLDNLLAQIGDQYADLFLAAKNLSDAILLSDILRVNTEITKAPLSASMIKRYDEHHQDLTLLKALVRQQLPEKYKEIFFDQSKNGYAGYIDGGASQEEFYKFIKPILEKMDGTEELLVKLNREDLLRKQRTFDNGSIPHQIHLGELHAILRRQEDFYPFLKDNREKIEKILTFRIPYYVGPLARGNSRFAWMTRKSEETITPWNFEEVVDKGASAQSFIERMTNFDKNLPNEKVLPKHSLLYEYFTVYNELTKVKYVTEGMRKPAFLSGEQKKAIVDLLFKTNRKVTVKQLKEDYFKKIECFDSVEISGVEDRFNASLGTYHDLLKIIKDKDFLDNEENEDILEDIVLTLTLFEDREMIEERLKTYAHLFDDKVMKQLKRRRYTGWGRLSRKLINGIRDKQSGKTILDFLKSDGFANRNFMQLIHDDSLTFKEDIQKAQVSGQGDSLHEHIANLAGSPAIKKGILQTVKVVDELVKVMGRHKPENIVIEMARENQTTQKGQKNSRERMKRIEEGIKELGSQILKEHPVENTQLQNEKLYLYYLQNGRDMYVDQELDINRLSDYDVDHIVPQSFLKDDSIDNKVLTRSDKARGKSDNVPSEEVVKKMKNYWRQLLNAKLITQRKFDNLTKAERGGLSELDKAGFIKRQLVETRQITKHVAQILDSRMNTKYDENDKLIREVKVITLKSKLVSDFRKDFQFYKVREINNYHHAHDAYLNAVVGTALIKKYPKLESEFVYGDYKVYDVRKMIAKSEQEIGKATAKYFFYSNIMNFFKTEITLANGEIRKRPLIETNGETGEIVWDKGRDFATVRKVLSMPQVNIVKKTEVQTGGFSKESILPKRNSDKLIARKKDWDPKKYGGFDSPTVAYSVLVVAKVEKGKSKKLKSVKELLGITIMERSSFEKNPIDFLEAKGYKEVKKDLIIKLPKYSLFELENGRKRMLASAGELQKGNELALPSKYVNFLYLASHYEKLKGSPEDNEQKQLFVEQHKHYLDEIIEQISEFSKRVILADANLDKVLSAYNKHRDKPIREQAENIIHLFTLTNLGAPAAFKYFDTTIDRKRYTSTKEVLDATLIHQSITGLYETRIDLSQLGGDGGPAPGSSEAAAKGGTLNIEDEYRLHETSKGPDVPLGSTWLSDFPQAWAETGGMGLAVRQAPLIIPLKATSTPVSIKQYPMSQEARLGIKPHIQRLLDQGILVPCQSPWNTPLLPVKKPGTNDYRPVQDLREVNKRVEDIHPTVPNPYNLLSGLPPSHQWYTVLDLKDAFFCLRLHPTSQSLFAFEWRDPEMGISGQLTWTRLPQGFKNSPTLFNEALHRDLADFRIQHPDLILLQYVDDLLLAATSELDCQQGTRALLQTLGDLGYRASAKKAQICQKQVKYLGYLLKEGQRWLTEARKETVMGQPTPKTPRQLREFLGKAGFCRLFIPGFAEMAAPLYPLTKPGTLFEWGPDQQKAYQEIKQALLTAPALGLPDLTKPFELFVDEKQGYAKGVLTQKLGPWRRPVAYLSKKLDPVAAGWPPCLRMVAAIAVLTKDAGKLTMGQPLVILAPHAVEALVKQPPDRWLSNARMTHYQALLLDTDRVQFGPIVALNPATLLPLPEEGLQHDCLDILAEAHGTRPDLTDQPLPDADHTWYTDGSSFLQEGQRKAGAAVTTETEVVWAKALPAGTSAQRAELIALTQALKMAEGKKLNVYTDSRYAFATAHIHGEIYRRRGWLTSEGKEIKNKDEILALLKALFLPKRLSIIHCPGHQKGNRAEARGNRMADQAAREVATRETPETSTLLAGKRTADGSEFEKRTADGSEFESPKKKAKVE

SEQ ID NO: 2543 - protein, 2094 aa, synthetic construct
  source 1..2094: note = Description of Artificial Sequence: Synthetic polypeptide
MPAAKRVKLDGGDKKYSIGLDIGTNSVGWAVITDEYKVPSKKFKVLGNTDRHSIKKNLIGALLFDSGETAEATRLKRTARRRYTRRKNRICYLQEIFSNEMAKVDDSFFHRLEESFLVEEDKKHERHPIFGNIVDEVAYHEKYPTIYHLRKKLVDSTDKADLRLIYLALAHMIKFRGHFLIEGDLNPDNSDVDKLFIQLVQTYNQLFEENPINASGVDAKAILSARLSKSRRLENLIAQLPGEKKNGLFGNLIALSLGLTPNFKSNFDLAEDAKLQLSKDTYDDDLDNLLAQIGDQYADLFLAAKNLSDAILLSDILRVNTEITKAPLSASMIKRYDEHHQDLTLLKALVRQQLPEKYKEIFFDQSKNGYAGYIDGGASQEEFYKFIKPILEKMDGTEELLVKLNREDLLRKQRTFDNGSIPHQIHLGELHAILRRQEDFYPFLKDNREKIEKILTFRIPYYVGPLARGNSRFAWMTRKSEETITPWNFEEVVDKGASAQSFIERMTNFDKNLPNEKVLPKHSLLYEYFTVYNELTKVKYVTEGMRKPAFLSGEQKKAIVDLLFKTNRKVTVKQLKEDYFKKIECFDSVEISGVEDRFNASLGTYHDLLKIIKDKDFLDNEENEDILEDIVLTLTLFEDREMIEERLKTYAHLFDDKVMKQLKRRRYTGWGRLSRKLINGIRDKQSGKTILDFLKSDGFANRNFMQLIHDDSLTFKEDIQKAQVSGQGDSLHEHIANLAGSPAIKKGILQTVKVVDELVKVMGRHKPENIVIEMARENQTTQKGQKNSRERMKRIEEGIKELGSQILKEHPVENTQLQNEKLYLYYLQNGRDMYVDQELDINRLSDYDVDHIVPQSFLKDDSIDNKVLTRSDKARGKSDNVPSEEVVKKMKNYWRQLLNAKLITQRKFDNLTKAERGGLSELDKAGFIKRQLVETRQITKHVAQILDSRMNTKYDENDKLIREVKVITLKSKLVSDFRKDFQFYKVREINNYHHAHDAYLNAVVGTALIKKYPKLESEFVYGDYKVYDVRKMIAKSEQEIGKATAKYFFYSNIMNFFKTEITLANGEIRKRPLIETNGETGEIVWDKGRDFATVRKVLSMPQVNIVKKTEVQTGGFSKESILPKRNSDKLIARKKDWDPKKYGGFDSPTVAYSVLVVAKVEKGKSKKLKSVKELLGITIMERSSFEKNPIDFLEAKGYKEVKKDLIIKLPKYSLFELENGRKRMLASAGELQKGNELALPSKYVNFLYLASHYEKLKGSPEDNEQKQLFVEQHKHYLDEIIEQISEFSKRVILADANLDKVLSAYNKHRDKPIREQAENIIHLFTLTNLGAPAAFKYFDTTIDRKRYTSTKEVLDATLIHQSITGLYETRIDLSQLGGDGGGGGPAPGGSGGTLNIEDEYRLHETSKGPDVPLGSTWLSDFPQAWAETGGMGLAVRQAPLIIPLKATSTPVSIKQYPMSQEARLGIKPHIQRLLDQGILVPCQSPWNTPLLPVKKPGTNDYRPVQDLREVNKRVEDIHPTVPNPYNLLSGLPPSHQWYTVLDLKDAFFCLRLHPTSQSLFAFEWRDPEMGISGQLTWTRLPQGFKNSPTLFNEALHRDLADFRIQHPDLILLQYVDDLLLAATSELDCQQGTRALLQTLGDLGYRASAKKAQICQKQVKYLGYLLKEGQRWLTEARKETVMGQPTPKTPRQLREFLGKAGFCRLFIPGFAEMAAPLYPLTKPGTLFEWGPDQQKAYQEIKQALLTAPALGLPDLTKPFELFVDEKQGYAKGVLTQKLGPWRRPVAYLSKKLDPVAAGWPPCLRMVAAIAVLTKDAGKLTMGQPLVILAPHAVEALVKQPPDRWLSNARMTHYQALLLDTDRVQFGPIVALNPATLLPLPEEGLQHDCLDILAEAHGTRPDLTDQPLPDADHTWYTDGSSFLQEGQRKAGAAVTTETEVVWAKALPAGTSAQRAELIALTQALKMAEGKKLNVYTDSRYAFATAHIHGEIYRRRGWLTSEGKEIKNKDEILALLKALFLPKRLSIIHCPGHQKGNRAEARGNRMADQAAREVATRETPETSTLLAGKRTADGSEFEKRTADGSEFESPKKKAKVE

SEQ ID NO: 2544 - protein, 2097 aa, synthetic construct
  source 1..2097: note = Description of Artificial Sequence: Synthetic polypeptide
MPAAKRVKLDGGDKKYSIGLDIGTNSVGWAVITDEYKVPSKKFKVLGNTDRHSIKKNLIGALLFDSGETAEATRLKRTARRRYTRRKNRICYLQEIFSNEMAKVDDSFFHRLEESFLVEEDKKHERHPIFGNIVDEVAYHEKYPTIYHLRKKLVDSTDKADLRLIYLALAHMIKFRGHFLIEGDLNPDNSDVDKLFIQLVQTYNQLFEENPINASGVDAKAILSARLSKSRRLENLIAQLPGEKKNGLFGNLIALSLGLTPNFKSNFDLAEDAKLQLSKDTYDDDLDNLLAQIGDQYADLFLAAKNLSDAILLSDILRVNTEITKAPLSASMIKRYDEHHQDLTLLKALVRQQLPEKYKEIFFDQSKNGYAGYIDGGASQEEFYKFIKPILEKMDGTEELLVKLNREDLLRKQRTFDNGSIPHQIHLGELHAILRRQEDFYPFLKDNREKIEKILTFRIPYYVGPLARGNSRFAWMTRKSEETITPWNFEEVVDKGASAQSFIERMTNFDKNLPNEKVLPKHSLLYEYFTVYNELTKVKYVTEGMRKPAFLSGEQKKAIVDLLFKTNRKVTVKQLKEDYFKKIECFDSVEISGVEDRFNASLGTYHDLLKIIKDKDFLDNEENEDILEDIVLTLTLFEDREMIEERLKTYAHLFDDKVMKQLKRRRYTGWGRLSRKLINGIRDKQSGKTILDFLKSDGFANRNFMQLIHDDSLTFKEDIQKAQVSGQGDSLHEHIANLAGSPAIKKGILQTVKVVDELVKVMGRHKPENIVIEMARENQTTQKGQKNSRERMKRIEEGIKELGSQILKEHPVENTQLQNEKLYLYYLQNGRDMYVDQELDINRLSDYDVDHIVPQSFLKDDSIDNKVLTRSDKARGKSDNVPSEEVVKKMKNYWRQLLNAKLITQRKFDNLTKAERGGLSELDKAGFIKRQLVETRQITKHVAQILDSRMNTKYDENDKLIREVKVITLKSKLVSDFRKDFQFYKVREINNYHHAHDAYLNAVVGTALIKKYPKLESEFVYGDYKVYDVRKMIAKSEQEIGKATAKYFFYSNIMNFFKTEITLANGEIRKRPLIETNGETGEIVWDKGRDFATVRKVLSMPQVNIVKKTEVQTGGFSKESILPKRNSDKLIARKKDWDPKKYGGFDSPTVAYSVLVVAKVEKGKSKKLKSVKELLGITIMERSSFEKNPIDFLEAKGYKEVKKDLIIKLPKYSLFELENGRKRMLASAGELQKGNELALPSKYVNFLYLASHYEKLKGSPEDNEQKQLFVEQHKHYLDEIIEQISEFSKRVILADANLDKVLSAYNKHRDKPIREQAENIIHLFTLTNLGAPAAFKYFDTTIDRKRYTSTKEVLDATLIHQSITGLYETRIDLSQLGGDGGGGSGGSGGSGGSGGTLNIEDEYRLHETSKGPDVPLGSTWLSDFPQAWAETGGMGLAVRQAPLIIPLKATSTPVSIKQYPMSQEARLGIKPHIQRLLDQGILVPCQSPWNTPLLPVKKPGTNDYRPVQDLREVNKRVEDIHPTVPNPYNLLSGLPPSHQWYTVLDLKDAFFCLRLHPTSQSLFAFEWRDPEMGISGQLTWTRLPQGFKNSPTLFNEALHRDLADFRIQHPDLILLQYVDDLLLAATSELDCQQGTRALLQTLGDLGYRASAKKAQICQKQVKYLGYLLKEGQRWLTEARKETVMGQPTPKTPRQLREFLGKAGFCRLFIPGFAEMAAPLYPLTKPGTLFEWGPDQQKAYQEIKQALLTAPALGLPDLTKPFELFVDEKQGYAKGVLTQKLGPWRRPVAYLSKKLDPVAAGWPPCLRMVAAIAVLTKDAGKLTMGQPLVILAPHAVEALVKQPPDRWLSNARMTHYQALLLDTDRVQFGPIVALNPATLLPLPEEGLQHDCLDILAEAHGTRPDLTDQPLPDADHTWYTDGSSFLQEGQRKAGAAVTTETEVVWAKALPAGTSAQRAELIALTQALKMAEGKKLNVYTDSRYAFATAHIHGEIYRRRGWLTSEGKEIKNKDEILALLKALFLPKRLSIIHCPGHQKGNRAEARGNRMADQAAREVATRETPETSTLLAGKRTADGSEFEKRTADGSEFESPKKKAKVE

SEQ ID NO: 2545 - protein, 2094 aa, synthetic construct
  source 1..2094: note = Description of Artificial Sequence: Synthetic polypeptide
MPAAKRVKLDGGDKKYSIGLDIGTNSVGWAVITDEYKVPSKKFKVLGNTDRHSIKKNLIGALLFDSGETAEATRLKRTARRRYTRRKNRICYLQEIFSNEMAKVDDSFFHRLEESFLVEEDKKHERHPIFGNIVDEVAYHEKYPTIYHLRKKLVDSTDKADLRLIYLALAHMIKFRGHFLIEGDLNPDNSDVDKLFIQLVQTYNQLFEENPINASGVDAKAILSARLSKSRRLENLIAQLPGEKKNGLFGNLIALSLGLTPNFKSNFDLAEDAKLQLSKDTYDDDLDNLLAQIGDQYADLFLAAKNLSDAILLSDILRVNTEITKAPLSASMIKRYDEHHQDLTLLKALVRQQLPEKYKEIFFDQSKNGYAGYIDGGASQEEFYKFIKPILEKMDGTEELLVKLNREDLLRKQRTFDNGSIPHQIHLGELHAILRRQEDFYPFLKDNREKIEKILTFRIPYYVGPLARGNSRFAWMTRKSEETITPWNFEEVVDKGASAQSFIERMTNFDKNLPNEKVLPKHSLLYEYFTVYNELTKVKYVTEGMRKPAFLSGEQKKAIVDLLFKTNRKVTVKQLKEDYFKKIECFDSVEISGVEDRFNASLGTYHDLLKIIKDKDFLDNEENEDILEDIVLTLTLFEDREMIEERLKTYAHLFDDKVMKQLKRRRYTGWGRLSRKLINGIRDKQSGKTILDFLKSDGFANRNFMQLIHDDSLTFKEDIQKAQVSGQGDSLHEHIANLAGSPAIKKGILQTVKVVDELVKVMGRHKPENIVIEMARENQTTQKGQKNSRERMKRIEEGIKELGSQILKEHPVENTQLQNEKLYLYYLQNGRDMYVDQELDINRLSDYDVDHIVPQSFLKDDSIDNKVLTRSDKARGKSDNVPSEEVVKKMKNYWRQLLNAKLITQRKFDNLTKAERGGLSELDKAGFIKRQLVETRQITKHVAQILDSRMNTKYDENDKLIREVKVITLKSKLVSDFRKDFQFYKVREINNYHHAHDAYLNAVVGTALIKKYPKLESEFVYGDYKVYDVRKMIAKSEQEIGKATAKYFFYSNIMNFFKTEITLANGEIRKRPLIETNGETGEIVWDKGRDFATVRKVLSMPQVNIVKKTEVQTGGFSKESILPKRNSDKLIARKKDWDPKKYGGFDSPTVAYSVLVVAKVEKGKSKKLKSVKELLGITIMERSSFEKNPIDFLEAKGYKEVKKDLIIKLPKYSLFELENGRKRMLASAGELQKGNELALPSKYVNFLYLASHYEKLKGSPEDNEQKQLFVEQHKHYLDEIIEQISEFSKRVILADANLDKVLSAYNKHRDKPIREQAENIIHLFTLTNLGAPAAFKYFDTTIDRKRYTSTKEVLDATLIHQSITGLYETRIDLSQLGGDGGGGSGSSGGGGGTLNIEDEYRLHETSKGPDVPLGSTWLSDFPQAWAETGGMGLAVRQAPLIIPLKATSTPVSIKQYPMSQEARLGIKPHIQRLLDQGILVPCQSPWNTPLLPVKKPGTNDYRPVQDLREVNKRVEDIHPTVPNPYNLLSGLPPSHQWYTVLDLKDAFFCLRLHPTSQSLFAFEWRDPEMGISGQLTWTRLPQGFKNSPTLFNEALHRDLADFRIQHPDLILLQYVDDLLLAATSELDCQQGTRALLQTLGDLGYRASAKKAQICQKQVKYLGYLLKEGQRWLTEARKETVMGQPTPKTPRQLREFLGKAGFCRLFIPGFAEMAAPLYPLTKPGTLFEWGPDQQKAYQEIKQALLTAPALGLPDLTKPFELFVDEKQGYAKGVLTQKLGPWRRPVAYLSKKLDPVAAGWPPCLRMVAAIAVLTKDAGKLTMGQPLVILAPHAVEALVKQPPDRWLSNARMTHYQALLLDTDRVQFGPIVALNPATLLPLPEEGLQHDCLDILAEAHGTRPDLTDQPLPDADHTWYTDGSSFLQEGQRKAGAAVTTETEVVWAKALPAGTSAQRAELIALTQALKMAEGKKLNVYTDSRYAFATAHIHGEIYRRRGWLTSEGKEIKNKDEILALLKALFLPKRLSIIHCPGHQKGNRAEARGNRMADQAAREVATRETPETSTLLAGKRTADGSEFEKRTADGSEFESPKKKAKVE

SEQ ID NO: 2546 - protein, 2091 aa, synthetic construct
  source 1..2091: note = Description of Artificial Sequence: Synthetic polypeptide
MPAAKRVKLDGGDKKYSIGLDIGTNSVGWAVITDEYKVPSKKFKVLGNTDRHSIKKNLIGALLFDSGETAEATRLKRTARRRYTRRKNRICYLQEIFSNEMAKVDDSFFHRLEESFLVEEDKKHERHPIFGNIVDEVAYHEKYPTIYHLRKKLVDSTDKADLRLIYLALAHMIKFRGHFLIEGDLNPDNSDVDKLFIQLVQTYNQLFEENPINASGVDAKAILSARLSKSRRLENLIAQLPGEKKNGLFGNLIALSLGLTPNFKSNFDLAEDAKLQLSKDTYDDDLDNLLAQIGDQYADLFLAAKNLSDAILLSDILRVNTEITKAPLSASMIKRYDEHHQDLTLLKALVRQQLPEKYKEIFFDQSKNGYAGYIDGGASQEEFYKFIKPILEKMDGTEELLVKLNREDLLRKQRTFDNGSIPHQIHLGELHAILRRQEDFYPFLKDNREKIEKILTFRIPYYVGPLARGNSRFAWMTRKSEETITPWNFEEVVDKGASAQSFIERMTNFDKNLPNEKVLPKHSLLYEYFTVYNELTKVKYVTEGMRKPAFLSGEQKKAIVDLLFKTNRKVTVKQLKEDYFKKIECFDSVEISGVEDRFNASLGTYHDLLKIIKDKDFLDNEENEDILEDIVLTLTLFEDREMIEERLKTYAHLFDDKVMKQLKRRRYTGWGRLSRKLINGIRDKQSGKTILDFLKSDGFANRNFMQLIHDDSLTFKEDIQKAQVSGQGDSLHEHIANLAGSPAIKKGILQTVKVVDELVKVMGRHKPENIVIEMARENQTTQKGQKNSRERMKRIEEGIKELGSQILKEHPVENTQLQNEKLYLYYLQNGRDMYVDQELDINRLSDYDVDHIVPQSFLKDDSIDNKVLTRSDKARGKSDNVPSEEVVKKMKNYWRQLLNAKLITQRKFDNLTKAERGGLSELDKAGFIKRQLVETRQITKHVAQILDSRMNTKYDENDKLIREVKVITLKSKLVSDFRKDFQFYKVREINNYHHAHDAYLNAVVGTALIKKYPKLESEFVYGDYKVYDVRKMIAKSEQEIGKATAKYFFYSNIMNFFKTEITLANGEIRKRPLIETNGETGEIVWDKGRDFATVRKVLSMPQVNIVKKTEVQTGGFSKESILPKRNSDKLIARKKDWDPKKYGGFDSPTVAYSVLVVAKVEKGKSKKLKSVKELLGITIMERSSFEKNPIDFLEAKGYKEVKKDLIIKLPKYSLFELENGRKRMLASAGELQKGNELALPSKYVNFLYLASHYEKLKGSPEDNEQKQLFVEQHKHYLDEIIEQISEFSKRVILADANLDKVLSAYNKHRDKPIREQAENIIHLFTLTNLGAPAAFKYFDTTIDRKRYTSTKEVLDATLIHQSITGLYETRIDLSQLGGDGGPAPGGSGGTLNIEDEYRLHETSKGPDVPLGSTWLSDFPQAWAETGGMGLAVRQAPLIIPLKATSTPVSIKQYPMSQEARLGIKPHIQRLLDQGILVPCQSPWNTPLLPVKKPGTNDYRPVQDLREVNKRVEDIHPTVPNPYNLLSGLPPSHQWYTVLDLKDAFFCLRLHPTSQSLFAFEWRDPEMGISGQLTWTRLPQGFKNSPTLFNEALHRDLADFRIQHPDLILLQYVDDLLLAATSELDCQQGTRALLQTLGDLGYRASAKKAQICQKQVKYLGYLLKEGQRWLTEARKETVMGQPTPKTPRQLREFLGKAGFCRLFIPGFAEMAAPLYPLTKPGTLFEWGPDQQKAYQEIKQALLTAPALGLPDLTKPFELFVDEKQGYAKGVLTQKLGPWRRPVAYLSKKLDPVAAGWPPCLRMVAAIAVLTKDAGKLTMGQPLVILAPHAVEALVKQPPDRWLSNARMTHYQALLLDTDRVQFGPIVALNPATLLPLPEEGLQHDCLDILAEAHGTRPDLTDQPLPDADHTWYTDGSSFLQEGQRKAGAAVTTETEVVWAKALPAGTSAQRAELIALTQALKMAEGKKLNVYTDSRYAFATAHIHGEIYRRRGWLTSEGKEIKNKDEILALLKALFLPKRLSIIHCPGHQKGNRAEARGNRMADQAAREVATRETPETSTLLAGKRTADGSEFEKRTADGSEFESPKKKAKVE

SEQ ID NO: 2547 - protein, 2091 aa, synthetic construct
  source 1..2091: note = Description of Artificial Sequence: Synthetic polypeptide
MPAAKRVKLDGGDKKYSIGLDIGTNSVGWAVITDEYKVPSKKFKVLGNTDRHSIKKNLIGALLFDSGETAEATRLKRTARRRYTRRKNRICYLQEIFSNEMAKVDDSFFHRLEESFLVEEDKKHERHPIFGNIVDEVAYHEKYPTIYHLRKKLVDSTDKADLRLIYLALAHMIKFRGHFLIEGDLNPDNSDVDKLFIQLVQTYNQLFEENPINASGVDAKAILSARLSKSRRLENLIAQLPGEKKNGLFGNLIALSLGLTPNFKSNFDLAEDAKLQLSKDTYDDDLDNLLAQIGDQYADLFLAAKNLSDAILLSDILRVNTEITKAPLSASMIKRYDEHHQDLTLLKALVRQQLPEKYKEIFFDQSKNGYAGYIDGGASQEEFYKFIKPILEKMDGTEELLVKLNREDLLRKQRTFDNGSIPHQIHLGELHAILRRQEDFYPFLKDNREKIEKILTFRIPYYVGPLARGNSRFAWMTRKSEETITPWNFEEVVDKGASAQSFIERMTNFDKNLPNEKVLPKHSLLYEYFTVYNELTKVKYVTEGMRKPAFLSGEQKKAIVDLLFKTNRKVTVKQLKEDYFKKIECFDSVEISGVEDRFNASLGTYHDLLKIIKDKDFLDNEENEDILEDIVLTLTLFEDREMIEERLKTYAHLFDDKVMKQLKRRRYTGWGRLSRKLINGIRDKQSGKTILDFLKSDGFANRNFMQLIHDDSLTFKEDIQKAQVSGQGDSLHEHIANLAGSPAIKKGILQTVKVVDELVKVMGRHKPENIVIEMARENQTTQKGQKNSRERMKRIEEGIKELGSQILKEHPVENTQLQNEKLYLYYLQNGRDMYVDQELDINRLSDYDVDHIVPQSFLKDDSIDNKVLTRSDKARGKSDNVPSEEVVKKMKNYWRQLLNAKLITQRKFDNLTKAERGGLSELDKAGFIKRQLVETRQITKHVAQILDSRMNTKYDENDKLIREVKVITLKSKLVSDFRKDFQFYKVREINNYHHAHDAYLNAVVGTALIKKYPKLESEFVYGDYKVYDVRKMIAKSEQEIGKATAKYFFYSNIMNFFKTEITLANGEIRKRPLIETNGETGEIVWDKGRDFATVRKVLSMPQVNIVKKTEVQTGGFSKESILPKRNSDKLIARKKDWDPKKYGGFDSPTVAYSVLVVAKVEKGKSKKLKSVKELLGITIMERSSFEKNPIDFLEAKGYKEVKKDLIIKLPKYSLFELENGRKRMLASAGELQKGNELALPSKYVNFLYLASHYEKLKGSPEDNEQKQLFVEQHKHYLDEIIEQISEFSKRVILADANLDKVLSAYNKHRDKPIREQAENIIHLFTLTNLGAPAAFKYFDTTIDRKRYTSTKEVLDATLIHQSITGLYETRIDLSQLGGDGGGGGPAPGGTLNIEDEYRLHETSKGPDVPLGSTWLSDFPQAWAETGGMGLAVRQAPLIIPLKATSTPVSIKQYPMSQEARLGIKPHIQRLLDQGILVPCQSPWNTPLLPVKKPGTNDYRPVQDLREVNKRVEDIHPTVPNPYNLLSGLPPSHQWYTVLDLKDAFFCLRLHPTSQSLFAFEWRDPEMGISGQLTWTRLPQGFKNSPTLFNEALHRDLADFRIQHPDLILLQYVDDLLLAATSELDCQQGTRALLQTLGDLGYRASAKKAQICQKQVKYLGYLLKEGQRWLTEARKETVMGQPTPKTPRQLREFLGKAGFCRLFIPGFAEMAAPLYPLTKPGTLFEWGPDQQKAYQEIKQALLTAPALGLPDLTKPFELFVDEKQGYAKGVLTQKLGPWRRPVAYLSKKLDPVAAGWPPCLRMVAAIAVLTKDAGKLTMGQPLVILAPHAVEALVKQPPDRWLSNARMTHYQALLLDTDRVQFGPIVALNPATLLPLPEEGLQHDCLDILAEAHGTRPDLTDQPLPDADHTWYTDGSSFLQEGQRKAGAAVTTETEVVWAKALPAGTSAQRAELIALTQALKMAEGKKLNVYTDSRYAFATAHIHGEIYRRRGWLTSEGKEIKNKDEILALLKALFLPKRLSIIHCPGHQKGNRAEARGNRMADQAAREVATRETPETSTLLAGKRTADGSEFEKRTADGSEFESPKKKAKVE

SEQ ID NO: 2548 - protein, 2096 aa, synthetic construct
  source 1..2096: note = Description of Artificial Sequence: Synthetic polypeptide
MPAAKRVKLDGGDKKYSIGLDIGTNSVGWAVITDEYKVPSKKFKVLGNTDRHSIKKNLIGALLFDSGETAEATRLKRTARRRYTRRKNRICYLQEIFSNEMAKVDDSFFHRLEESFLVEEDKKHERHPIFGNIVDEVAYHEKYPTIYHLRKKLVDSTDKADLRLIYLALAHMIKFRGHFLIEGDLNPDNSDVDKLFIQLVQTYNQLFEENPINASGVDAKAILSARLSKSRRLENLIAQLPGEKKNGLFGNLIALSLGLTPNFKSNFDLAEDAKLQLSKDTYDDDLDNLLAQIGDQYADLFLAAKNLSDAILLSDILRVNTEITKAPLSASMIKRYDEHHQDLTLLKALVRQQLPEKYKEIFFDQSKNGYAGYIDGGASQEEFYKFIKPILEKMDGTEELLVKLNREDLLRKQRTFDNGSIPHQIHLGELHAILRRQEDFYPFLKDNREKIEKILTFRIPYYVGPLARGNSRFAWMTRKSEETITPWNFEEVVDKGASAQSFIERMTNFDKNLPNEKVLPKHSLLYEYFTVYNELTKVKYVTEGMRKPAFLSGEQKKAIVDLLFKTNRKVTVKQLKEDYFKKIECFDSVEISGVEDRFNASLGTYHDLLKIIKDKDFLDNEENEDILEDIVLTLTLFEDREMIEERLKTYAHLFDDKVMKQLKRRRYTGWGRLSRKLINGIRDKQSGKTILDFLKSDGFANRNFMQLIHDDSLTFKEDIQKAQVSGQGDSLHEHIANLAGSPAIKKGILQTVKVVDELVKVMGRHKPENIVIEMARENQTTQKGQKNSRERMKRIEEGIKELGSQILKEHPVENTQLQNEKLYLYYLQNGRDMYVDQELDINRLSDYDVDHIVPQSFLKDDSIDNKVLTRSDKARGKSDNVPSEEVVKKMKNYWRQLLNAKLITQRKFDNLTKAERGGLSELDKAGFIKRQLVETRQITKHVAQILDSRMNTKYDENDKLIREVKVITLKSKLVSDFRKDFQFYKVREINNYHHAHDAYLNAVVGTALIKKYPKLESEFVYGDYKVYDVRKMIAKSEQEIGKATAKYFFYSNIMNFFKTEITLANGEIRKRPLIETNGETGEIVWDKGRDFATVRKVLSMPQVNIVKKTEVQTGGFSKESILPKRNSDKLIARKKDWDPKKYGGFDSPTVAYSVLVVAKVEKGKSKKLKSVKELLGITIMERSSFEKNPIDFLEAKGYKEVKKDLIIKLPKYSLFELENGRKRMLASAGELQKGNELALPSKYVNFLYLASHYEKLKGSPEDNEQKQLFVEQHKHYLDEIIEQISEFSKRVILADANLDKVLSAYNKHRDKPIREQAENIIHLFTLTNLGAPAAFKYFDTTIDRKRYTSTKEVLDATLIHQSITGLYETRIDLSQLGGDGGEAAAKGGSGSSGGTLNIEDEYRLHETSKGPDVPLGSTWLSDFPQAWAETGGMGLAVRQAPLIIPLKATSTPVSIKQYPMSQEARLGIKPHIQRLLDQGILVPCQSPWNTPLLPVKKPGTNDYRPVQDLREVNKRVEDIHPTVPNPYNLLSGLPPSHQWYTVLDLKDAFFCLRLHPTSQSLFAFEWRDPEMGISGQLTWTRLPQGFKNSPTLFNEALHRDLADFRIQHPDLILLQYVDDLLLAATSELDCQQGTRALLQTLGDLGYRASAKKAQICQKQVKYLGYLLKEGQRWLTEARKETVMGQPTPKTPRQLREFLGKAGFCRLFIPGFAEMAAPLYPLTKPGTLFEWGPDQQKAYQEIKQALLTAPALGLPDLTKPFELFVDEKQGYAKGVLTQKLGPWRRPVAYLSKKLDPVAAGWPPCLRMVAAIAVLTKDAGKLTMGQPLVILAPHAVEALVKQPPDRWLSNARMTHYQALLLDTDRVQFGPIVALNPATLLPLPEEGLQHDCLDILAEAHGTRPDLTDQPLPDADHTWYTDGSSFLQEGQRKAGAAVTTETEVVWAKALPAGTSAQRAELIALTQALKMAEGKKLNVYTDSRYAFATAHIHGEIYRRRGWLTSEGKEIKNKDEILALLKALFLPKRLSIIHCPGHQKGNRAEARGNRMADQAAREVATRETPETSTLLAGKRTADGSEFEKRTADGSEFESPKKKAKVE

SEQ ID NO: 2549 - protein, 2093 aa, synthetic construct
  source 1..2093: note = Description of Artificial Sequence: Synthetic polypeptide
MPAAKRVKLDGGDKKYSIGLDIGTNSVGWAVITDEYKVPSKKFKVLGNTDRHSIKKNLIGALLFDSGETAEATRLKRTARRRYTRRKNRICYLQEIFSNEMAKVDDSFFHRLEESFLVEEDKKHERHPIFGNIVDEVAYHEKYPTIYHLRKKLVDSTDKADLRLIYLALAHMIKFRGHFLIEGDLNPDNSDVDKLFIQLVQTYNQLFEENPINASGVDAKAILSARLSKSRRLENLIAQLPGEKKNGLFGNLIALSLGLTPNFKSNFDLAEDAKLQLSKDTYDDDLDNLLAQIGDQYADLFLAAKNLSDAILLSDILRVNTEITKAPLSASMIKRYDEHHQDLTLLKALVRQQLPEKYKEIFFDQSKNGYAGYIDGGASQEEFYKFIKPILEKMDGTEELLVKLNREDLLRKQRTFDNGSIPHQIHLGELHAILRRQEDFYPFLKDNREKIEKILTFRIPYYVGPLARGNSRFAWMTRKSEETITPWNFEEVVDKGASAQSFIERMTNFDKNLPNEKVLPKHSLLYEYFTVYNELTKVKYVTEGMRKPAFLSGEQKKAIVDLLFKTNRKVTVKQLKEDYFKKIECFDSVEISGVEDRFNASLGTYHDLLKIIKDKDFLDNEENEDILEDIVLTLTLFEDREMIEERLKTYAHLFDDKVMKQLKRRRYTGWGRLSRKLINGIRDKQSGKTILDFLKSDGFANRNFMQLIHDDSLTFKEDIQKAQVSGQGDSLHEHIANLAGSPAIKKGILQTVKVVDELVKVMGRHKPENIVIEMARENQTTQKGQKNSRERMKRIEEGIKELGSQILKEHPVENTQLQNEKLYLYYLQNGRDMYVDQELDINRLSDYDVDHIVPQSFLKDDSIDNKVLTRSDKARGKSDNVPSEEVVKKMKNYWRQLLNAKLITQRKFDNLTKAERGGLSELDKAGFIKRQLVETRQITKHVAQILDSRMNTKYDENDKLIREVKVITLKSKLVSDFRKDFQFYKVREINNYHHAHDAYLNAVVGTALIKKYPKLESEFVYGDYKVYDVRKMIAKSEQEIGKATAKYFFYSNIMNFFKTEITLANGEIRKRPLIETNGETGEIVWDKGRDFATVRKVLSMPQVNIVKKTEVQTGGFSKESILPKRNSDKLIARKKDWDPKKYGGFDSPTVAYSVLVVAKVEKGKSKKLKSVKELLGITIMERSSFEKNPIDFLEAKGYKEVKKDLIIKLPKYSLFELENGRKRMLASAGELQKGNELALPSKYVNFLYLASHYEKLKGSPEDNEQKQLFVEQHKHYLDEIIEQISEFSKRVILADANLDKVLSAYNKHRDKPIREQAENIIHLFTLTNLGAPAAFKYFDTTIDRKRYTSTKEVLDATLIHQSITGLYETRIDLSQLGGDGGGGGGGGGGGGTLNIEDEYRLHETSKGPDVPLGSTWLSDFPQAWAETGGMGLAVRQAPLIIPLKATSTPVSIKQYPMSQEARLGIKPHIQRLLDQGILVPCQSPWNTPLLPVKKPGTNDYRPVQDLREVNKRVEDIHPTVPNPYNLLSGLPPSHQWYTVLDLKDAFFCLRLHPTSQSLFAFEWRDPEMGISGQLTWTRLPQGFKNSPTLFNEALHRDLADFRIQHPDLILLQYVDDLLLAATSELDCQQGTRALLQTLGDLGYRASAKKAQICQKQVKYLGYLLKEGQRWLTEARKETVMGQPTPKTPRQLREFLGKAGFCRLFIPGFAEMAAPLYPLTKPGTLFEWGPDQQKAYQEIKQALLTAPALGLPDLTKPFELFVDEKQGYAKGVLTQKLGPWRRPVAYLSKKLDPVAAGWPPCLRMVAAIAVLTKDAGKLTMGQPLVILAPHAVEALVKQPPDRWLSNARMTHYQALLLDTDRVQFGPIVALNPATLLPLPEEGLQHDCLDILAEAHGTRPDLTDQPLPDADHTWYTDGSSFLQEGQRKAGAAVTTETEVVWAKALPAGTSAQRAELIALTQALKMAEGKKLNVYTDSRYAFATAHIHGEIYRRRGWLTSEGKEIKNKDEILALLKALFLPKRLSIIHCPGHQKGNRAEARGNRMADQAAREVATRETPETSTLLAGKRTADGSEFEKRTADGSEFESPKKKAKVE

SEQ ID NO: 2550 - protein, 2096 aa, synthetic construct
  source 1..2096: note = Description of Artificial Sequence: Synthetic polypeptide
MPAAKRVKLDGGDKKYSIGLDIGTNSVGWAVITDEYKVPSKKFKVLGNTDRHSIKKNLIGALLFDSGETAEATRLKRTARRRYTRRKNRICYLQEIFSNEMAKVDDSFFHRLEESFLVEEDKKHERHPIFGNIVDEVAYHEKYPTIYHLRKKLVDSTDKADLRLIYLALAHMIKFRGHFLIEGDLNPDNSDVDKLFIQLVQTYNQLFEENPINASGVDAKAILSARLSKSRRLENLIAQLPGEKKNGLFGNLIALSLGLTPNFKSNFDLAEDAKLQLSKDTYDDDLDNLLAQIGDQYADLFLAAKNLSDAILLSDILRVNTEITKAPLSASMIKRYDEHHQDLTLLKALVRQQLPEKYKEIFFDQSKNGYAGYIDGGASQEEFYKFIKPILEKMDGTEELLVKLNREDLLRKQRTFDNGSIPHQIHLGELHAILRRQEDFYPFLKDNREKIEKILTFRIPYYVGPLARGNSRFAWMTRKSEETITPWNFEEVVDKGASAQSFIERMTNFDKNLPNEKVLPKHSLLYEYFTVYNELTKVKYVTEGMRKPAFLSGEQKKAIVDLLFKTNRKVTVKQLKEDYFKKIECFDSVEISGVEDRFNASLGTYHDLLKIIKDKDFLDNEENEDILEDIVLTLTLFEDREMIEERLKTYAHLFDDKVMKQLKRRRYTGWGRLSRKLINGIRDKQSGKTILDFLKSDGFANRNFMQLIHDDSLTFKEDIQKAQVSGQGDSLHEHIANLAGSPAIKKGILQTVKVVDELVKVMGRHKPENIVIEMARENQTTQKGQKNSRERMKRIEEGIKELGSQILKEHPVENTQLQNEKLYLYYLQNGRDMYVDQELDINRLSDYDVDHIVPQSFLKDDSIDNKVLTRSDKARGKSDNVPSEEVVKKMKNYWRQLLNAKLITQRKFDNLTKAERGGLSELDKAGFIKRQLVETRQITKHVAQILDSRMNTKYDENDKLIREVKVITLKSKLVSDFRKDFQFYKVREINNYHHAHDAYLNAVVGTALIKKYPKLESEFVYGDYKVYDVRKMIAKSEQEIGKATAKYFFYSNIMNFFKTEITLANGEIRKRPLIETNGETGEIVWDKGRDFATVRKVLSMPQVNIVKKTEVQTGGFSKESILPKRNSDKLIARKKDWDPKKYGGFDSPTVAYSVLVVAKVEKGKSKKLKSVKELLGITIMERSSFEKNPIDFLEAKGYKEVKKDLIIKLPKYSLFELENGRKRMLASAGELQKGNELALPSKYVNFLYLASHYEKLKGSPEDNEQKQLFVEQHKHYLDEIIEQISEFSKRVILADANLDKVLSAYNKHRDKPIREQAENIIHLFTLTNLGAPAAFKYFDTTIDRKRYTSTKEVLDATLIHQSITGLYETRIDLSQLGGDGGGSSEAAAKGGGGGTLNIEDEYRLHETSKGPDVPLGSTWLSDFPQAWAETGGMGLAVRQAPLIIPLKATSTPVSIKQYPMSQEARLGIKPHIQRLLDQGILVPCQSPWNTPLLPVKKPGTNDYRPVQDLREVNKRVEDIHPTVPNPYNLLSGLPPSHQWYTVLDLKDAFFCLRLHPTSQSLFAFEWRDPEMGISGQLTWTRLPQGFKNSPTLFNEALHRDLADFRIQHPDLILLQYVDDLLLAATSELDCQQGTRALLQTLGDLGYRASAKKAQICQKQVKYLGYLLKEGQRWLTEARKETVMGQPTPKTPRQLREFLGKAGFCRLFIPGFAEMAAPLYPLTKPGTLFEWGPDQQKAYQEIKQALLTAPALGLPDLTKPFELFVDEKQGYAKGVLTQKLGPWRRPVAYLSKKLDPVAAGWPPCLRMVAAIAVLTKDAGKLTMGQPLVILAPHAVEALVKQPPDRWLSNARMTHYQALLLDTDRVQFGPIVALNPATLLPLPEEGLQHDCLDILAEAHGTRPDLTDQPLPDADHTWYTDGSSFLQEGQRKAGAAVTTETEVVWAKALPAGTSAQRAELIALTQALKMAEGKKLNVYTDSRYAFATAHIHGEIYRRRGWLTSEGKEIKNKDEILALLKALFLPKRLSIIHCPGHQKGNRAEARGNRMADQAAREVATRETPETSTLLAGKRTADGSEFEKRTADGSEFESPKKKAKVE

SEQ ID NO: 2551 - protein, 2096 aa, synthetic construct
  source 1..2096: note = Description of Artificial Sequence: Synthetic polypeptide
MPAAKRVKLDGGDKKYSIGLDIGTNSVGWAVITDEYKVPSKKFKVLGNTDRHSIKKNLIGALLFDSGETAEATRLKRTARRRYTRRKNRICYLQEIFSNEMAKVDDSFFHRLEESFLVEEDKKHERHPIFGNIVDEVAYHEKYPTIYHLRKKLVDSTDKADLRLIYLALAHMIKFRGHFLIEGDLNPDNSDVDKLFIQLVQTYNQLFEENPINASGVDAKAILSARLSKSRRLENLIAQLPGEKKNGLFGNLIALSLGLTPNFKSNFDLAEDAKLQLSKDTYDDDLDNLLAQIGDQYADLFLAAKNLSDAILLSDILRVNTEITKAPLSASMIKRYDEHHQDLTLLKALVRQQLPEKYKEIFFDQSKNGYAGYIDGGASQEEFYKFIKPILEKMDGTEELLVKLNREDLLRKQRTFDNGSIPHQIHLGELHAILRRQEDFYPFLKDNREKIEKILTFRIPYYVGPLARGNSRFAWMTRKSEETITPWNFEEVVDKGASAQSFIERMTNFDKNLPNEKVLPKHSLLYEYFTVYNELTKVKYVTEGMRKPAFLSGEQKKAIVDLLFKTNRKVTVKQLKEDYFKKIECFDSVEISGVEDRFNASLGTYHDLLKIIKDKDFLDNEENEDILEDIVLTLTLFEDREMIEERLKTYAHLFDDKVMKQLKRRRYTGWGRLSRKLINGIRDKQSGKTILDFLKSDGFANRNFMQLIHDDSLTFKEDIQKAQVSGQGDSLHEHIANLAGSPAIKKGILQTVKVVDELVKVMGRHKPENIVIEMARENQTTQKGQKNSRERMKRIEEGIKELGSQILKEHPVENTQLQNEKLYLYYLQNGRDMYVDQELDINRLSDYDVDHIVPQSFLKDDSIDNKVLTRSDKARGKSDNVPSEEVVKKMKNYWRQLLNAKLITQRKFDNLTKAERGGLSELDKAGFIKRQLVETRQITKHVAQILDSRMNTKYDENDKLIREVKVITLKSKLVSDFRKDFQFYKVREINNYHHAHDAYLNAVVGTALIKKYPKLESEFVYGDYKVYDVRKMIAKSEQEIGKATAKYFFYSNIMNFFKTEITLANGEIRKRPLIETNGETGEIVWDKGRDFATVRKVLSMPQVNIVKKTEVQTGGFSKESILPKRNSDKLIARKKDWDPKKYGGFDSPTVAYSVLVVAKVEKGKSKKLKSVKELLGITIMERSSFEKNPIDFLEAKGYKEVKKDLIIKLPKYSLFELENGRKRMLASAGELQKGNELALPSKYVNFLYLASHYEKLKGSPEDNEQKQLFVEQHKHYLDEIIEQISEFSKRVILADANLDKVLSAYNKHRDKPIREQAENIIHLFTLTNLGAPAAFKYFDTTIDRKRYTSTKEVLDATLIHQSITGLYETRIDLSQLGGDGGEAAAKGGSGGGGGTLNIEDEYRLHETSKGPDVPLGSTWLSDFPQAWAETGGMGLAVRQAPLIIPLKATSTPVSIKQYPMSQEARLGIKPHIQRLLDQGILVPCQSPWNTPLLPVKKPGTNDYRPVQDLREVNKRVEDIHPTVPNPYNLLSGLPPSHQWYTVLDLKDAFFCLRLHPTSQSLFAFEWRDPEMGISGQLTWTRLPQGFKNSPTLFNEALHRDLADFRIQHPDLILLQYVDDLLLAATSELDCQQGTRALLQTLGDLGYRASAKKAQICQKQVKYLGYLLKEGQRWLTEARKETVMGQPTPKTPRQLREFLGKAGFCRLFIPGFAEMAAPLYPLTKPGTLFEWGPDQQKAYQEIKQALLTAPALGLPDLTKPFELFVDEKQGYAKGVLTQKLGPWRRPVAYLSKKLDPVAAGWPPCLRMVAAIAVLTKDAGKLTMGQPLVILAPHAVEALVKQPPDRWLSNARMTHYQALLLDTDRVQFGPIVALNPATLLPLPEEGLQHDCLDILAEAHGTRPDLTDQPLPDADHTWYTDGSSFLQEGQRKAGAAVTTETEVVWAKALPAGTSAQRAELIALTQALKMAEGKKLNVYTDSRYAFATAHIHGEIYRRRGWLTSEGKEIKNKDEILALLKALFLPKRLSIIHCPGHQKGNRAEARGNRMADQAAREVATRETPETSTLLAGKRTADGSEFEKRTADGSEFESPKKKAKVE

SEQ ID NO: 2552 - protein, 2094 aa, synthetic construct
  source 1..2094: note = Description of Artificial Sequence: Synthetic polypeptide
MPAAKRVKLDGGDKKYSIGLDIGTNSVGWAVITDEYKVPSKKFKVLGNTDRHSIKKNLIGALLFDSGETAEATRLKRTARRRYTRRKNRICYLQEIFSNEMAKVDDSFFHRLEESFLVEEDKKHERHPIFGNIVDEVAYHEKYPTIYHLRKKLVDSTDKADLRLIYLALAHMIKFRGHFLIEGDLNPDNSDVDKLFIQLVQTYNQLFEENPINASGVDAKAILSARLSKSRRLENLIAQLPGEKKNGLFGNLIALSLGLTPNFKSNFDLAEDAKLQLSKDTYDDDLDNLLAQIGDQYADLFLAAKNLSDAILLSDILRVNTEITKAPLSASMIKRYDEHHQDLTLLKALVRQQLPEKYKEIFFDQSKNGYAGYIDGGASQEEFYKFIKPILEKMDGTEELLVKLNREDLLRKQRTFDNGSIPHQIHLGELHAILRRQEDFYPFLKDNREKIEKILTFRIPYYVGPLARGNSRFAWMTRKSEETITPWNFEEVVDKGASAQSFIERMTNFDKNLPNEKVLPKHSLLYEYFTVYNELTKVKYVTEGMRKPAFLSGEQKKAIVDLLFKTNRKVTVKQLKEDYFKKIECFDSVEISGVEDRFNASLGTYHDLLKIIKDKDFLDNEENEDILEDIVLTLTLFEDREMIEERLKTYAHLFDDKVMKQLKRRRYTGWGRLSRKLINGIRDKQSGKTILDFLKSDGFANRNFMQLIHDDSLTFKEDIQKAQVSGQGDSLHEHIANLAGSPAIKKGILQTVKVVDELVKVMGRHKPENIVIEMARENQTTQKGQKNSRERMKRIEEGIKELGSQILKEHPVENTQLQNEKLYLYYLQNGRDMYVDQELDINRLSDYDVDHIVPQSFLKDDSIDNKVLTRSDKARGKSDNVPSEEVVKKMKNYWRQLLNAKLITQRKFDNLTKAERGGLSELDKAGFIKRQLVETRQITKHVAQILDSRMNTKYDENDKLIREVKVITLKSKLVSDFRKDFQFYKVREINNYHHAHDAYLNAVVGTALIKKYPKLESEFVYGDYKVYDVRKMIAKSEQEIGKATAKYFFYSNIMNFFKTEITLANGEIRKRPLIETNGETGEIVWDKGRDFATVRKVLSMPQVNIVKKTEVQTGGFSKESILPKRNSDKLIARKKDWDPKKYGGFDSPTVAYSVLVVAKVEKGKSKKLKSVKELLGITIMERSSFEKNPIDFLEAKGYKEVKKDLIIKLPKYSLFELENGRKRMLASAGELQKGNELALPSKYVNFLYLASHYEKLKGSPEDNEQKQLFVEQHKHYLDEIIEQISEFSKRVILADANLDKVLSAYNKHRDKPIREQAENIIHLFTLTNLGAPAAFKYFDTTIDRKRYTSTKEVLDATLIHQSITGLYETRIDLSQLGGDGGGSSPAPGGSGGTLNIEDEYRLHETSKGPDVPLGSTWLSDFPQAWAETGGMGLAVRQAPLIIPLKATSTPVSIKQYPMSQEARLGIKPHIQRLLDQGILVPCQSPWNTPLLPVKKPGTNDYRPVQDLREVNKRVEDIHPTVPNPYNLLSGLPPSHQWYTVLDLKDAFFCLRLHPTSQSLFAFEWRDPEMGISGQLTWTRLPQGFKNSPTLFNEALHRDLADFRIQHPDLILLQYVDDLLLAATSELDCQQGTRALLQTLGDLGYRASAKKAQICQKQVKYLGYLLKEGQRWLTEARKETVMGQPTPKTPRQLREFLGKAGFCRLFIPGFAEMAAPLYPLTKPGTLFEWGPDQQKAYQEIKQALLTAPALGLPDLTKPFELFVDEKQGYAKGVLTQKLGPWRRPVAYLSKKLDPVAAGWPPCLRMVAAIAVLTKDAGKLTMGQPLVILAPHAVEALVKQPPDRWLSNARMTHYQALLLDTDRVQFGPIVALNPATLLPLPEEGLQHDCLDILAEAHGTRPDLTDQPLPDADHTWYTDGSSFLQEGQRKAGAAVTTETEVVWAKALPAGTSAQRAELIALTQALKMAEGKKLNVYTDSRYAFATAHIHGEIYRRRGWLTSEGKEIKNKDEILALLKALFLPKRLSIIHCPGHQKGNRAEARGNRMADQAAREVATRETPETSTLLAGKRTADGSEFEKRTADGSEFESPKKKAKVE

SEQ ID NO: 2553 - protein, 2096 aa, synthetic construct
  source 1..2096: note = Description of Artificial Sequence: Synthetic polypeptide
MPAAKRVKLDGGDKKYSIGLDIGTNSVGWAVITDEYKVPSKKFKVLGNTDRHSIKKNLIGALLFDSGETAEATRLKRTARRRYTRRKNRICYLQEIFSNEMAKVDDSFFHRLEESFLVEEDKKHERHPIFGNIVDEVAYHEKYPTIYHLRKKLVDSTDKADLRLIYLALAHMIKFRGHFLIEGDLNPDNSDVDKLFIQLVQTYNQLFEENPINASGVDAKAILSARLSKSRRLENLIAQLPGEKKNGLFGNLIALSLGLTPNFKSNFDLAEDAKLQLSKDTYDDDLDNLLAQIGDQYADLFLAAKNLSDAILLSDILRVNTEITKAPLSASMIKRYDEHHQDLTLLKALVRQQLPEKYKEIFFDQSKNGYAGYIDGGASQEEFYKFIKPILEKMDGTEELLVKLNREDLLRKQRTFDNGSIPHQIHLGELHAILRRQEDFYPFLKDNREKIEKILTFRIPYYVGPLARGNSRFAWMTRKSEETITPWNFEEVVDKGASAQSFIERMTNFDKNLPNEKVLPKHSLLYEYFTVYNELTKVKYVTEGMRKPAFLSGEQKKAIVDLLFKTNRKVTVKQLKEDYFKKIECFDSVEISGVEDRFNASLGTYHDLLKIIKDKDFLDNEENEDILEDIVLTLTLFEDREMIEERLKTYAHLFDDKVMKQLKRRRYTGWGRLSRKLINGIRDKQSGKTILDFLKSDGFANRNFMQLIHDDSLTFKEDIQKAQVSGQGDSLHEHIANLAGSPAIKKGILQTVKVVDELVKVMGRHKPENIVIEMARENQTTQKGQKNSRERMKRIEEGIKELGSQILKEHPVENTQLQNEKLYLYYLQNGRDMYVDQELDINRLSDYDVDHIVPQSFLKDDSIDNKVLTRSDKARGKSDNVPSEEVVKKMKNYWRQLLNAKLITQRKFDNLTKAERGGLSELDKAGFIKRQLVETRQITKHVAQILDSRMNTKYDENDKLIREVKVITLKSKLVSDFRKDFQFYKVREINNYHHAHDAYLNAVVGTALIKKYPKLESEFVYGDYKVYDVRKMIAKSEQEIGKATAKYFFYSNIMNFFKTEITLANGEIRKRPLIETNGETGEIVWDKGRDFATVRKVLSMPQVNIVKKTEVQTGGFSKESILPKRNSDKLIARKKDWDPKKYGGFDSPTVAYSVLVVAKVEKGKSKKLKSVKELLGITIMERSSFEKNPIDFLEAKGYKEVKKDLIIKLPKYSLFELENGRKRMLASAGELQKGNELALPSKYVNFLYLASHYEKLKGSPEDNEQKQLFVEQHKHYLDEIIEQISEFSKRVILADANLDKVLSAYNKHRDKPIREQAENIIHLFTLTNLGAPAAFKYFDTTIDRKRYTSTKEVLDATLIHQSITGLYETRIDLSQLGGDGGGSSEAAAKGGSGGTLNIEDEYRLHETSKGPDVPLGSTWLSDFPQAWAETGGMGLAVRQAPLIIPLKATSTPVSIKQYPMSQEARLGIKPHIQRLLDQGILVPCQSPWNTPLLPVKKPGTNDYRPVQDLREVNKRVEDIHPTVPNPYNLLSGLPPSHQWYTVLDLKDAFFCLRLHPTSQSLFAFEWRDPEMGISGQLTWTRLPQGFKNSPTLFNEALHRDLADFRIQHPDLILLQYVDDLLLAATSELDCQQGTRALLQTLGDLGYRASAKKAQICQKQVKYLGYLLKEGQRWLTEARKETVMGQPTPKTPRQLREFLGKAGFCRLFIPGFAEMAAPLYPLTKPGTLFEWGPDQQKAYQEIKQALLTAPALGLPDLTKPFELFVDEKQGYAKGVLTQKLGPWRRPVAYLSKKLDPVAAGWPPCLRMVAAIAVLTKDAGKLTMGQPLVILAPHAVEALVKQPPDRWLSNARMTHYQALLLDTDRVQFGPIVALNPATLLPLPEEGLQHDCLDILAEAHGTRPDLTDQPLPDADHTWYTDGSSFLQEGQRKAGAAVTTETEVVWAKALPAGTSAQRAELIALTQALKMAEGKKLNVYTDSRYAFATAHIHGEIYRRRGWLTSEGKEIKNKDEILALLKALFLPKRLSIIHCPGHQKGNRAEARGNRMADQAAREVATRETPETSTLLAGKRTADGSEFEKRTADGSEFESPKKKAKVE

SEQ ID NO: 2554 - protein, 2094 aa, synthetic construct
  source 1..2094: note = Description of Artificial Sequence: Synthetic polypeptide
MPAAKRVKLDGGDKKYSIGLDIGTNSVGWAVITDEYKVPSKKFKVLGNTDRHSIKKNLIGALLFDSGETAEATRLKRTARRRYTRRKNRICYLQEIFSNEMAKVDDSFFHRLEESFLVEEDKKHERHPIFGNIVDEVAYHEKYPTIYHLRKKLVDSTDKADLRLIYLALAHMIKFRGHFLIEGDLNPDNSDVDKLFIQLVQTYNQLFEENPINASGVDAKAILSARLSKSRRLENLIAQLPGEKKNGLFGNLIALSLGLTPNFKSNFDLAEDAKLQLSKDTYDDDLDNLLAQIGDQYADLFLAAKNLSDAILLSDILRVNTEITKAPLSASMIKRYDEHHQDLTLLKALVRQQLPEKYKEIFFDQSKNGYAGYIDGGASQEEFYKFIKPILEKMDGTEELLVKLNREDLLRKQRTFDNGSIPHQIHLGELHAILRRQEDFYPFLKDNREKIEKILTFRIPYYVGPLARGNSRFAWMTRKSEETITPWNFEEVVDKGASAQSFIERMTNFDKNLPNEKVLPKHSLLYEYFTVYNELTKVKYVTEGMRKPAFLSGEQKKAIVDLLFKTNRKVTVKQLKEDYFKKIECFDSVEISGVEDRFNASLGTYHDLLKIIKDKDFLDNEENEDILEDIVLTLTLFEDREMIEERLKTYAHLFDDKVMKQLKRRRYTGWGRLSRKLINGIRDKQSGKTILDFLKSDGFANRNFMQLIHDDSLTFKEDIQKAQVSGQGDSLHEHIANLAGSPAIKKGILQTVKVVDELVKVMGRHKPENIVIEMARENQTTQKGQKNSRERMKRIEEGIKELGSQILKEHPVENTQLQNEKLYLYYLQNGRDMYVDQELDINRLSDYDVDHIVPQSFLKDDSIDNKVLTRSDKARGKSDNVPSEEVVKKMKNYWRQLLNAKLITQRKFDNLTKAERGGLSELDKAGFIKRQLVETRQITKHVAQILDSRMNTKYDENDKLIREVKVITLKSKLVSDFRKDFQFYKVREINNYHHAHDAYLNAVVGTALIKKYPKLESEFVYGDYKVYDVRKMIAKSEQEIGKATAKYFFYSNIMNFFKTEITLANGEIRKRPLIETNGETGEIVWDKGRDFATVRKVLSMPQVNIVKKTEVQTGGFSKESILPKRNSDKLIARKKDWDPKKYGGFDSPTVAYSVLVVAKVEKGKSKKLKSVKELLGITIMERSSFEKNPIDFLEAKGYKEVKKDLIIKLPKYSLFELENGRKRMLASAGELQKGNELALPSKYVNFLYLASHYEKLKGSPEDNEQKQLFVEQHKHYLDEIIEQISEFSKRVILADANLDKVLSAYNKHRDKPIREQAENIIHLFTLTNLGAPAAFKYFDTTIDRKRYTSTKEVLDATLIHQSITGLYETRIDLSQLGGDGGGSSGGGPAPGGTLNIEDEYRLHETSKGPDVPLGSTWLSDFPQAWAETGGMGLAVRQAPLIIPLKATSTPVSIKQYPMSQEARLGIKPHIQRLLDQGILVPCQSPWNTPLLPVKKPGTNDYRPVQDLREVNKRVEDIHPTVPNPYNLLSGLPPSHQWYTVLDLKDAFFCLRLHPTSQSLFAFEWRDPEMGISGQLTWTRLPQGFKNSPTLFNEALHRDLADFRIQHPDLILLQYVDDLLLAATSELDCQQGTRALLQTLGDLGYRASAKKAQICQKQVKYLGYLLKEGQRWLTEARKETVMGQPTPKTPRQLREFLGKAGFCRLFIPGFAEMAAPLYPLTKPGTLFEWGPDQQKAYQEIKQALLTAPALGLPDLTKPFELFVDEKQGYAKGVLTQKLGPWRRPVAYLSKKLDPVAAGWPPCLRMVAAIAVLTKDAGKLTMGQPLVILAPHAVEALVKQPPDRWLSNARMTHYQALLLDTDRVQFGPIVALNPATLLPLPEEGLQHDCLDILAEAHGTRPDLTDQPLPDADHTWYTDGSSFLQEGQRKAGAAVTTETEVVWAKALPAGTSAQRAELIALTQALKMAEGKKLNVYTDSRYAFATAHIHGEIYRRRGWLTSEGKEIKNKDEILALLKALFLPKRLSIIHCPGHQKGNRAEARGNRMADQAAREVATRETPETSTLLAGKRTADGSEFEKRTADGSEFESPKKKAKVE

SEQ ID NO: 2555 - protein, 2100 aa, synthetic construct
  source 1..2100: note = Description of Artificial Sequence: Synthetic polypeptide
MPAAKRVKLDGGDKKYSIGLDIGTNSVGWAVITDEYKVPSKKFKVLGNTDRHSIKKNLIGALLFDSGETAEATRLKRTARRRYTRRKNRICYLQEIFSNEMAKVDDSFFHRLEESFLVEEDKKHERHPIFGNIVDEVAYHEKYPTIYHLRKKLVDSTDKADLRLIYLALAHMIKFRGHFLIEGDLNPDNSDVDKLFIQLVQTYNQLFEENPINASGVDAKAILSARLSKSRRLENLIAQLPGEKKNGLFGNLIALSLGLTPNFKSNFDLAEDAKLQLSKDTYDDDLDNLLAQIGDQYADLFLAAKNLSDAILLSDILRVNTEITKAPLSASMIKRYDEHHQDLTLLKALVRQQLPEKYKEIFFDQSKNGYAGYIDGGASQEEFYKFIKPILEKMDGTEELLVKLNREDLLRKQRTFDNGSIPHQIHLGELHAILRRQEDFYPFLKDNREKIEKILTFRIPYYVGPLARGNSRFAWMTRKSEETITPWNFEEVVDKGASAQSFIERMTNFDKNLPNEKVLPKHSLLYEYFTVYNELTKVKYVTEGMRKPAFLSGEQKKAIVDLLFKTNRKVTVKQLKEDYFKKIECFDSVEISGVEDRFNASLGTYHDLLKIIKDKDFLDNEENEDILEDIVLTLTLFEDREMIEERLKTYAHLFDDKVMKQLKRRRYTGWGRLSRKLINGIRDKQSGKTILDFLKSDGFANRNFMQLIHDDSLTFKEDIQKAQVSGQGDSLHEHIANLAGSPAIKKGILQTVKVVDELVKVMGRHKPENIVIEMARENQTTQKGQKNSRERMKRIEEGIKELGSQILKEHPVENTQLQNEKLYLYYLQNGRDMYVDQELDINRLSDYDVDHIVPQSFLKDDSIDNKVLTRSDKARGKSDNVPSEEVVKKMKNYWRQLLNAKLITQRKFDNLTKAERGGLSELDKAGFIKRQLVETRQITKHVAQILDSRMNTKYDENDKLIREVKVITLKSKLVSDFRKDFQFYKVREINNYHHAHDAYLNAVVGTALIKKYPKLESEFVYGDYKVYDVRKMIAKSEQEIGKATAKYFFYSNIMNFFKTEITLANGEIRKRPLIETNGETGEIVWDKGRDFATVRKVLSMPQVNIVKKTEVQTGGFSKESILPKRNSDKLIARKKDWDPKKYGGFDSPTVAYSVLVVAKVEKGKSKKLKSVKELLGITIMERSSFEKNPIDFLEAKGYKEVKKDLIIKLPKYSLFELENGRKRMLASAGELQKGNELALPSKYVNFLYLASHYEKLKGSPEDNEQKQLFVEQHKHYLDEIIEQISEFSKRVILADANLDKVLSAYNKHRDKPIREQAENIIHLFTLTNLGAPAAFKYFDTTIDRKRYTSTKEVLDATLIHQSITGLYETRIDLSQLGGDGGGGSGGSGGSGGSGGSGGTLNIEDEYRLHETSKGPDVPLGSTWLSDFPQAWAETGGMGLAVRQAPLIIPLKATSTPVSIKQYPMSQEARLGIKPHIQRLLDQGILVPCQSPWNTPLLPVKKPGTNDYRPVQDLREVNKRVEDIHPTVPNPYNLLSGLPPSHQWYTVLDLKDAFFCLRLHPTSQSLFAFEWRDPEMGISGQLTWTRLPQGFKNSPTLFNEALHRDLADFRIQHPDLILLQYVDDLLLAATSELDCQQGTRALLQTLGDLGYRASAKKAQICQKQVKYLGYLLKEGQRWLTEARKETVMGQPTPKTPRQLREFLGKAGFCRLFIPGFAEMAAPLYPLTKPGTLFEWGPDQQKAYQEIKQALLTAPALGLPDLTKPFELFVDEKQGYAKGVLTQKLGPWRRPVAYLSKKLDPVAAGWPPCLRMVAAIAVLTKDAGKLTMGQPLVILAPHAVEALVKQPPDRWLSNARMTHYQALLLDTDRVQFGPIVALNPATLLPLPEEGLQHDCLDILAEAHGTRPDLTDQPLPDADHTWYTDGSSFLQEGQRKAGAAVTTETEVVWAKALPAGTSAQRAELIALTQALKMAEGKKLNVYTDSRYAFATAHIHGEIYRRRGWLTSEGKEIKNKDEILALLKALFLPKRLSIIHCPGHQKGNRAEARGNRMADQAAREVATRETPETSTLLAGKRTADGSEFEKRTADGSEFESPKKKAKVE

SEQ ID NO: 2556 - protein, 2096 aa, synthetic construct
  source 1..2096: note = Description of Artificial Sequence: Synthetic polypeptide
MPAAKRVKLDGGDKKYSIGLDIGTNSVGWAVITDEYKVPSKKFKVLGNTDRHSIKKNLIGALLFDSGETAEATRLKRTARRRYTRRKNRICYLQEIFSNEMAKVDDSFFHRLEESFLVEEDKKHERHPIFGNIVDEVAYHEKYPTIYHLRKKLVDSTDKADLRLIYLALAHMIKFRGHFLIEGDLNPDNSDVDKLFIQLVQTYNQLFEENPINASGVDAKAILSARLSKSRRLENLIAQLPGEKKNGLFGNLIALSLGLTPNFKSNFDLAEDAKLQLSKDTYDDDLDNLLAQIGDQYADLFLAAKNLSDAILLSDILRVNTEITKAPLSASMIKRYDEHHQDLTLLKALVRQQLPEKYKEIFFDQSKNGYAGYIDGGASQEEFYKFIKPILEKMDGTEELLVKLNREDLLRKQRTFDNGSIPHQIHLGELHAILRRQEDFYPFLKDNREKIEKILTFRIPYYVGPLARGNSRFAWMTRKSEETITPWNFEEVVDKGASAQSFIERMTNFDKNLPNEKVLPKHSLLYEYFTVYNELTKVKYVTEGMRKPAFLSGEQKKAIVDLLFKTNRKVTVKQLKEDYFKKIECFDSVEISGVEDRFNASLGTYHDLLKIIKDKDFLDNEENEDILEDIVLTLTLFEDREMIEERLKTYAHLFDDKVMKQLKRRRYTGWGRLSRKLINGIRDKQSGKTILDFLKSDGFANRNFMQLIHDDSLTFKEDIQKAQVSGQGDSLHEHIANLAGSPAIKKGILQTVKVVDELVKVMGRHKPENIVIEMARENQTTQKGQKNSRERMKRIEEGIKELGSQILKEHPVENTQLQNEKLYLYYLQNGRDMYVDQELDINRLSDYDVDHIVPQSFLKDDSIDNKVLTRSDKARGKSDNVPSEEVVKKMKNYWRQLLNAKLITQRKFDNLTKAERGGLSELDKAGFIKRQLVETRQITKHVAQILDSRMNTKYDENDKLIREVKVITLKSKLVSDFRKDFQFYKVREINNYHHAHDAYLNAVVGTALIKKYPKLESEFVYGDYKVYDVRKMIAKSEQEIGKATAKYFFYSNIMNFFKTEITLANGEIRKRPLIETNGETGEIVWDKGRDFATVRKVLSMPQVNIVKKTEVQTGGFSKESILPKRNSDKLIARKKDWDPKKYGGFDSPTVAYSVLVVAKVEKGKSKKLKSVKELLGITIMERSSFEKNPIDFLEAKGYKEVKKDLIIKLPKYSLFELENGRKRMLASAGELQKGNELALPSKYVNFLYLASHYEKLKGSPEDNEQKQLFVEQHKHYLDEIIEQISEFSKRVILADANLDKVLSAYNKHRDKPIREQAENIIHLFTLTNLGAPAAFKYFDTTIDRKRYTSTKEVLDATLIHQSITGLYETRIDLSQLGGDGGEAAAKGGGPAPGGTLNIEDEYRLHETSKGPDVPLGSTWLSDFPQAWAETGGMGLAVRQAPLIIPLKATSTPVSIKQYPMSQEARLGIKPHIQRLLDQGILVPCQSPWNTPLLPVKKPGTNDYRPVQDLREVNKRVEDIHPTVPNPYNLLSGLPPSHQWYTVLDLKDAFFCLRLHPTSQSLFAFEWRDPEMGISGQLTWTRLPQGFKNSPTLFNEALHRDLADFRIQHPDLILLQYVDDLLLAATSELDCQQGTRALLQTLGDLGYRASAKKAQICQKQVKYLGYLLKEGQRWLTEARKETVMGQPTPKTPRQLREFLGKAGFCRLFIPGFAEMAAPLYPLTKPGTLFEWGPDQQKAYQEIKQALLTAPALGLPDLTKPFELFVDEKQGYAKGVLTQKLGPWRRPVAYLSKKLDPVAAGWPPCLRMVAAIAVLTKDAGKLTMGQPLVILAPHAVEALVKQPPDRWLSNARMTHYQALLLDTDRVQFGPIVALNPATLLPLPEEGLQHDCLDILAEAHGTRPDLTDQPLPDADHTWYTDGSSFLQEGQRKAGAAVTTETEVVWAKALPAGTSAQRAELIALTQALKMAEGKKLNVYTDSRYAFATAHIHGEIYRRRGWLTSEGKEIKNKDEILALLKALFLPKRLSIIHCPGHQKGNRAEARGNRMADQAAREVATRETPETSTLLAGKRTADGSEFEKRTADGSEFESPKKKAKVE

SEQ ID NO: 2557 - protein, 2094 aa, synthetic construct
  source 1..2094: note = Description of Artificial Sequence: Synthetic polypeptide
MPAAKRVKLDGGDKKYSIGLDIGTNSVGWAVITDEYKVPSKKFKVLGNTDRHSIKKNLIGALLFDSGETAEATRLKRTARRRYTRRKNRICYLQEIFSNEMAKVDDSFFHRLEESFLVEEDKKHERHPIFGNIVDEVAYHEKYPTIYHLRKKLVDSTDKADLRLIYLALAHMIKFRGHFLIEGDLNPDNSDVDKLFIQLVQTYNQLFEENPINASGVDAKAILSARLSKSRRLENLIAQLPGEKKNGLFGNLIALSLGLTPNFKSNFDLAEDAKLQLSKDTYDDDLDNLLAQIGDQYADLFLAAKNLSDAILLSDILRVNTEITKAPLSASMIKRYDEHHQDLTLLKALVRQQLPEKYKEIFFDQSKNGYAGYIDGGASQEEFYKFIKPILEKMDGTEELLVKLNREDLLRKQRTFDNGSIPHQIHLGELHAILRRQEDFYPFLKDNREKIEKILTFRIPYYVGPLARGNSRFAWMTRKSEETITPWNFEEVVDKGASAQSFIERMTNFDKNLPNEKVLPKHSLLYEYFTVYNELTKVKYVTEGMRKPAFLSGEQKKAIVDLLFKTNRKVTVKQLKEDYFKKIECFDSVEISGVEDRFNASLGTYHDLLKIIKDKDFLDNEENEDILEDIVLTLTLFEDREMIEERLKTYAHLFDDKVMKQLKRRRYTGWGRLSRKLINGIRDKQSGKTILDFLKSDGFANRNFMQLIHDDSLTFKEDIQKAQVSGQGDSLHEHIANLAGSPAIKKGILQTVKVVDELVKVMGRHKPENIVIEMARENQTTQKGQKNSRERMKRIEEGIKELGSQILKEHPVENTQLQNEKLYLYYLQNGRDMYVDQELDINRLSDYDVDHIVPQSFLKDDSIDNKVLTRSDKARGKSDNVPSEEVVKKMKNYWRQLLNAKLITQRKFDNLTKAERGGLSELDKAGFIKRQLVETRQITKHVAQILDSRMNTKYDENDKLIREVKVITLKSKLVSDFRKDFQFYKVREINNYHHAHDAYLNAVVGTALIKKYPKLESEFVYGDYKVYDVRKMIAKSEQEIGKATAKYFFYSNIMNFFKTEITLANGEIRKRPLIETNGETGEIVWDKGRDFATVRKVLSMPQVNIVKKTEVQTGGFSKESILPKRNSDKLIARKKDWDPKKYGGFDSPTVAYSVLVVAKVEKGKSKKLKSVKELLGITIMERSSFEKNPIDFLEAKGYKEVKKDLIIKLPKYSLFELENGRKRMLASAGELQKGNELALPSKYVNFLYLASHYEKLKGSPEDNEQKQLFVEQHKHYLDEIIEQISEFSKRVILADANLDKVLSAYNKHRDKPIREQAENIIHLFTLTNLGAPAAFKYFDTTIDRKRYTSTKEVLDATLIHQSITGLYETRIDLSQLGGDGGGSSGSSGSSGGTLNIEDEYRLHETSKGPDVPLGSTWLSDFPQAWAETGGMGLAVRQAPLIIPLKATSTPVSIKQYPMSQEARLGIKPHIQRLLDQGILVPCQSPWNTPLLPVKKPGTNDYRPVQDLREVNKRVEDIHPTVPNPYNLLSGLPPSHQWYTVLDLKDAFFCLRLHPTSQSLFAFEWRDPEMGISGQLTWTRLPQGFKNSPTLFNEALHRDLADFRIQHPDLILLQYVDDLLLAATSELDCQQGTRALLQTLGDLGYRASAKKAQICQKQVKYLGYLLKEGQRWLTEARKETVMGQPTPKTPRQLREFLGKAGFCRLFIPGFAEMAAPLYPLTKPGTLFEWGPDQQKAYQEIKQALLTAPALGLPDLTKPFELFVDEKQGYAKGVLTQKLGPWRRPVAYLSKKLDPVAAGWPPCLRMVAAIAVLTKDAGKLTMGQPLVILAPHAVEALVKQPPDRWLSNARMTHYQALLLDTDRVQFGPIVALNPATLLPLPEEGLQHDCLDILAEAHGTRPDLTDQPLPDADHTWYTDGSSFLQEGQRKAGAAVTTETEVVWAKALPAGTSAQRAELIALTQALKMAEGKKLNVYTDSRYAFATAHIHGEIYRRRGWLTSEGKEIKNKDEILALLKALFLPKRLSIIHCPGHQKGNRAEARGNRMADQAAREVATRETPETSTLLAGKRTADGSEFEKRTADGSEFESPKKKAKVE

SEQ ID NO: 2558 - protein, 2094 aa, synthetic construct
  source 1..2094: note = Description of Artificial Sequence: Synthetic polypeptide
MPAAKRVKLDGGDKKYSIGLDIGTNSVGWAVITDEYKVPSKKFKVLGNTDRHSIKKNLIGALLFDSGETAEATRLKRTARRRYTRRKNRICYLQEIFSNEMAKVDDSFFHRLEESFLVEEDKKHERHPIFGNIVDEVAYHEKYPTIYHLRKKLVDSTDKADLRLIYLALAHMIKFRGHFLIEGDLNPDNSDVDKLFIQLVQTYNQLFEENPINASGVDAKAILSARLSKSRRLENLIAQLPGEKKNGLFGNLIALSLGLTPNFKSNFDLAEDAKLQLSKDTYDDDLDNLLAQIGDQYADLFLAAKNLSDAILLSDILRVNTEITKAPLSASMIKRYDEHHQDLTLLKALVRQQLPEKYKEIFFDQSKNGYAGYIDGGASQEEFYKFIKPILEKMDGTEELLVKLNREDLLRKQRTFDNGSIPHQIHLGELHAILRRQEDFYPFLKDNREKIEKILTFRIPYYVGPLARGNSRFAWMTRKSEETITPWNFEEVVDKGASAQSFIERMTNFDKNLPNEKVLPKHSLLYEYFTVYNELTKVKYVTEGMRKPAFLSGEQKKAIVDLLFKTNRKVTVKQLKEDYFKKIECFDSVEISGVEDRFNASLGTYHDLLKIIKDKDFLDNEENEDILEDIVLTLTLFEDREMIEERLKTYAHLFDDKVMKQLKRRRYTGWGRLSRKLINGIRDKQSGKTILDFLKSDGFANRNFMQLIHDDSLTFKEDIQKAQVSGQGDSLHEHIANLAGSPAIKKGILQTVKVVDELVKVMGRHKPENIVIEMARENQTTQKGQKNSRERMKRIEEGIKELGSQILKEHPVENTQLQNEKLYLYYLQNGRDMYVDQELDINRLSDYDVDHIVPQSFLKDDSIDNKVLTRSDKARGKSDNVPSEEVVKKMKNYWRQLLNAKLITQRKFDNLTKAERGGLSELDKAGFIKRQLVETRQITKHVAQILDSRMNTKYDENDKLIREVKVITLKSKLVSDFRKDFQFYKVREINNYHHAHDAYLNAVVGTALIKKYPKLESEFVYGDYKVYDVRKMIAKSEQEIGKATAKYFFYSNIMNFFKTEITLANGEIRKRPLIETNGETGEIVWDKGRDFATVRKVLSMPQVNIVKKTEVQTGGFSKESILPKRNSDKLIARKKDWDPKKYGGFDSPTVAYSVLVVAKVEKGKSKKLKSVKELLGITIMERSSFEKNPIDFLEAKGYKEVKKDLIIKLPKYSLFELENGRKRMLASAGELQKGNELALPSKYVNFLYLASHYEKLKGSPEDNEQKQLFVEQHKHYLDEIIEQISEFSKRVILADANLDKVLSAYNKHRDKPIREQAENIIHLFTLTNLGAPAAFKYFDTTIDRKRYTSTKEVLDATLIHQSITGLYETRIDLSQLGGDGGGGSGSSPAPGGTLNIEDEYRLHETSKGPDVPLGSTWLSDFPQAWAETGGMGLAVRQAPLIIPLKATSTPVSIKQYPMSQEARLGIKPHIQRLLDQGILVPCQSPWNTPLLPVKKPGTNDYRPVQDLREVNKRVEDIHPTVPNPYNLLSGLPPSHQWYTVLDLKDAFFCLRLHPTSQSLFAFEWRDPEMGISGQLTWTRLPQGFKNSPTLFNEALHRDLADFRIQHPDLILLQYVDDLLLAATSELDCQQGTRALLQTLGDLGYRASAKKAQICQKQVKYLGYLLKEGQRWLTEARKETVMGQPTPKTPRQLREFLGKAGFCRLFIPGFAEMAAPLYPLTKPGTLFEWGPDQQKAYQEIKQALLTAPALGLPDLTKPFELFVDEKQGYAKGVLTQKLGPWRRPVAYLSKKLDPVAAGWPPCLRMVAAIAVLTKDAGKLTMGQPLVILAPHAVEALVKQPPDRWLSNARMTHYQALLLDTDRVQFGPIVALNPATLLPLPEEGLQHDCLDILAEAHGTRPDLTDQPLPDADHTWYTDGSSFLQEGQRKAGAAVTTETEVVWAKALPAGTSAQRAELIALTQALKMAEGKKLNVYTDSRYAFATAHIHGEIYRRRGWLTSEGKEIKNKDEILALLKALFLPKRLSIIHCPGHQKGNRAEARGNRMADQAAREVATRETPETSTLLAGKRTADGSEFEKRTADGSEFESPKKKAKVE

SEQ ID NO: 2559 - protein, 2091 aa, synthetic construct
  source 1..2091: note = Description of Artificial Sequence: Synthetic polypeptide
MPAAKRVKLDGGDKKYSIGLDIGTNSVGWAVITDEYKVPSKKFKVLGNTDRHSIKKNLIGALLFDSGETAEATRLKRTARRRYTRRKNRICYLQEIFSNEMAKVDDSFFHRLEESFLVEEDKKHERHPIFGNIVDEVAYHEKYPTIYHLRKKLVDSTDKADLRLIYLALAHMIKFRGHFLIEGDLNPDNSDVDKLFIQLVQTYNQLFEENPINASGVDAKAILSARLSKSRRLENLIAQLPGEKKNGLFGNLIALSLGLTPNFKSNFDLAEDAKLQLSKDTYDDDLDNLLAQIGDQYADLFLAAKNLSDAILLSDILRVNTEITKAPLSASMIKRYDEHHQDLTLLKALVRQQLPEKYKEIFFDQSKNGYAGYIDGGASQEEFYKFIKPILEKMDGTEELLVKLNREDLLRKQRTFDNGSIPHQIHLGELHAILRRQEDFYPFLKDNREKIEKILTFRIPYYVGPLARGNSRFAWMTRKSEETITPWNFEEVVDKGASAQSFIERMTNFDKNLPNEKVLPKHSLLYEYFTVYNELTKVKYVTEGMRKPAFLSGEQKKAIVDLLFKTNRKVTVKQLKEDYFKKIECFDSVEISGVEDRFNASLGTYHDLLKIIKDKDFLDNEENEDILEDIVLTLTLFEDREMIEERLKTYAHLFDDKVMKQLKRRRYTGWGRLSRKLINGIRDKQSGKTILDFLKSDGFANRNFMQLIHDDSLTFKEDIQKAQVSGQGDSLHEHIANLAGSPAIKKGILQTVKVVDELVKVMGRHKPENIVIEMARENQTTQKGQKNSRERMKRIEEGIKELGSQILKEHPVENTQLQNEKLYLYYLQNGRDMYVDQELDINRLSDYDVDHIVPQSFLKDDSIDNKVLTRSDKARGKSDNVPSEEVVKKMKNYWRQLLNAKLITQRKFDNLTKAERGGLSELDKAGFIKRQLVETRQITKHVAQILDSRMNTKYDENDKLIREVKVITLKSKLVSDFRKDFQFYKVREINNYHHAHDAYLNAVVGTALIKKYPKLESEFVYGDYKVYDVRKMIAKSEQEIGKATAKYFFYSNIMNFFKTEITLANGEIRKRPLIETNGETGEIVWDKGRDFATVRKVLSMPQVNIVKKTEVQTGGFSKESILPKRNSDKLIARKKDWDPKKYGGFDSPTVAYSVLVVAKVEKGKSKKLKSVKELLGITIMERSSFEKNPIDFLEAKGYKEVKKDLIIKLPKYSLFELENGRKRMLASAGELQKGNELALPSKYVNFLYLASHYEKLKGSPEDNEQKQLFVEQHKHYLDEIIEQISEFSKRVILADANLDKVLSAYNKHRDKPIREQAENIIHLFTLTNLGAPAAFKYFDTTIDRKRYTSTKEVLDATLIHQSITGLYETRIDLSQLGGDGGGGSGGGGGTLNIEDEYRLHETSKGPDVPLGSTWLSDFPQAWAETGGMGLAVRQAPLIIPLKATSTPVSIKQYPMSQEARLGIKPHIQRLLDQGILVPCQSPWNTPLLPVKKPGTNDYRPVQDLREVNKRVEDIHPTVPNPYNLLSGLPPSHQWYTVLDLKDAFFCLRLHPTSQSLFAFEWRDPEMGISGQLTWTRLPQGFKNSPTLFNEALHRDLADFRIQHPDLILLQYVDDLLLAATSELDCQQGTRALLQTLGDLGYRASAKKAQICQKQVKYLGYLLKEGQRWLTEARKETVMGQPTPKTPRQLREFLGKAGFCRLFIPGFAEMAAPLYPLTKPGTLFEWGPDQQKAYQEIKQALLTAPALGLPDLTKPFELFVDEKQGYAKGVLTQKLGPWRRPVAYLSKKLDPVAAGWPPCLRMVAAIAVLTKDAGKLTMGQPLVILAPHAVEALVKQPPDRWLSNARMTHYQALLLDTDRVQFGPIVALNPATLLPLPEEGLQHDCLDILAEAHGTRPDLTDQPLPDADHTWYTDGSSFLQEGQRKAGAAVTTETEVVWAKALPAGTSAQRAELIALTQALKMAEGKKLNVYTDSRYAFATAHIHGEIYRRRGWLTSEGKEIKNKDEILALLKALFLPKRLSIIHCPGHQKGNRAEARGNRMADQAAREVATRETPETSTLLAGKRTADGSEFEKRTADGSEFESPKKKAKVE

SEQ ID NO: 2560 - protein, 2092 aa, synthetic construct
  source 1..2092: note = Description of Artificial Sequence: Synthetic polypeptide
MPAAKRVKLDGGDKKYSIGLDIGTNSVGWAVITDEYKVPSKKFKVLGNTDRHSIKKNLIGALLFDSGETAEATRLKRTARRRYTRRKNRICYLQEIFSNEMAKVDDSFFHRLEESFLVEEDKKHERHPIFGNIVDEVAYHEKYPTIYHLRKKLVDSTDKADLRLIYLALAHMIKFRGHFLIEGDLNPDNSDVDKLFIQLVQTYNQLFEENPINASGVDAKAILSARLSKSRRLENLIAQLPGEKKNGLFGNLIALSLGLTPNFKSNFDLAEDAKLQLSKDTYDDDLDNLLAQIGDQYADLFLAAKNLSDAILLSDILRVNTEITKAPLSASMIKRYDEHHQDLTLLKALVRQQLPEKYKEIFFDQSKNGYAGYIDGGASQEEFYKFIKPILEKMDGTEELLVKLNREDLLRKQRTFDNGSIPHQIHLGELHAILRRQEDFYPFLKDNREKIEKILTFRIPYYVGPLARGNSRFAWMTRKSEETITPWNFEEVVDKGASAQSFIERMTNFDKNLPNEKVLPKHSLLYEYFTVYNELTKVKYVTEGMRKPAFLSGEQKKAIVDLLFKTNRKVTVKQLKEDYFKKIECFDSVEISGVEDRFNASLGTYHDLLKIIKDKDFLDNEENEDILEDIVLTLTLFEDREMIEERLKTYAHLFDDKVMKQLKRRRYTGWGRLSRKLINGIRDKQSGKTILDFLKSDGFANRNFMQLIHDDSLTFKEDIQKAQVSGQGDSLHEHIANLAGSPAIKKGILQTVKVVDELVKVMGRHKPENIVIEMARENQTTQKGQKNSRERMKRIEEGIKELGSQILKEHPVENTQLQNEKLYLYYLQNGRDMYVDQELDINRLSDYDVDHIVPQSFLKDDSIDNKVLTRSDKARGKSDNVPSEEVVKKMKNYWRQLLNAKLITQRKFDNLTKAERGGLSELDKAGFIKRQLVETRQITKHVAQILDSRMNTKYDENDKLIREVKVITLKSKLVSDFRKDFQFYKVREINNYHHAHDAYLNAVVGTALIKKYPKLESEFVYGDYKVYDVRKMIAKSEQEIGKATAKYFFYSNIMNFFKTEITLANGEIRKRPLIETNGETGEIVWDKGRDFATVRKVLSMPQVNIVKKTEVQTGGFSKESILPKRNSDKLIARKKDWDPKKYGGFDSPTVAYSVLVVAKVEKGKSKKLKSVKELLGITIMERSSFEKNPIDFLEAKGYKEVKKDLIIKLPKYSLFELENGRKRMLASAGELQKGNELALPSKYVNFLYLASHYEKLKGSPEDNEQKQLFVEQHKHYLDEIIEQISEFSKRVILADANLDKVLSAYNKHRDKPIREQAENIIHLFTLTNLGAPAAFKYFDTTIDRKRYTSTKEVLDATLIHQSITGLYETRIDLSQLGGDGGGGGGGGGGGTLNIEDEYRLHETSKGPDVPLGSTWLSDFPQAWAETGGMGLAVRQAPLIIPLKATSTPVSIKQYPMSQEARLGIKPHIQRLLDQGILVPCQSPWNTPLLPVKKPGTNDYRPVQDLREVNKRVEDIHPTVPNPYNLLSGLPPSHQWYTVLDLKDAFFCLRLHPTSQSLFAFEWRDPEMGISGQLTWTRLPQGFKNSPTLFNEALHRDLADFRIQHPDLILLQYVDDLLLAATSELDCQQGTRALLQTLGDLGYRASAKKAQICQKQVKYLGYLLKEGQRWLTEARKETVMGQPTPKTPRQLREFLGKAGFCRLFIPGFAEMAAPLYPLTKPGTLFEWGPDQQKAYQEIKQALLTAPALGLPDLTKPFELFVDEKQGYAKGVLTQKLGPWRRPVAYLSKKLDPVAAGWPPCLRMVAAIAVLTKDAGKLTMGQPLVILAPHAVEALVKQPPDRWLSNARMTHYQALLLDTDRVQFGPIVALNPATLLPLPEEGLQHDCLDILAEAHGTRPDLTDQPLPDADHTWYTDGSSFLQEGQRKAGAAVTTETEVVWAKALPAGTSAQRAELIALTQALKMAEGKKLNVYTDSRYAFATAHIHGEIYRRRGWLTSEGKEIKNKDEILALLKALFLPKRLSIIHCPGHQKGNRAEARGNRMADQAAREVATRETPETSTLLAGKRTADGSEFEKRTADGSEFESPKKKAKVE

SEQ ID NO: 2561 - protein, 2100 aa, synthetic construct
  source 1..2100: note = Description of Artificial Sequence: Synthetic polypeptide
MPAAKRVKLDGGDKKYSIGLDIGTNSVGWAVITDEYKVPSKKFKVLGNTDRHSIKKNLIGALLFDSGETAEATRLKRTARRRYTRRKNRICYLQEIFSNEMAKVDDSFFHRLEESFLVEEDKKHERHPIFGNIVDEVAYHEKYPTIYHLRKKLVDSTDKADLRLIYLALAHMIKFRGHFLIEGDLNPDNSDVDKLFIQLVQTYNQLFEENPINASGVDAKAILSARLSKSRRLENLIAQLPGEKKNGLFGNLIALSLGLTPNFKSNFDLAEDAKLQLSKDTYDDDLDNLLAQIGDQYADLFLAAKNLSDAILLSDILRVNTEITKAPLSASMIKRYDEHHQDLTLLKALVRQQLPEKYKEIFFDQSKNGYAGYIDGGASQEEFYKFIKPILEKMDGTEELLVKLNREDLLRKQRTFDNGSIPHQIHLGELHAILRRQEDFYPFLKDNREKIEKILTFRIPYYVGPLARGNSRFAWMTRKSEETITPWNFEEVVDKGASAQSFIERMTNFDKNLPNEKVLPKHSLLYEYFTVYNELTKVKYVTEGMRKPAFLSGEQKKAIVDLLFKTNRKVTVKQLKEDYFKKIECFDSVEISGVEDRFNASLGTYHDLLKIIKDKDFLDNEENEDILEDIVLTLTLFEDREMIEERLKTYAHLFDDKVMKQLKRRRYTGWGRLSRKLINGIRDKQSGKTILDFLKSDGFANRNFMQLIHDDSLTFKEDIQKAQVSGQGDSLHEHIANLAGSPAIKKGILQTVKVVDELVKVMGRHKPENIVIEMARENQTTQKGQKNSRERMKRIEEGIKELGSQILKEHPVENTQLQNEKLYLYYLQNGRDMYVDQELDINRLSDYDVDHIVPQSFLKDDSIDNKVLTRSDKARGKSDNVPSEEVVKKMKNYWRQLLNAKLITQRKFDNLTKAERGGLSELDKAGFIKRQLVETRQITKHVAQILDSRMNTKYDENDKLIREVKVITLKSKLVSDFRKDFQFYKVREINNYHHAHDAYLNAVVGTALIKKYPKLESEFVYGDYKVYDVRKMIAKSEQEIGKATAKYFFYSNIMNFFKTEITLANGEIRKRPLIETNGETGEIVWDKGRDFATVRKVLSMPQVNIVKKTEVQTGGFSKESILPKRNSDKLIARKKDWDPKKYGGFDSPTVAYSVLVVAKVEKGKSKKLKSVKELLGITIMERSSFEKNPIDFLEAKGYKEVKKDLIIKLPKYSLFELENGRKRMLASAGELQKGNELALPSKYVNFLYLASHYEKLKGSPEDNEQKQLFVEQHKHYLDEIIEQISEFSKRVILADANLDKVLSAYNKHRDKPIREQAENIIHLFTLTNLGAPAAFKYFDTTIDRKRYTSTKEVLDATLIHQSITGLYETRIDLSQLGGDGGEAAAKGGGGSEAAAKGGTLNIEDEYRLHETSKGPDVPLGSTWLSDFPQAWAETGGMGLAVRQAPLIIPLKATSTPVSIKQYPMSQEARLGIKPHIQRLLDQGILVPCQSPWNTPLLPVKKPGTNDYRPVQDLREVNKRVEDIHPTVPNPYNLLSGLPPSHQWYTVLDLKDAFFCLRLHPTSQSLFAFEWRDPEMGISGQLTWTRLPQGFKNSPTLFNEALHRDLADFRIQHPDLILLQYVDDLLLAATSELDCQQGTRALLQTLGDLGYRASAKKAQICQKQVKYLGYLLKEGQRWLTEARKETVMGQPTPKTPRQLREFLGKAGFCRLFIPGFAEMAAPLYPLTKPGTLFEWGPDQQKAYQEIKQALLTAPALGLPDLTKPFELFVDEKQGYAKGVLTQKLGPWRRPVAYLSKKLDPVAAGWPPCLRMVAAIAVLTKDAGKLTMGQPLVILAPHAVEALVKQPPDRWLSNARMTHYQALLLDTDRVQFGPIVALNPATLLPLPEEGLQHDCLDILAEAHGTRPDLTDQPLPDADHTWYTDGSSFLQEGQRKAGAAVTTETEVVWAKALPAGTSAQRAELIALTQALKMAEGKKLNVYTDSRYAFATAHIHGEIYRRRGWLTSEGKEIKNKDEILALLKALFLPKRLSIIHCPGHQKGNRAEARGNRMADQAAREVATRETPETSTLLAGKRTADGSEFEKRTADGSEFESPKKKAKVE

SEQ ID NO: 2562 - protein, 2091 aa, synthetic construct
  source 1..2091: note = Description of Artificial Sequence: Synthetic polypeptide
MPAAKRVKLDGGDKKYSIGLDIGTNSVGWAVITDEYKVPSKKFKVLGNTDRHSIKKNLIGALLFDSGETAEATRLKRTARRRYTRRKNRICYLQEIFSNEMAKVDDSFFHRLEESFLVEEDKKHERHPIFGNIVDEVAYHEKYPTIYHLRKKLVDSTDKADLRLIYLALAHMIKFRGHFLIEGDLNPDNSDVDKLFIQLVQTYNQLFEENPINASGVDAKAILSARLSKSRRLENLIAQLPGEKKNGLFGNLIALSLGLTPNFKSNFDLAEDAKLQLSKDTYDDDLDNLLAQIGDQYADLFLAAKNLSDAILLSDILRVNTEITKAPLSASMIKRYDEHHQDLTLLKALVRQQLPEKYKEIFFDQSKNGYAGYIDGGASQEEFYKFIKPILEKMDGTEELLVKLNREDLLRKQRTFDNGSIPHQIHLGELHAILRRQEDFYPFLKDNREKIEKILTFRIPYYVGPLARGNSRFAWMTRKSEETITPWNFEEVVDKGASAQSFIERMTNFDKNLPNEKVLPKHSLLYEYFTVYNELTKVKYVTEGMRKPAFLSGEQKKAIVDLLFKTNRKVTVKQLKEDYFKKIECFDSVEISGVEDRFNASLGTYHDLLKIIKDKDFLDNEENEDILEDIVLTLTLFEDREMIEERLKTYAHLFDDKVMKQLKRRRYTGWGRLSRKLINGIRDKQSGKTILDFLKSDGFANRNFMQLIHDDSLTFKEDIQKAQVSGQGDSLHEHIANLAGSPAIKKGILQTVKVVDELVKVMGRHKPENIVIEMARENQTTQKGQKNSRERMKRIEEGIKELGSQILKEHPVENTQLQNEKLYLYYLQNGRDMYVDQELDINRLSDYDVDHIVPQSFLKDDSIDNKVLTRSDKARGKSDNVPSEEVVKKMKNYWRQLLNAKLITQRKFDNLTKAERGGLSELDKAGFIKRQLVETRQITKHVAQILDSRMNTKYDENDKLIREVKVITLKSKLVSDFRKDFQFYKVREINNYHHAHDAYLNAVVGTALIKKYPKLESEFVYGDYKVYDVRKMIAKSEQEIGKATAKYFFYSNIMNFFKTEITLANGEIRKRPLIETNGETGEIVWDKGRDFATVRKVLSMPQVNIVKKTEVQTGGFSKESILPKRNSDKLIARKKDWDPKKYGGFDSPTVAYSVLVVAKVEKGKSKKLKSVKELLGITIMERSSFEKNPIDFLEAKGYKEVKKDLIIKLPKYSLFELENGRKRMLASAGELQKGNELALPSKYVNFLYLASHYEKLKGSPEDNEQKQLFVEQHKHYLDEIIEQISEFSKRVILADANLDKVLSAYNKHRDKPIREQAENIIHLFTLTNLGAPAAFKYFDTTIDRKRYTSTKEVLDATLIHQSITGLYETRIDLSQLGGDGGGGGGGGGGTLNIEDEYRLHETSKGPDVPLGSTWLSDFPQAWAETGGMGLAVRQAPLIIPLKATSTPVSIKQYPMSQEARLGIKPHIQRLLDQGILVPCQSPWNTPLLPVKKPGTNDYRPVQDLREVNKRVEDIHPTVPNPYNLLSGLPPSHQWYTVLDLKDAFFCLRLHPTSQSLFAFEWRDPEMGISGQLTWTRLPQGFKNSPTLFNEALHRDLADFRIQHPDLILLQYVDDLLLAATSELDCQQGTRALLQTLGDLGYRASAKKAQICQKQVKYLGYLLKEGQRWLTEARKETVMGQPTPKTPRQLREFLGKAGFCRLFIPGFAEMAAPLYPLTKPGTLFEWGPDQQKAYQEIKQALLTAPALGLPDLTKPFELFVDEKQGYAKGVLTQKLGPWRRPVAYLSKKLDPVAAGWPPCLRMVAAIAVLTKDAGKLTMGQPLVILAPHAVEALVKQPPDRWLSNARMTHYQALLLDTDRVQFGPIVALNPATLLPLPEEGLQHDCLDILAEAHGTRPDLTDQPLPDADHTWYTDGSSFLQEGQRKAGAAVTTETEVVWAKALPAGTSAQRAELIALTQALKMAEGKKLNVYTDSRYAFATAHIHGEIYRRRGWLTSEGKEIKNKDEILALLKALFLPKRLSIIHCPGHQKGNRAEARGNRMADQAAREVATRETPETSTLLAGKRTADGSEFEKRTADGSEFESPKKKAKVE

SEQ ID NO: 2563 - protein, 2094 aa, synthetic construct
  source 1..2094: note = Description of Artificial Sequence: Synthetic polypeptide
MPAAKRVKLDGGDKKYSIGLDIGTNSVGWAVITDEYKVPSKKFKVLGNTDRHSIKKNLIGALLFDSGETAEATRLKRTARRRYTRRKNRICYLQEIFSNEMAKVDDSFFHRLEESFLVEEDKKHERHPIFGNIVDEVAYHEKYPTIYHLRKKLVDSTDKADLRLIYLALAHMIKFRGHFLIEGDLNPDNSDVDKLFIQLVQTYNQLFEENPINASGVDAKAILSARLSKSRRLENLIAQLPGEKKNGLFGNLIALSLGLTPNFKSNFDLAEDAKLQLSKDTYDDDLDNLLAQIGDQYADLFLAAKNLSDAILLSDILRVNTEITKAPLSASMIKRYDEHHQDLTLLKALVRQQLPEKYKEIFFDQSKNGYAGYIDGGASQEEFYKFIKPILEKMDGTEELLVKLNREDLLRKQRTFDNGSIPHQIHLGELHAILRRQEDFYPFLKDNREKIEKILTFRIPYYVGPLARGNSRFAWMTRKSEETITPWNFEEVVDKGASAQSFIERMTNFDKNLPNEKVLPKHSLLYEYFTVYNELTKVKYVTEGMRKPAFLSGEQKKAIVDLLFKTNRKVTVKQLKEDYFKKIECFDSVEISGVEDRFNASLGTYHDLLKIIKDKDFLDNEENEDILEDIVLTLTLFEDREMIEERLKTYAHLFDDKVMKQLKRRRYTGWGRLSRKLINGIRDKQSGKTILDFLKSDGFANRNFMQLIHDDSLTFKEDIQKAQVSGQGDSLHEHIANLAGSPAIKKGILQTVKVVDELVKVMGRHKPENIVIEMARENQTTQKGQKNSRERMKRIEEGIKELGSQILKEHPVENTQLQNEKLYLYYLQNGRDMYVDQELDINRLSDYDVDHIVPQSFLKDDSIDNKVLTRSDKARGKSDNVPSEEVVKKMKNYWRQLLNAKLITQRKFDNLTKAERGGLSELDKAGFIKRQLVETRQITKHVAQILDSRMNTKYDENDKLIREVKVITLKSKLVSDFRKDFQFYKVREINNYHHAHDAYLNAVVGTALIKKYPKLESEFVYGDYKVYDVRKMIAKSEQEIGKATAKYFFYSNIMNFFKTEITLANGEIRKRPLIETNGETGEIVWDKGRDFATVRKVLSMPQVNIVKKTEVQTGGFSKESILPKRNSDKLIARKKDWDPKKYGGFDSPTVAYSVLVVAKVEKGKSKKLKSVKELLGITIMERSSFEKNPIDFLEAKGYKEVKKDLIIKLPKYSLFELENGRKRMLASAGELQKGNELALPSKYVNFLYLASHYEKLKGSPEDNEQKQLFVEQHKHYLDEIIEQISEFSKRVILADANLDKVLSAYNKHRDKPIREQAENIIHLFTLTNLGAPAAFKYFDTTIDRKRYTSTKEVLDATLIHQSITGLYETRIDLSQLGGDGGGGSPAPGSSGGTLNIEDEYRLHETSKGPDVPLGSTWLSDFPQAWAETGGMGLAVRQAPLIIPLKATSTPVSIKQYPMSQEARLGIKPHIQRLLDQGILVPCQSPWNTPLLPVKKPGTNDYRPVQDLREVNKRVEDIHPTVPNPYNLLSGLPPSHQWYTVLDLKDAFFCLRLHPTSQSLFAFEWRDPEMGISGQLTWTRLPQGFKNSPTLFNEALHRDLADFRIQHPDLILLQYVDDLLLAATSELDCQQGTRALLQTLGDLGYRASAKKAQICQKQVKYLGYLLKEGQRWLTEARKETVMGQPTPKTPRQLREFLGKAGFCRLFIPGFAEMAAPLYPLTKPGTLFEWGPDQQKAYQEIKQALLTAPALGLPDLTKPFELFVDEKQGYAKGVLTQKLGPWRRPVAYLSKKLDPVAAGWPPCLRMVAAIAVLTKDAGKLTMGQPLVILAPHAVEALVKQPPDRWLSNARMTHYQALLLDTDRVQFGPIVALNPATLLPLPEEGLQHDCLDILAEAHGTRPDLTDQPLPDADHTWYTDGSSFLQEGQRKAGAAVTTETEVVWAKALPAGTSAQRAELIALTQALKMAEGKKLNVYTDSRYAFATAHIHGEIYRRRGWLTSEGKEIKNKDEILALLKALFLPKRLSIIHCPGHQKGNRAEARGNRMADQAAREVATRETPETSTLLAGKRTADGSEFEKRTADGSEFESPKKKAKVE

SEQ ID NO: 2564 - protein, 2096 aa, synthetic construct
  source 1..2096: note = Description of Artificial Sequence: Synthetic polypeptide
MPAAKRVKLDGGDKKYSIGLDIGTNSVGWAVITDEYKVPSKKFKVLGNTDRHSIKKNLIGALLFDSGETAEATRLKRTARRRYTRRKNRICYLQEIFSNEMAKVDDSFFHRLEESFLVEEDKKHERHPIFGNIVDEVAYHEKYPTIYHLRKKLVDSTDKADLRLIYLALAHMIKFRGHFLIEGDLNPDNSDVDKLFIQLVQTYNQLFEENPINASGVDAKAILSARLSKSRRLENLIAQLPGEKKNGLFGNLIALSLGLTPNFKSNFDLAEDAKLQLSKDTYDDDLDNLLAQIGDQYADLFLAAKNLSDAILLSDILRVNTEITKAPLSASMIKRYDEHHQDLTLLKALVRQQLPEKYKEIFFDQSKNGYAGYIDGGASQEEFYKFIKPILEKMDGTEELLVKLNREDLLRKQRTFDNGSIPHQIHLGELHAILRRQEDFYPFLKDNREKIEKILTFRIPYYVGPLARGNSRFAWMTRKSEETITPWNFEEVVDKGASAQSFIERMTNFDKNLPNEKVLPKHSLLYEYFTVYNELTKVKYVTEGMRKPAFLSGEQKKAIVDLLFKTNRKVTVKQLKEDYFKKIECFDSVEISGVEDRFNASLGTYHDLLKIIKDKDFLDNEENEDILEDIVLTLTLFEDREMIEERLKTYAHLFDDKVMKQLKRRRYTGWGRLSRKLINGIRDKQSGKTILDFLKSDGFANRNFMQLIHDDSLTFKEDIQKAQVSGQGDSLHEHIANLAGSPAIKKGILQTVKVVDELVKVMGRHKPENIVIEMARENQTTQKGQKNSRERMKRIEEGIKELGSQILKEHPVENTQLQNEKLYLYYLQNGRDMYVDQELDINRLSDYDVDHIVPQSFLKDDSIDNKVLTRSDKARGKSDNVPSEEVVKKMKNYWRQLLNAKLITQRKFDNLTKAERGGLSELDKAGFIKRQLVETRQITKHVAQILDSRMNTKYDENDKLIREVKVITLKSKLVSDFRKDFQFYKVREINNYHHAHDAYLNAVVGTALIKKYPKLESEFVYGDYKVYDVRKMIAKSEQEIGKATAKYFFYSNIMNFFKTEITLANGEIRKRPLIETNGETGEIVWDKGRDFATVRKVLSMPQVNIVKKTEVQTGGFSKESILPKRNSDKLIARKKDWDPKKYGGFDSPTVAYSVLVVAKVEKGKSKKLKSVKELLGITIMERSSFEKNPIDFLEAKGYKEVKKDLIIKLPKYSLFELENGRKRMLASAGELQKGNELALPSKYVNFLYLASHYEKLKGSPEDNEQKQLFVEQHKHYLDEIIEQISEFSKRVILADANLDKVLSAYNKHRDKPIREQAENIIHLFTLTNLGAPAAFKYFDTTIDRKRYTSTKEVLDATLIHQSITGLYETRIDLSQLGGDGGPAPGGSEAAAKGGTLNIEDEYRLHETSKGPDVPLGSTWLSDFPQAWAETGGMGLAVRQAPLIIPLKATSTPVSIKQYPMSQEARLGIKPHIQRLLDQGILVPCQSPWNTPLLPVKKPGTNDYRPVQDLREVNKRVEDIHPTVPNPYNLLSGLPPSHQWYTVLDLKDAFFCLRLHPTSQSLFAFEWRDPEMGISGQLTWTRLPQGFKNSPTLFNEALHRDLADFRIQHPDLILLQYVDDLLLAATSELDCQQGTRALLQTLGDLGYRASAKKAQICQKQVKYLGYLLKEGQRWLTEARKETVMGQPTPKTPRQLREFLGKAGFCRLFIPGFAEMAAPLYPLTKPGTLFEWGPDQQKAYQEIKQALLTAPALGLPDLTKPFELFVDEKQGYAKGVLTQKLGPWRRPVAYLSKKLDPVAAGWPPCLRMVAAIAVLTKDAGKLTMGQPLVILAPHAVEALVKQPPDRWLSNARMTHYQALLLDTDRVQFGPIVALNPATLLPLPEEGLQHDCLDILAEAHGTRPDLTDQPLPDADHTWYTDGSSFLQEGQRKAGAAVTTETEVVWAKALPAGTSAQRAELIALTQALKMAEGKKLNVYTDSRYAFATAHIHGEIYRRRGWLTSEGKEIKNKDEILALLKALFLPKRLSIIHCPGHQKGNRAEARGNRMADQAAREVATRETPETSTLLAGKRTADGSEFEKRTADGSEFESPKKKAKVE

SEQ ID NO: 2565 - protein, 2094 aa, synthetic construct
  source 1..2094: note = Description of Artificial Sequence: Synthetic polypeptide
MPAAKRVKLDGGDKKYSIGLDIGTNSVGWAVITDEYKVPSKKFKVLGNTDRHSIKKNLIGALLFDSGETAEATRLKRTARRRYTRRKNRICYLQEIFSNEMAKVDDSFFHRLEESFLVEEDKKHERHPIFGNIVDEVAYHEKYPTIYHLRKKLVDSTDKADLRLIYLALAHMIKFRGHFLIEGDLNPDNSDVDKLFIQLVQTYNQLFEENPINASGVDAKAILSARLSKSRRLENLIAQLPGEKKNGLFGNLIALSLGLTPNFKSNFDLAEDAKLQLSKDTYDDDLDNLLAQIGDQYADLFLAAKNLSDAILLSDILRVNTEITKAPLSASMIKRYDEHHQDLTLLKALVRQQLPEKYKEIFFDQSKNGYAGYIDGGASQEEFYKFIKPILEKMDGTEELLVKLNREDLLRKQRTFDNGSIPHQIHLGELHAILRRQEDFYPFLKDNREKIEKILTFRIPYYVGPLARGNSRFAWMTRKSEETITPWNFEEVVDKGASAQSFIERMTNFDKNLPNEKVLPKHSLLYEYFTVYNELTKVKYVTEGMRKPAFLSGEQKKAIVDLLFKTNRKVTVKQLKEDYFKKIECFDSVEISGVEDRFNASLGTYHDLLKIIKDKDFLDNEENEDILEDIVLTLTLFEDREMIEERLKTYAHLFDDKVMKQLKRRRYTGWGRLSRKLINGIRDKQSGKTILDFLKSDGFANRNFMQLIHDDSLTFKEDIQKAQVSGQGDSLHEHIANLAGSPAIKKGILQTVKVVDELVKVMGRHKPENIVIEMARENQTTQKGQKNSRERMKRIEEGIKELGSQILKEHPVENTQLQNEKLYLYYLQNGRDMYVDQELDINRLSDYDVDHIVPQSFLKDDSIDNKVLTRSDKARGKSDNVPSEEVVKKMKNYWRQLLNAKLITQRKFDNLTKAERGGLSELDKAGFIKRQLVETRQITKHVAQILDSRMNTKYDENDKLIREVKVITLKSKLVSDFRKDFQFYKVREINNYHHAHDAYLNAVVGTALIKKYPKLESEFVYGDYKVYDVRKMIAKSEQEIGKATAKYFFYSNIMNFFKTEITLANGEIRKRPLIETNGETGEIVWDKGRDFATVRKVLSMPQVNIVKKTEVQTGGFSKESILPKRNSDKLIARKKDWDPKKYGGFDSPTVAYSVLVVAKVEKGKSKKLKSVKELLGITIMERSSFEKNPIDFLEAKGYKEVKKDLIIKLPKYSLFELENGRKRMLASAGELQKGNELALPSKYVNFLYLASHYEKLKGSPEDNEQKQLFVEQHKHYLDEIIEQISEFSKRVILADANLDKVLSAYNKHRDKPIREQAENIIHLFTLTNLGAPAAFKYFDTTIDRKRYTSTKEVLDATLIHQSITGLYETRIDLSQLGGDGGGSSGGGGGSGGTLNIEDEYRLHETSKGPDVPLGSTWLSDFPQAWAETGGMGLAVRQAPLIIPLKATSTPVSIKQYPMSQEARLGIKPHIQRLLDQGILVPCQSPWNTPLLPVKKPGTNDYRPVQDLREVNKRVEDIHPTVPNPYNLLSGLPPSHQWYTVLDLKDAFFCLRLHPTSQSLFAFEWRDPEMGISGQLTWTRLPQGFKNSPTLFNEALHRDLADFRIQHPDLILLQYVDDLLLAATSELDCQQGTRALLQTLGDLGYRASAKKAQICQKQVKYLGYLLKEGQRWLTEARKETVMGQPTPKTPRQLREFLGKAGFCRLFIPGFAEMAAPLYPLTKPGTLFEWGPDQQKAYQEIKQALLTAPALGLPDLTKPFELFVDEKQGYAKGVLTQKLGPWRRPVAYLSKKLDPVAAGWPPCLRMVAAIAVLTKDAGKLTMGQPLVILAPHAVEALVKQPPDRWLSNARMTHYQALLLDTDRVQFGPIVALNPATLLPLPEEGLQHDCLDILAEAHGTRPDLTDQPLPDADHTWYTDGSSFLQEGQRKAGAAVTTETEVVWAKALPAGTSAQRAELIALTQALKMAEGKKLNVYTDSRYAFATAHIHGEIYRRRGWLTSEGKEIKNKDEILALLKALFLPKRLSIIHCPGHQKGNRAEARGNRMADQAAREVATRETPETSTLLAGKRTADGSEFEKRTADGSEFESPKKKAKVE

SEQ ID NO: 2566 - protein, 2115 aa, synthetic construct
  source 1..2115: note = Description of Artificial Sequence: Synthetic polypeptide
MPAAKRVKLDGGDKKYSIGLDIGTNSVGWAVITDEYKVPSKKFKVLGNTDRHSIKKNLIGALLFDSGETAEATRLKRTARRRYTRRKNRICYLQEIFSNEMAKVDDSFFHRLEESFLVEEDKKHERHPIFGNIVDEVAYHEKYPTIYHLRKKLVDSTDKADLRLIYLALAHMIKFRGHFLIEGDLNPDNSDVDKLFIQLVQTYNQLFEENPINASGVDAKAILSARLSKSRRLENLIAQLPGEKKNGLFGNLIALSLGLTPNFKSNFDLAEDAKLQLSKDTYDDDLDNLLAQIGDQYADLFLAAKNLSDAILLSDILRVNTEITKAPLSASMIKRYDEHHQDLTLLKALVRQQLPEKYKEIFFDQSKNGYAGYIDGGASQEEFYKFIKPILEKMDGTEELLVKLNREDLLRKQRTFDNGSIPHQIHLGELHAILRRQEDFYPFLKDNREKIEKILTFRIPYYVGPLARGNSRFAWMTRKSEETITPWNFEEVVDKGASAQSFIERMTNFDKNLPNEKVLPKHSLLYEYFTVYNELTKVKYVTEGMRKPAFLSGEQKKAIVDLLFKTNRKVTVKQLKEDYFKKIECFDSVEISGVEDRFNASLGTYHDLLKIIKDKDFLDNEENEDILEDIVLTLTLFEDREMIEERLKTYAHLFDDKVMKQLKRRRYTGWGRLSRKLINGIRDKQSGKTILDFLKSDGFANRNFMQLIHDDSLTFKEDIQKAQVSGQGDSLHEHIANLAGSPAIKKGILQTVKVVDELVKVMGRHKPENIVIEMARENQTTQKGQKNSRERMKRIEEGIKELGSQILKEHPVENTQLQNEKLYLYYLQNGRDMYVDQELDINRLSDYDVDHIVPQSFLKDDSIDNKVLTRSDKARGKSDNVPSEEVVKKMKNYWRQLLNAKLITQRKFDNLTKAERGGLSELDKAGFIKRQLVETRQITKHVAQILDSRMNTKYDENDKLIREVKVITLKSKLVSDFRKDFQFYKVREINNYHHAHDAYLNAVVGTALIKKYPKLESEFVYGDYKVYDVRKMIAKSEQEIGKATAKYFFYSNIMNFFKTEITLANGEIRKRPLIETNGETGEIVWDKGRDFATVRKVLSMPQVNIVKKTEVQTGGFSKESILPKRNSDKLIARKKDWDPKKYGGFDSPTVAYSVLVVAKVEKGKSKKLKSVKELLGITIMERSSFEKNPIDFLEAKGYKEVKKDLIIKLPKYSLFELENGRKRMLASAGELQKGNELALPSKYVNFLYLASHYEKLKGSPEDNEQKQLFVEQHKHYLDEIIEQISEFSKRVILADANLDKVLSAYNKHRDKPIREQAENIIHLFTLTNLGAPAAFKYFDTTIDRKRYTSTKEVLDATLIHQSITGLYETRIDLSQLGGDGGGGGGSGGGGSGGGGSGGGGSGGGGSGGGGSGGTLNIEDEYRLHETSKGPDVPLGSTWLSDFPQAWAETGGMGLAVRQAPLIIPLKATSTPVSIKQYPMSQEARLGIKPHIQRLLDQGILVPCQSPWNTPLLPVKKPGTNDYRPVQDLREVNKRVEDIHPTVPNPYNLLSGLPPSHQWYTVLDLKDAFFCLRLHPTSQSLFAFEWRDPEMGISGQLTWTRLPQGFKNSPTLFNEALHRDLADFRIQHPDLILLQYVDDLLLAATSELDCQQGTRALLQTLGDLGYRASAKKAQICQKQVKYLGYLLKEGQRWLTEARKETVMGQPTPKTPRQLREFLGKAGFCRLFIPGFAEMAAPLYPLTKPGTLFEWGPDQQKAYQEIKQALLTAPALGLPDLTKPFELFVDEKQGYAKGVLTQKLGPWRRPVAYLSKKLDPVAAGWPPCLRMVAAIAVLTKDAGKLTMGQPLVILAPHAVEALVKQPPDRWLSNARMTHYQALLLDTDRVQFGPIVALNPATLLPLPEEGLQHDCLDILAEAHGTRPDLTDQPLPDADHTWYTDGSSFLQEGQRKAGAAVTTETEVVWAKALPAGTSAQRAELIALTQALKMAEGKKLNVYTDSRYAFATAHIHGEIYRRRGWLTSEGKEIKNKDEILALLKALFLPKRLSIIHCPGHQKGNRAEARGNRMADQAAREVATRETPETSTLLAGKRTADGSEFEKRTADGSEFESPKKKAKVE

SEQ ID NO: 2567 - protein, 2094 aa, synthetic construct
  source 1..2094: note = Description of Artificial Sequence: Synthetic polypeptide
MPAAKRVKLDGGDKKYSIGLDIGTNSVGWAVITDEYKVPSKKFKVLGNTDRHSIKKNLIGALLFDSGETAEATRLKRTARRRYTRRKNRICYLQEIFSNEMAKVDDSFFHRLEESFLVEEDKKHERHPIFGNIVDEVAYHEKYPTIYHLRKKLVDSTDKADLRLIYLALAHMIKFRGHFLIEGDLNPDNSDVDKLFIQLVQTYNQLFEENPINASGVDAKAILSARLSKSRRLENLIAQLPGEKKNGLFGNLIALSLGLTPNFKSNFDLAEDAKLQLSKDTYDDDLDNLLAQIGDQYADLFLAAKNLSDAILLSDILRVNTEITKAPLSASMIKRYDEHHQDLTLLKALVRQQLPEKYKEIFFDQSKNGYAGYIDGGASQEEFYKFIKPILEKMDGTEELLVKLNREDLLRKQRTFDNGSIPHQIHLGELHAILRRQEDFYPFLKDNREKIEKILTFRIPYYVGPLARGNSRFAWMTRKSEETITPWNFEEVVDKGASAQSFIERMTNFDKNLPNEKVLPKHSLLYEYFTVYNELTKVKYVTEGMRKPAFLSGEQKKAIVDLLFKTNRKVTVKQLKEDYFKKIECFDSVEISGVEDRFNASLGTYHDLLKIIKDKDFLDNEENEDILEDIVLTLTLFEDREMIEERLKTYAHLFDDKVMKQLKRRRYTGWGRLSRKLINGIRDKQSGKTILDFLKSDGFANRNFMQLIHDDSLTFKEDIQKAQVSGQGDSLHEHIANLAGSPAIKKGILQTVKVVDELVKVMGRHKPENIVIEMARENQTTQKGQKNSRERMKRIEEGIKELGSQILKEHPVENTQLQNEKLYLYYLQNGRDMYVDQELDINRLSDYDVDHIVPQSFLKDDSIDNKVLTRSDKARGKSDNVPSEEVVKKMKNYWRQLLNAKLITQRKFDNLTKAERGGLSELDKAGFIKRQLVETRQITKHVAQILDSRMNTKYDENDKLIREVKVITLKSKLVSDFRKDFQFYKVREINNYHHAHDAYLNAVVGTALIKKYPKLESEFVYGDYKVYDVRKMIAKSEQEIGKATAKYFFYSNIMNFFKTEITLANGEIRKRPLIETNGETGEIVWDKGRDFATVRKVLSMPQVNIVKKTEVQTGGFSKESILPKRNSDKLIARKKDWDPKKYGGFDSPTVAYSVLVVAKVEKGKSKKLKSVKELLGITIMERSSFEKNPIDFLEAKGYKEVKKDLIIKLPKYSLFELENGRKRMLASAGELQKGNELALPSKYVNFLYLASHYEKLKGSPEDNEQKQLFVEQHKHYLDEIIEQISEFSKRVILADANLDKVLSAYNKHRDKPIREQAENIIHLFTLTNLGAPAAFKYFDTTIDRKRYTSTKEVLDATLIHQSITGLYETRIDLSQLGGDGGGSSGGSGGGGGTLNIEDEYRLHETSKGPDVPLGSTWLSDFPQAWAETGGMGLAVRQAPLIIPLKATSTPVSIKQYPMSQEARLGIKPHIQRLLDQGILVPCQSPWNTPLLPVKKPGTNDYRPVQDLREVNKRVEDIHPTVPNPYNLLSGLPPSHQWYTVLDLKDAFFCLRLHPTSQSLFAFEWRDPEMGISGQLTWTRLPQGFKNSPTLFNEALHRDLADFRIQHPDLILLQYVDDLLLAATSELDCQQGTRALLQTLGDLGYRASAKKAQICQKQVKYLGYLLKEGQRWLTEARKETVMGQPTPKTPRQLREFLGKAGFCRLFIPGFAEMAAPLYPLTKPGTLFEWGPDQQKAYQEIKQALLTAPALGLPDLTKPFELFVDEKQGYAKGVLTQKLGPWRRPVAYLSKKLDPVAAGWPPCLRMVAAIAVLTKDAGKLTMGQPLVILAPHAVEALVKQPPDRWLSNARMTHYQALLLDTDRVQFGPIVALNPATLLPLPEEGLQHDCLDILAEAHGTRPDLTDQPLPDADHTWYTDGSSFLQEGQRKAGAAVTTETEVVWAKALPAGTSAQRAELIALTQALKMAEGKKLNVYTDSRYAFATAHIHGEIYRRRGWLTSEGKEIKNKDEILALLKALFLPKRLSIIHCPGHQKGNRAEARGNRMADQAAREVATRETPETSTLLAGKRTADGSEFEKRTADGSEFESPKKKAKVE

SEQ ID NO: 2568 - protein, 2090 aa, synthetic construct
  source 1..2090: note = Description of Artificial Sequence: Synthetic polypeptide
MPAAKRVKLDGGDKKYSIGLDIGTNSVGWAVITDEYKVPSKKFKVLGNTDRHSIKKNLIGALLFDSGETAEATRLKRTARRRYTRRKNRICYLQEIFSNEMAKVDDSFFHRLEESFLVEEDKKHERHPIFGNIVDEVAYHEKYPTIYHLRKKLVDSTDKADLRLIYLALAHMIKFRGHFLIEGDLNPDNSDVDKLFIQLVQTYNQLFEENPINASGVDAKAILSARLSKSRRLENLIAQLPGEKKNGLFGNLIALSLGLTPNFKSNFDLAEDAKLQLSKDTYDDDLDNLLAQIGDQYADLFLAAKNLSDAILLSDILRVNTEITKAPLSASMIKRYDEHHQDLTLLKALVRQQLPEKYKEIFFDQSKNGYAGYIDGGASQEEFYKFIKPILEKMDGTEELLVKLNREDLLRKQRTFDNGSIPHQIHLGELHAILRRQEDFYPFLKDNREKIEKILTFRIPYYVGPLARGNSRFAWMTRKSEETITPWNFEEVVDKGASAQSFIERMTNFDKNLPNEKVLPKHSLLYEYFTVYNELTKVKYVTEGMRKPAFLSGEQKKAIVDLLFKTNRKVTVKQLKEDYFKKIECFDSVEISGVEDRFNASLGTYHDLLKIIKDKDFLDNEENEDILEDIVLTLTLFEDREMIEERLKTYAHLFDDKVMKQLKRRRYTGWGRLSRKLINGIRDKQSGKTILDFLKSDGFANRNFMQLIHDDSLTFKEDIQKAQVSGQGDSLHEHIANLAGSPAIKKGILQTVKVVDELVKVMGRHKPENIVIEMARENQTTQKGQKNSRERMKRIEEGIKELGSQILKEHPVENTQLQNEKLYLYYLQNGRDMYVDQELDINRLSDYDVDHIVPQSFLKDDSIDNKVLTRSDKARGKSDNVPSEEVVKKMKNYWRQLLNAKLITQRKFDNLTKAERGGLSELDKAGFIKRQLVETRQITKHVAQILDSRMNTKYDENDKLIREVKVITLKSKLVSDFRKDFQFYKVREINNYHHAHDAYLNAVVGTALIKKYPKLESEFVYGDYKVYDVRKMIAKSEQEIGKATAKYFFYSNIMNFFKTEITLANGEIRKRPLIETNGETGEIVWDKGRDFATVRKVLSMPQVNIVKKTEVQTGGFSKESILPKRNSDKLIARKKDWDPKKYGGFDSPTVAYSVLVVAKVEKGKSKKLKSVKELLGITIMERSSFEKNPIDFLEAKGYKEVKKDLIIKLPKYSLFELENGRKRMLASAGELQKGNELALPSKYVNFLYLASHYEKLKGSPEDNEQKQLFVEQHKHYLDEIIEQISEFSKRVILADANLDKVLSAYNKHRDKPIREQAENIIHLFTLTNLGAPAAFKYFDTTIDRKRYTSTKEVLDATLIHQSITGLYETRIDLSQLGGDGGPAPAPGGTLNIEDEYRLHETSKGPDVPLGSTWLSDFPQAWAETGGMGLAVRQAPLIIPLKATSTPVSIKQYPMSQEARLGIKPHIQRLLDQGILVPCQSPWNTPLLPVKKPGTNDYRPVQDLREVNKRVEDIHPTVPNPYNLLSGLPPSHQWYTVLDLKDAFFCLRLHPTSQSLFAFEWRDPEMGISGQLTWTRLPQGFKNSPTLFNEALHRDLADFRIQHPDLILLQYVDDLLLAATSELDCQQGTRALLQTLGDLGYRASAKKAQICQKQVKYLGYLLKEGQRWLTEARKETVMGQPTPKTPRQLREFLGKAGFCRLFIPGFAEMAAPLYPLTKPGTLFEWGPDQQKAYQEIKQALLTAPALGLPDLTKPFELFVDEKQGYAKGVLTQKLGPWRRPVAYLSKKLDPVAAGWPPCLRMVAAIAVLTKDAGKLTMGQPLVILAPHAVEALVKQPPDRWLSNARMTHYQALLLDTDRVQFGPIVALNPATLLPLPEEGLQHDCLDILAEAHGTRPDLTDQPLPDADHTWYTDGSSFLQEGQRKAGAAVTTETEVVWAKALPAGTSAQRAELIALTQALKMAEGKKLNVYTDSRYAFATAHIHGEIYRRRGWLTSEGKEIKNKDEILALLKALFLPKRLSIIHCPGHQKGNRAEARGNRMADQAAREVATRETPETSTLLAGKRTADGSEFEKRTADGSEFESPKKKAKVE

SEQ ID NO: 2569 - protein, 2095 aa, synthetic construct
  source 1..2095: note = Description of Artificial Sequence: Synthetic polypeptide
MPAAKRVKLDGGDKKYSIGLDIGTNSVGWAVITDEYKVPSKKFKVLGNTDRHSIKKNLIGALLFDSGETAEATRLKRTARRRYTRRKNRICYLQEIFSNEMAKVDDSFFHRLEESFLVEEDKKHERHPIFGNIVDEVAYHEKYPTIYHLRKKLVDSTDKADLRLIYLALAHMIKFRGHFLIEGDLNPDNSDVDKLFIQLVQTYNQLFEENPINASGVDAKAILSARLSKSRRLENLIAQLPGEKKNGLFGNLIALSLGLTPNFKSNFDLAEDAKLQLSKDTYDDDLDNLLAQIGDQYADLFLAAKNLSDAILLSDILRVNTEITKAPLSASMIKRYDEHHQDLTLLKALVRQQLPEKYKEIFFDQSKNGYAGYIDGGASQEEFYKFIKPILEKMDGTEELLVKLNREDLLRKQRTFDNGSIPHQIHLGELHAILRRQEDFYPFLKDNREKIEKILTFRIPYYVGPLARGNSRFAWMTRKSEETITPWNFEEVVDKGASAQSFIERMTNFDKNLPNEKVLPKHSLLYEYFTVYNELTKVKYVTEGMRKPAFLSGEQKKAIVDLLFKTNRKVTVKQLKEDYFKKIECFDSVEISGVEDRFNASLGTYHDLLKIIKDKDFLDNEENEDILEDIVLTLTLFEDREMIEERLKTYAHLFDDKVMKQLKRRRYTGWGRLSRKLINGIRDKQSGKTILDFLKSDGFANRNFMQLIHDDSLTFKEDIQKAQVSGQGDSLHEHIANLAGSPAIKKGILQTVKVVDELVKVMGRHKPENIVIEMARENQTTQKGQKNSRERMKRIEEGIKELGSQILKEHPVENTQLQNEKLYLYYLQNGRDMYVDQELDINRLSDYDVDHIVPQSFLKDDSIDNKVLTRSDKARGKSDNVPSEEVVKKMKNYWRQLLNAKLITQRKFDNLTKAERGGLSELDKAGFIKRQLVETRQITKHVAQILDSRMNTKYDENDKLIREVKVITLKSKLVSDFRKDFQFYKVREINNYHHAHDAYLNAVVGTALIKKYPKLESEFVYGDYKVYDVRKMIAKSEQEIGKATAKYFFYSNIMNFFKTEITLANGEIRKRPLIETNGETGEIVWDKGRDFATVRKVLSMPQVNIVKKTEVQTGGFSKESILPKRNSDKLIARKKDWDPKKYGGFDSPTVAYSVLVVAKVEKGKSKKLKSVKELLGITIMERSSFEKNPIDFLEAKGYKEVKKDLIIKLPKYSLFELENGRKRMLASAGELQKGNELALPSKYVNFLYLASHYEKLKGSPEDNEQKQLFVEQHKHYLDEIIEQISEFSKRVILADANLDKVLSAYNKHRDKPIREQAENIIHLFTLTNLGAPAAFKYFDTTIDRKRYTSTKEVLDATLIHQSITGLYETRIDLSQLGGDGGEAAAKEAAAKGGTLNIEDEYRLHETSKGPDVPLGSTWLSDFPQAWAETGGMGLAVRQAPLIIPLKATSTPVSIKQYPMSQEARLGIKPHIQRLLDQGILVPCQSPWNTPLLPVKKPGTNDYRPVQDLREVNKRVEDIHPTVPNPYNLLSGLPPSHQWYTVLDLKDAFFCLRLHPTSQSLFAFEWRDPEMGISGQLTWTRLPQGFKNSPTLFNEALHRDLADFRIQHPDLILLQYVDDLLLAATSELDCQQGTRALLQTLGDLGYRASAKKAQICQKQVKYLGYLLKEGQRWLTEARKETVMGQPTPKTPRQLREFLGKAGFCRLFIPGFAEMAAPLYPLTKPGTLFEWGPDQQKAYQEIKQALLTAPALGLPDLTKPFELFVDEKQGYAKGVLTQKLGPWRRPVAYLSKKLDPVAAGWPPCLRMVAAIAVLTKDAGKLTMGQPLVILAPHAVEALVKQPPDRWLSNARMTHYQALLLDTDRVQFGPIVALNPATLLPLPEEGLQHDCLDILAEAHGTRPDLTDQPLPDADHTWYTDGSSFLQEGQRKAGAAVTTETEVVWAKALPAGTSAQRAELIALTQALKMAEGKKLNVYTDSRYAFATAHIHGEIYRRRGWLTSEGKEIKNKDEILALLKALFLPKRLSIIHCPGHQKGNRAEARGNRMADQAAREVATRETPETSTLLAGKRTADGSEFEKRTADGSEFESPKKKAKVE

SEQ ID NO: 2570 - protein, 2096 aa, synthetic construct
  source 1..2096: note = Description of Artificial Sequence: Synthetic polypeptide
MPAAKRVKLDGGDKKYSIGLDIGTNSVGWAVITDEYKVPSKKFKVLGNTDRHSIKKNLIGALLFDSGETAEATRLKRTARRRYTRRKNRICYLQEIFSNEMAKVDDSFFHRLEESFLVEEDKKHERHPIFGNIVDEVAYHEKYPTIYHLRKKLVDSTDKADLRLIYLALAHMIKFRGHFLIEGDLNPDNSDVDKLFIQLVQTYNQLFEENPINASGVDAKAILSARLSKSRRLENLIAQLPGEKKNGLFGNLIALSLGLTPNFKSNFDLAEDAKLQLSKDTYDDDLDNLLAQIGDQYADLFLAAKNLSDAILLSDILRVNTEITKAPLSASMIKRYDEHHQDLTLLKALVRQQLPEKYKEIFFDQSKNGYAGYIDGGASQEEFYKFIKPILEKMDGTEELLVKLNREDLLRKQRTFDNGSIPHQIHLGELHAILRRQEDFYPFLKDNREKIEKILTFRIPYYVGPLARGNSRFAWMTRKSEETITPWNFEEVVDKGASAQSFIERMTNFDKNLPNEKVLPKHSLLYEYFTVYNELTKVKYVTEGMRKPAFLSGEQKKAIVDLLFKTNRKVTVKQLKEDYFKKIECFDSVEISGVEDRFNASLGTYHDLLKIIKDKDFLDNEENEDILEDIVLTLTLFEDREMIEERLKTYAHLFDDKVMKQLKRRRYTGWGRLSRKLINGIRDKQSGKTILDFLKSDGFANRNFMQLIHDDSLTFKEDIQKAQVSGQGDSLHEHIANLAGSPAIKKGILQTVKVVDELVKVMGRHKPENIVIEMARENQTTQKGQKNSRERMKRIEEGIKELGSQILKEHPVENTQLQNEKLYLYYLQNGRDMYVDQELDINRLSDYDVDHIVPQSFLKDDSIDNKVLTRSDKARGKSDNVPSEEVVKKMKNYWRQLLNAKLITQRKFDNLTKAERGGLSELDKAGFIKRQLVETRQITKHVAQILDSRMNTKYDENDKLIREVKVITLKSKLVSDFRKDFQFYKVREINNYHHAHDAYLNAVVGTALIKKYPKLESEFVYGDYKVYDVRKMIAKSEQEIGKATAKYFFYSNIMNFFKTEITLANGEIRKRPLIETNGETGEIVWDKGRDFATVRKVLSMPQVNIVKKTEVQTGGFSKESILPKRNSDKLIARKKDWDPKKYGGFDSPTVAYSVLVVAKVEKGKSKKLKSVKELLGITIMERSSFEKNPIDFLEAKGYKEVKKDLIIKLPKYSLFELENGRKRMLASAGELQKGNELALPSKYVNFLYLASHYEKLKGSPEDNEQKQLFVEQHKHYLDEIIEQISEFSKRVILADANLDKVLSAYNKHRDKPIREQAENIIHLFTLTNLGAPAAFKYFDTTIDRKRYTSTKEVLDATLIHQSITGLYETRIDLSQLGGDGGGSSGGSEAAAKGGTLNIEDEYRLHETSKGPDVPLGSTWLSDFPQAWAETGGMGLAVRQAPLIIPLKATSTPVSIKQYPMSQEARLGIKPHIQRLLDQGILVPCQSPWNTPLLPVKKPGTNDYRPVQDLREVNKRVEDIHPTVPNPYNLLSGLPPSHQWYTVLDLKDAFFCLRLHPTSQSLFAFEWRDPEMGISGQLTWTRLPQGFKNSPTLFNEALHRDLADFRIQHPDLILLQYVDDLLLAATSELDCQQGTRALLQTLGDLGYRASAKKAQICQKQVKYLGYLLKEGQRWLTEARKETVMGQPTPKTPRQLREFLGKAGFCRLFIPGFAEMAAPLYPLTKPGTLFEWGPDQQKAYQEIKQALLTAPALGLPDLTKPFELFVDEKQGYAKGVLTQKLGPWRRPVAYLSKKLDPVAAGWPPCLRMVAAIAVLTKDAGKLTMGQPLVILAPHAVEALVKQPPDRWLSNARMTHYQALLLDTDRVQFGPIVALNPATLLPLPEEGLQHDCLDILAEAHGTRPDLTDQPLPDADHTWYTDGSSFLQEGQRKAGAAVTTETEVVWAKALPAGTSAQRAELIALTQALKMAEGKKLNVYTDSRYAFATAHIHGEIYRRRGWLTSEGKEIKNKDEILALLKALFLPKRLSIIHCPGHQKGNRAEARGNRMADQAAREVATRETPETSTLLAGKRTADGSEFEKRTADGSEFESPKKKAKVE

SEQ ID NO: 2571 - protein, 2094 aa, synthetic construct
  source 1..2094: note = Description of Artificial Sequence: Synthetic polypeptide
MPAAKRVKLDGGDKKYSIGLDIGTNSVGWAVITDEYKVPSKKFKVLGNTDRHSIKKNLIGALLFDSGETAEATRLKRTARRRYTRRKNRICYLQEIFSNEMAKVDDSFFHRLEESFLVEEDKKHERHPIFGNIVDEVAYHEKYPTIYHLRKKLVDSTDKADLRLIYLALAHMIKFRGHFLIEGDLNPDNSDVDKLFIQLVQTYNQLFEENPINASGVDAKAILSARLSKSRRLENLIAQLPGEKKNGLFGNLIALSLGLTPNFKSNFDLAEDAKLQLSKDTYDDDLDNLLAQIGDQYADLFLAAKNLSDAILLSDILRVNTEITKAPLSASMIKRYDEHHQDLTLLKALVRQQLPEKYKEIFFDQSKNGYAGYIDGGASQEEFYKFIKPILEKMDGTEELLVKLNREDLLRKQRTFDNGSIPHQIHLGELHAILRRQEDFYPFLKDNREKIEKILTFRIPYYVGPLARGNSRFAWMTRKSEETITPWNFEEVVDKGASAQSFIERMTNFDKNLPNEKVLPKHSLLYEYFTVYNELTKVKYVTEGMRKPAFLSGEQKKAIVDLLFKTNRKVTVKQLKEDYFKKIECFDSVEISGVEDRFNASLGTYHDLLKIIKDKDFLDNEENEDILEDIVLTLTLFEDREMIEERLKTYAHLFDDKVMKQLKRRRYTGWGRLSRKLINGIRDKQSGKTILDFLKSDGFANRNFMQLIHDDSLTFKEDIQKAQVSGQGDSLHEHIANLAGSPAIKKGILQTVKVVDELVKVMGRHKPENIVIEMARENQTTQKGQKNSRERMKRIEEGIKELGSQILKEHPVENTQLQNEKLYLYYLQNGRDMYVDQELDINRLSDYDVDHIVPQSFLKDDSIDNKVLTRSDKARGKSDNVPSEEVVKKMKNYWRQLLNAKLITQRKFDNLTKAERGGLSELDKAGFIKRQLVETRQITKHVAQILDSRMNTKYDENDKLIREVKVITLKSKLVSDFRKDFQFYKVREINNYHHAHDAYLNAVVGTALIKKYPKLESEFVYGDYKVYDVRKMIAKSEQEIGKATAKYFFYSNIMNFFKTEITLANGEIRKRPLIETNGETGEIVWDKGRDFATVRKVLSMPQVNIVKKTEVQTGGFSKESILPKRNSDKLIARKKDWDPKKYGGFDSPTVAYSVLVVAKVEKGKSKKLKSVKELLGITIMERSSFEKNPIDFLEAKGYKEVKKDLIIKLPKYSLFELENGRKRMLASAGELQKGNELALPSKYVNFLYLASHYEKLKGSPEDNEQKQLFVEQHKHYLDEIIEQISEFSKRVILADANLDKVLSAYNKHRDKPIREQAENIIHLFTLTNLGAPAAFKYFDTTIDRKRYTSTKEVLDATLIHQSITGLYETRIDLSQLGGDGGGGGGSSGGSGGTLNIEDEYRLHETSKGPDVPLGSTWLSDFPQAWAETGGMGLAVRQAPLIIPLKATSTPVSIKQYPMSQEARLGIKPHIQRLLDQGILVPCQSPWNTPLLPVKKPGTNDYRPVQDLREVNKRVEDIHPTVPNPYNLLSGLPPSHQWYTVLDLKDAFFCLRLHPTSQSLFAFEWRDPEMGISGQLTWTRLPQGFKNSPTLFNEALHRDLADFRIQHPDLILLQYVDDLLLAATSELDCQQGTRALLQTLGDLGYRASAKKAQICQKQVKYLGYLLKEGQRWLTEARKETVMGQPTPKTPRQLREFLGKAGFCRLFIPGFAEMAAPLYPLTKPGTLFEWGPDQQKAYQEIKQALLTAPALGLPDLTKPFELFVDEKQGYAKGVLTQKLGPWRRPVAYLSKKLDPVAAGWPPCLRMVAAIAVLTKDAGKLTMGQPLVILAPHAVEALVKQPPDRWLSNARMTHYQALLLDTDRVQFGPIVALNPATLLPLPEEGLQHDCLDILAEAHGTRPDLTDQPLPDADHTWYTDGSSFLQEGQRKAGAAVTTETEVVWAKALPAGTSAQRAELIALTQALKMAEGKKLNVYTDSRYAFATAHIHGEIYRRRGWLTSEGKEIKNKDEILALLKALFLPKRLSIIHCPGHQKGNRAEARGNRMADQAAREVATRETPETSTLLAGKRTADGSEFEKRTADGSEFESPKKKAKVE

SEQ ID NO: 2572 - protein, 2091 aa, synthetic construct
  source 1..2091: note = Description of Artificial Sequence: Synthetic polypeptide
MPAAKRVKLDGGDKKYSIGLDIGTNSVGWAVITDEYKVPSKKFKVLGNTDRHSIKKNLIGALLFDSGETAEATRLKRTARRRYTRRKNRICYLQEIFSNEMAKVDDSFFHRLEESFLVEEDKKHERHPIFGNIVDEVAYHEKYPTIYHLRKKLVDSTDKADLRLIYLALAHMIKFRGHFLIEGDLNPDNSDVDKLFIQLVQTYNQLFEENPINASGVDAKAILSARLSKSRRLENLIAQLPGEKKNGLFGNLIALSLGLTPNFKSNFDLAEDAKLQLSKDTYDDDLDNLLAQIGDQYADLFLAAKNLSDAILLSDILRVNTEITKAPLSASMIKRYDEHHQDLTLLKALVRQQLPEKYKEIFFDQSKNGYAGYIDGGASQEEFYKFIKPILEKMDGTEELLVKLNREDLLRKQRTFDNGSIPHQIHLGELHAILRRQEDFYPFLKDNREKIEKILTFRIPYYVGPLARGNSRFAWMTRKSEETITPWNFEEVVDKGASAQSFIERMTNFDKNLPNEKVLPKHSLLYEYFTVYNELTKVKYVTEGMRKPAFLSGEQKKAIVDLLFKTNRKVTVKQLKEDYFKKIECFDSVEISGVEDRFNASLGTYHDLLKIIKDKDFLDNEENEDILEDIVLTLTLFEDREMIEERLKTYAHLFDDKVMKQLKRRRYTGWGRLSRKLINGIRDKQSGKTILDFLKSDGFANRNFMQLIHDDSLTFKEDIQKAQVSGQGDSLHEHIANLAGSPAIKKGILQTVKVVDELVKVMGRHKPENIVIEMARENQTTQKGQKNSRERMKRIEEGIKELGSQILKEHPVENTQLQNEKLYLYYLQNGRDMYVDQELDINRLSDYDVDHIVPQSFLKDDSIDNKVLTRSDKARGKSDNVPSEEVVKKMKNYWRQLLNAKLITQRKFDNLTKAERGGLSELDKAGFIKRQLVETRQITKHVAQILDSRMNTKYDENDKLIREVKVITLKSKLVSDFRKDFQFYKVREINNYHHAHDAYLNAVVGTALIKKYPKLESEFVYGDYKVYDVRKMIAKSEQEIGKATAKYFFYSNIMNFFKTEITLANGEIRKRPLIETNGETGEIVWDKGRDFATVRKVLSMPQVNIVKKTEVQTGGFSKESILPKRNSDKLIARKKDWDPKKYGGFDSPTVAYSVLVVAKVEKGKSKKLKSVKELLGITIMERSSFEKNPIDFLEAKGYKEVKKDLIIKLPKYSLFELENGRKRMLASAGELQKGNELALPSKYVNFLYLASHYEKLKGSPEDNEQKQLFVEQHKHYLDEIIEQISEFSKRVILADANLDKVLSAYNKHRDKPIREQAENIIHLFTLTNLGAPAAFKYFDTTIDRKRYTSTKEVLDATLIHQSITGLYETRIDLSQLGGDGGGSSPAPGGTLNIEDEYRLHETSKGPDVPLGSTWLSDFPQAWAETGGMGLAVRQAPLIIPLKATSTPVSIKQYPMSQEARLGIKPHIQRLLDQGILVPCQSPWNTPLLPVKKPGTNDYRPVQDLREVNKRVEDIHPTVPNPYNLLSGLPPSHQWYTVLDLKDAFFCLRLHPTSQSLFAFEWRDPEMGISGQLTWTRLPQGFKNSPTLFNEALHRDLADFRIQHPDLILLQYVDDLLLAATSELDCQQGTRALLQTLGDLGYRASAKKAQICQKQVKYLGYLLKEGQRWLTEARKETVMGQPTPKTPRQLREFLGKAGFCRLFIPGFAEMAAPLYPLTKPGTLFEWGPDQQKAYQEIKQALLTAPALGLPDLTKPFELFVDEKQGYAKGVLTQKLGPWRRPVAYLSKKLDPVAAGWPPCLRMVAAIAVLTKDAGKLTMGQPLVILAPHAVEALVKQPPDRWLSNARMTHYQALLLDTDRVQFGPIVALNPATLLPLPEEGLQHDCLDILAEAHGTRPDLTDQPLPDADHTWYTDGSSFLQEGQRKAGAAVTTETEVVWAKALPAGTSAQRAELIALTQALKMAEGKKLNVYTDSRYAFATAHIHGEIYRRRGWLTSEGKEIKNKDEILALLKALFLPKRLSIIHCPGHQKGNRAEARGNRMADQAAREVATRETPETSTLLAGKRTADGSEFEKRTADGSEFESPKKKAKVE

SEQ ID NO: 2573 - protein, 2094 aa, synthetic construct
  source 1..2094: note = Description of Artificial Sequence: Synthetic polypeptide
MPAAKRVKLDGGDKKYSIGLDIGTNSVGWAVITDEYKVPSKKFKVLGNTDRHSIKKNLIGALLFDSGETAEATRLKRTARRRYTRRKNRICYLQEIFSNEMAKVDDSFFHRLEESFLVEEDKKHERHPIFGNIVDEVAYHEKYPTIYHLRKKLVDSTDKADLRLIYLALAHMIKFRGHFLIEGDLNPDNSDVDKLFIQLVQTYNQLFEENPINASGVDAKAILSARLSKSRRLENLIAQLPGEKKNGLFGNLIALSLGLTPNFKSNFDLAEDAKLQLSKDTYDDDLDNLLAQIGDQYADLFLAAKNLSDAILLSDILRVNTEITKAPLSASMIKRYDEHHQDLTLLKALVRQQLPEKYKEIFFDQSKNGYAGYIDGGASQEEFYKFIKPILEKMDGTEELLVKLNREDLLRKQRTFDNGSIPHQIHLGELHAILRRQEDFYPFLKDNREKIEKILTFRIPYYVGPLARGNSRFAWMTRKSEETITPWNFEEVVDKGASAQSFIERMTNFDKNLPNEKVLPKHSLLYEYFTVYNELTKVKYVTEGMRKPAFLSGEQKKAIVDLLFKTNRKVTVKQLKEDYFKKIECFDSVEISGVEDRFNASLGTYHDLLKIIKDKDFLDNEENEDILEDIVLTLTLFEDREMIEERLKTYAHLFDDKVMKQLKRRRYTGWGRLSRKLINGIRDKQSGKTILDFLKSDGFANRNFMQLIHDDSLTFKEDIQKAQVSGQGDSLHEHIANLAGSPAIKKGILQTVKVVDELVKVMGRHKPENIVIEMARENQTTQKGQKNSRERMKRIEEGIKELGSQILKEHPVENTQLQNEKLYLYYLQNGRDMYVDQELDINRLSDYDVDHIVPQSFLKDDSIDNKVLTRSDKARGKSDNVPSEEVVKKMKNYWRQLLNAKLITQRKFDNLTKAERGGLSELDKAGFIKRQLVETRQITKHVAQILDSRMNTKYDENDKLIREVKVITLKSKLVSDFRKDFQFYKVREINNYHHAHDAYLNAVVGTALIKKYPKLESEFVYGDYKVYDVRKMIAKSEQEIGKATAKYFFYSNIMNFFKTEITLANGEIRKRPLIETNGETGEIVWDKGRDFATVRKVLSMPQVNIVKKTEVQTGGFSKESILPKRNSDKLIARKKDWDPKKYGGFDSPTVAYSVLVVAKVEKGKSKKLKSVKELLGITIMERSSFEKNPIDFLEAKGYKEVKKDLIIKLPKYSLFELENGRKRMLASAGELQKGNELALPSKYVNFLYLASHYEKLKGSPEDNEQKQLFVEQHKHYLDEIIEQISEFSKRVILADANLDKVLSAYNKHRDKPIREQAENIIHLFTLTNLGAPAAFKYFDTTIDRKRYTSTKEVLDATLIHQSITGLYETRIDLSQLGGDGGGGSPAPGGGGGTLNIEDEYRLHETSKGPDVPLGSTWLSDFPQAWAETGGMGLAVRQAPLIIPLKATSTPVSIKQYPMSQEARLGIKPHIQRLLDQGILVPCQSPWNTPLLPVKKPGTNDYRPVQDLREVNKRVEDIHPTVPNPYNLLSGLPPSHQWYTVLDLKDAFFCLRLHPTSQSLFAFEWRDPEMGISGQLTWTRLPQGFKNSPTLFNEALHRDLADFRIQHPDLILLQYVDDLLLAATSELDCQQGTRALLQTLGDLGYRASAKKAQICQKQVKYLGYLLKEGQRWLTEARKETVMGQPTPKTPRQLREFLGKAGFCRLFIPGFAEMAAPLYPLTKPGTLFEWGPDQQKAYQEIKQALLTAPALGLPDLTKPFELFVDEKQGYAKGVLTQKLGPWRRPVAYLSKKLDPVAAGWPPCLRMVAAIAVLTKDAGKLTMGQPLVILAPHAVEALVKQPPDRWLSNARMTHYQALLLDTDRVQFGPIVALNPATLLPLPEEGLQHDCLDILAEAHGTRPDLTDQPLPDADHTWYTDGSSFLQEGQRKAGAAVTTETEVVWAKALPAGTSAQRAELIALTQALKMAEGKKLNVYTDSRYAFATAHIHGEIYRRRGWLTSEGKEIKNKDEILALLKALFLPKRLSIIHCPGHQKGNRAEARGNRMADQAAREVATRETPETSTLLAGKRTADGSEFEKRTADGSEFESPKKKAKVE

SEQ ID NO: 2574 - protein, 2094 aa, synthetic construct
  source 1..2094: note = Description of Artificial Sequence: Synthetic polypeptide
MPAAKRVKLDGGDKKYSIGLDIGTNSVGWAVITDEYKVPSKKFKVLGNTDRHSIKKNLIGALLFDSGETAEATRLKRTARRRYTRRKNRICYLQEIFSNEMAKVDDSFFHRLEESFLVEEDKKHERHPIFGNIVDEVAYHEKYPTIYHLRKKLVDSTDKADLRLIYLALAHMIKFRGHFLIEGDLNPDNSDVDKLFIQLVQTYNQLFEENPINASGVDAKAILSARLSKSRRLENLIAQLPGEKKNGLFGNLIALSLGLTPNFKSNFDLAEDAKLQLSKDTYDDDLDNLLAQIGDQYADLFLAAKNLSDAILLSDILRVNTEITKAPLSASMIKRYDEHHQDLTLLKALVRQQLPEKYKEIFFDQSKNGYAGYIDGGASQEEFYKFIKPILEKMDGTEELLVKLNREDLLRKQRTFDNGSIPHQIHLGELHAILRRQEDFYPFLKDNREKIEKILTFRIPYYVGPLARGNSRFAWMTRKSEETITPWNFEEVVDKGASAQSFIERMTNFDKNLPNEKVLPKHSLLYEYFTVYNELTKVKYVTEGMRKPAFLSGEQKKAIVDLLFKTNRKVTVKQLKEDYFKKIECFDSVEISGVEDRFNASLGTYHDLLKIIKDKDFLDNEENEDILEDIVLTLTLFEDREMIEERLKTYAHLFDDKVMKQLKRRRYTGWGRLSRKLINGIRDKQSGKTILDFLKSDGFANRNFMQLIHDDSLTFKEDIQKAQVSGQGDSLHEHIANLAGSPAIKKGILQTVKVVDELVKVMGRHKPENIVIEMARENQTTQKGQKNSRERMKRIEEGIKELGSQILKEHPVENTQLQNEKLYLYYLQNGRDMYVDQELDINRLSDYDVDHIVPQSFLKDDSIDNKVLTRSDKARGKSDNVPSEEVVKKMKNYWRQLLNAKLITQRKFDNLTKAERGGLSELDKAGFIKRQLVETRQITKHVAQILDSRMNTKYDENDKLIREVKVITLKSKLVSDFRKDFQFYKVREINNYHHAHDAYLNAVVGTALIKKYPKLESEFVYGDYKVYDVRKMIAKSEQEIGKATAKYFFYSNIMNFFKTEITLANGEIRKRPLIETNGETGEIVWDKGRDFATVRKVLSMPQVNIVKKTEVQTGGFSKESILPKRNSDKLIARKKDWDPKKYGGFDSPTVAYSVLVVAKVEKGKSKKLKSVKELLGITIMERSSFEKNPIDFLEAKGYKEVKKDLIIKLPKYSLFELENGRKRMLASAGELQKGNELALPSKYVNFLYLASHYEKLKGSPEDNEQKQLFVEQHKHYLDEIIEQISEFSKRVILADANLDKVLSAYNKHRDKPIREQAENIIHLFTLTNLGAPAAFKYFDTTIDRKRYTSTKEVLDATLIHQSITGLYETRIDLSQLGGDGGPAPGGSGGGGGTLNIEDEYRLHETSKGPDVPLGSTWLSDFPQAWAETGGMGLAVRQAPLIIPLKATSTPVSIKQYPMSQEARLGIKPHIQRLLDQGILVPCQSPWNTPLLPVKKPGTNDYRPVQDLREVNKRVEDIHPTVPNPYNLLSGLPPSHQWYTVLDLKDAFFCLRLHPTSQSLFAFEWRDPEMGISGQLTWTRLPQGFKNSPTLFNEALHRDLADFRIQHPDLILLQYVDDLLLAATSELDCQQGTRALLQTLGDLGYRASAKKAQICQKQVKYLGYLLKEGQRWLTEARKETVMGQPTPKTPRQLREFLGKAGFCRLFIPGFAEMAAPLYPLTKPGTLFEWGPDQQKAYQEIKQALLTAPALGLPDLTKPFELFVDEKQGYAKGVLTQKLGPWRRPVAYLSKKLDPVAAGWPPCLRMVAAIAVLTKDAGKLTMGQPLVILAPHAVEALVKQPPDRWLSNARMTHYQALLLDTDRVQFGPIVALNPATLLPLPEEGLQHDCLDILAEAHGTRPDLTDQPLPDADHTWYTDGSSFLQEGQRKAGAAVTTETEVVWAKALPAGTSAQRAELIALTQALKMAEGKKLNVYTDSRYAFATAHIHGEIYRRRGWLTSEGKEIKNKDEILALLKALFLPKRLSIIHCPGHQKGNRAEARGNRMADQAAREVATRETPETSTLLAGKRTADGSEFEKRTADGSEFESPKKKAKVE

SEQ ID NO: 2575 - protein, 2096 aa, synthetic construct
  source 1..2096: note = Description of Artificial Sequence: Synthetic polypeptide
MPAAKRVKLDGGDKKYSIGLDIGTNSVGWAVITDEYKVPSKKFKVLGNTDRHSIKKNLIGALLFDSGETAEATRLKRTARRRYTRRKNRICYLQEIFSNEMAKVDDSFFHRLEESFLVEEDKKHERHPIFGNIVDEVAYHEKYPTIYHLRKKLVDSTDKADLRLIYLALAHMIKFRGHFLIEGDLNPDNSDVDKLFIQLVQTYNQLFEENPINASGVDAKAILSARLSKSRRLENLIAQLPGEKKNGLFGNLIALSLGLTPNFKSNFDLAEDAKLQLSKDTYDDDLDNLLAQIGDQYADLFLAAKNLSDAILLSDILRVNTEITKAPLSASMIKRYDEHHQDLTLLKALVRQQLPEKYKEIFFDQSKNGYAGYIDGGASQEEFYKFIKPILEKMDGTEELLVKLNREDLLRKQRTFDNGSIPHQIHLGELHAILRRQEDFYPFLKDNREKIEKILTFRIPYYVGPLARGNSRFAWMTRKSEETITPWNFEEVVDKGASAQSFIERMTNFDKNLPNEKVLPKHSLLYEYFTVYNELTKVKYVTEGMRKPAFLSGEQKKAIVDLLFKTNRKVTVKQLKEDYFKKIECFDSVEISGVEDRFNASLGTYHDLLKIIKDKDFLDNEENEDILEDIVLTLTLFEDREMIEERLKTYAHLFDDKVMKQLKRRRYTGWGRLSRKLINGIRDKQSGKTILDFLKSDGFANRNFMQLIHDDSLTFKEDIQKAQVSGQGDSLHEHIANLAGSPAIKKGILQTVKVVDELVKVMGRHKPENIVIEMARENQTTQKGQKNSRERMKRIEEGIKELGSQILKEHPVENTQLQNEKLYLYYLQNGRDMYVDQELDINRLSDYDVDHIVPQSFLKDDSIDNKVLTRSDKARGKSDNVPSEEVVKKMKNYWRQLLNAKLITQRKFDNLTKAERGGLSELDKAGFIKRQLVETRQITKHVAQILDSRMNTKYDENDKLIREVKVITLKSKLVSDFRKDFQFYKVREINNYHHAHDAYLNAVVGTALIKKYPKLESEFVYGDYKVYDVRKMIAKSEQEIGKATAKYFFYSNIMNFFKTEITLANGEIRKRPLIETNGETGEIVWDKGRDFATVRKVLSMPQVNIVKKTEVQTGGFSKESILPKRNSDKLIARKKDWDPKKYGGFDSPTVAYSVLVVAKVEKGKSKKLKSVKELLGITIMERSSFEKNPIDFLEAKGYKEVKKDLIIKLPKYSLFELENGRKRMLASAGELQKGNELALPSKYVNFLYLASHYEKLKGSPEDNEQKQLFVEQHKHYLDEIIEQISEFSKRVILADANLDKVLSAYNKHRDKPIREQAENIIHLFTLTNLGAPAAFKYFDTTIDRKRYTSTKEVLDATLIHQSITGLYETRIDLSQLGGDGGGGGGSSEAAAKGGTLNIEDEYRLHETSKGPDVPLGSTWLSDFPQAWAETGGMGLAVRQAPLIIPLKATSTPVSIKQYPMSQEARLGIKPHIQRLLDQGILVPCQSPWNTPLLPVKKPGTNDYRPVQDLREVNKRVEDIHPTVPNPYNLLSGLPPSHQWYTVLDLKDAFFCLRLHPTSQSLFAFEWRDPEMGISGQLTWTRLPQGFKNSPTLFNEALHRDLADFRIQHPDLILLQYVDDLLLAATSELDCQQGTRALLQTLGDLGYRASAKKAQICQKQVKYLGYLLKEGQRWLTEARKETVMGQPTPKTPRQLREFLGKAGFCRLFIPGFAEMAAPLYPLTKPGTLFEWGPDQQKAYQEIKQALLTAPALGLPDLTKPFELFVDEKQGYAKGVLTQKLGPWRRPVAYLSKKLDPVAAGWPPCLRMVAAIAVLTKDAGKLTMGQPLVILAPHAVEALVKQPPDRWLSNARMTHYQALLLDTDRVQFGPIVALNPATLLPLPEEGLQHDCLDILAEAHGTRPDLTDQPLPDADHTWYTDGSSFLQEGQRKAGAAVTTETEVVWAKALPAGTSAQRAELIALTQALKMAEGKKLNVYTDSRYAFATAHIHGEIYRRRGWLTSEGKEIKNKDEILALLKALFLPKRLSIIHCPGHQKGNRAEARGNRMADQAAREVATRETPETSTLLAGKRTADGSEFEKRTADGSEFESPKKKAKVE

SEQ ID NO: 2576 - protein, 2096 aa, synthetic construct
  source 1..2096: note = Description of Artificial Sequence: Synthetic polypeptide
MPAAKRVKLDGGDKKYSIGLDIGTNSVGWAVITDEYKVPSKKFKVLGNTDRHSIKKNLIGALLFDSGETAEATRLKRTARRRYTRRKNRICYLQEIFSNEMAKVDDSFFHRLEESFLVEEDKKHERHPIFGNIVDEVAYHEKYPTIYHLRKKLVDSTDKADLRLIYLALAHMIKFRGHFLIEGDLNPDNSDVDKLFIQLVQTYNQLFEENPINASGVDAKAILSARLSKSRRLENLIAQLPGEKKNGLFGNLIALSLGLTPNFKSNFDLAEDAKLQLSKDTYDDDLDNLLAQIGDQYADLFLAAKNLSDAILLSDILRVNTEITKAPLSASMIKRYDEHHQDLTLLKALVRQQLPEKYKEIFFDQSKNGYAGYIDGGASQEEFYKFIKPILEKMDGTEELLVKLNREDLLRKQRTFDNGSIPHQIHLGELHAILRRQEDFYPFLKDNREKIEKILTFRIPYYVGPLARGNSRFAWMTRKSEETITPWNFEEVVDKGASAQSFIERMTNFDKNLPNEKVLPKHSLLYEYFTVYNELTKVKYVTEGMRKPAFLSGEQKKAIVDLLFKTNRKVTVKQLKEDYFKKIECFDSVEISGVEDRFNASLGTYHDLLKIIKDKDFLDNEENEDILEDIVLTLTLFEDREMIEERLKTYAHLFDDKVMKQLKRRRYTGWGRLSRKLINGIRDKQSGKTILDFLKSDGFANRNFMQLIHDDSLTFKEDIQKAQVSGQGDSLHEHIANLAGSPAIKKGILQTVKVVDELVKVMGRHKPENIVIEMARENQTTQKGQKNSRERMKRIEEGIKELGSQILKEHPVENTQLQNEKLYLYYLQNGRDMYVDQELDINRLSDYDVDHIVPQSFLKDDSIDNKVLTRSDKARGKSDNVPSEEVVKKMKNYWRQLLNAKLITQRKFDNLTKAERGGLSELDKAGFIKRQLVETRQITKHVAQILDSRMNTKYDENDKLIREVKVITLKSKLVSDFRKDFQFYKVREINNYHHAHDAYLNAVVGTALIKKYPKLESEFVYGDYKVYDVRKMIAKSEQEIGKATAKYFFYSNIMNFFKTEITLANGEIRKRPLIETNGETGEIVWDKGRDFATVRKVLSMPQVNIVKKTEVQTGGFSKESILPKRNSDKLIARKKDWDPKKYGGFDSPTVAYSVLVVAKVEKGKSKKLKSVKELLGITIMERSSFEKNPIDFLEAKGYKEVKKDLIIKLPKYSLFELENGRKRMLASAGELQKGNELALPSKYVNFLYLASHYEKLKGSPEDNEQKQLFVEQHKHYLDEIIEQISEFSKRVILADANLDKVLSAYNKHRDKPIREQAENIIHLFTLTNLGAPAAFKYFDTTIDRKRYTSTKEVLDATLIHQSITGLYETRIDLSQLGGDGGGGGEAAAKGSSGGTLNIEDEYRLHETSKGPDVPLGSTWLSDFPQAWAETGGMGLAVRQAPLIIPLKATSTPVSIKQYPMSQEARLGIKPHIQRLLDQGILVPCQSPWNTPLLPVKKPGTNDYRPVQDLREVNKRVEDIHPTVPNPYNLLSGLPPSHQWYTVLDLKDAFFCLRLHPTSQSLFAFEWRDPEMGISGQLTWTRLPQGFKNSPTLFNEALHRDLADFRIQHPDLILLQYVDDLLLAATSELDCQQGTRALLQTLGDLGYRASAKKAQICQKQVKYLGYLLKEGQRWLTEARKETVMGQPTPKTPRQLREFLGKAGFCRLFIPGFAEMAAPLYPLTKPGTLFEWGPDQQKAYQEIKQALLTAPALGLPDLTKPFELFVDEKQGYAKGVLTQKLGPWRRPVAYLSKKLDPVAAGWPPCLRMVAAIAVLTKDAGKLTMGQPLVILAPHAVEALVKQPPDRWLSNARMTHYQALLLDTDRVQFGPIVALNPATLLPLPEEGLQHDCLDILAEAHGTRPDLTDQPLPDADHTWYTDGSSFLQEGQRKAGAAVTTETEVVWAKALPAGTSAQRAELIALTQALKMAEGKKLNVYTDSRYAFATAHIHGEIYRRRGWLTSEGKEIKNKDEILALLKALFLPKRLSIIHCPGHQKGNRAEARGNRMADQAAREVATRETPETSTLLAGKRTADGSEFEKRTADGSEFESPKKKAKVE

SEQ ID NO: 2577 - protein, 2096 aa, synthetic construct
  source 1..2096: note = Description of Artificial Sequence: Synthetic polypeptide
MPAAKRVKLDGGDKKYSIGLDIGTNSVGWAVITDEYKVPSKKFKVLGNTDRHSIKKNLIGALLFDSGETAEATRLKRTARRRYTRRKNRICYLQEIFSNEMAKVDDSFFHRLEESFLVEEDKKHERHPIFGNIVDEVAYHEKYPTIYHLRKKLVDSTDKADLRLIYLALAHMIKFRGHFLIEGDLNPDNSDVDKLFIQLVQTYNQLFEENPINASGVDAKAILSARLSKSRRLENLIAQLPGEKKNGLFGNLIALSLGLTPNFKSNFDLAEDAKLQLSKDTYDDDLDNLLAQIGDQYADLFLAAKNLSDAILLSDILRVNTEITKAPLSASMIKRYDEHHQDLTLLKALVRQQLPEKYKEIFFDQSKNGYAGYIDGGASQEEFYKFIKPILEKMDGTEELLVKLNREDLLRKQRTFDNGSIPHQIHLGELHAILRRQEDFYPFLKDNREKIEKILTFRIPYYVGPLARGNSRFAWMTRKSEETITPWNFEEVVDKGASAQSFIERMTNFDKNLPNEKVLPKHSLLYEYFTVYNELTKVKYVTEGMRKPAFLSGEQKKAIVDLLFKTNRKVTVKQLKEDYFKKIECFDSVEISGVEDRFNASLGTYHDLLKIIKDKDFLDNEENEDILEDIVLTLTLFEDREMIEERLKTYAHLFDDKVMKQLKRRRYTGWGRLSRKLINGIRDKQSGKTILDFLKSDGFANRNFMQLIHDDSLTFKEDIQKAQVSGQGDSLHEHIANLAGSPAIKKGILQTVKVVDELVKVMGRHKPENIVIEMARENQTTQKGQKNSRERMKRIEEGIKELGSQILKEHPVENTQLQNEKLYLYYLQNGRDMYVDQELDINRLSDYDVDHIVPQSFLKDDSIDNKVLTRSDKARGKSDNVPSEEVVKKMKNYWRQLLNAKLITQRKFDNLTKAERGGLSELDKAGFIKRQLVETRQITKHVAQILDSRMNTKYDENDKLIREVKVITLKSKLVSDFRKDFQFYKVREINNYHHAHDAYLNAVVGTALIKKYPKLESEFVYGDYKVYDVRKMIAKSEQEIGKATAKYFFYSNIMNFFKTEITLANGEIRKRPLIETNGETGEIVWDKGRDFATVRKVLSMPQVNIVKKTEVQTGGFSKESILPKRNSDKLIARKKDWDPKKYGGFDSPTVAYSVLVVAKVEKGKSKKLKSVKELLGITIMERSSFEKNPIDFLEAKGYKEVKKDLIIKLPKYSLFELENGRKRMLASAGELQKGNELALPSKYVNFLYLASHYEKLKGSPEDNEQKQLFVEQHKHYLDEIIEQISEFSKRVILADANLDKVLSAYNKHRDKPIREQAENIIHLFTLTNLGAPAAFKYFDTTIDRKRYTSTKEVLDATLIHQSITGLYETRIDLSQLGGDGGPAPEAAAKGGSGGTLNIEDEYRLHETSKGPDVPLGSTWLSDFPQAWAETGGMGLAVRQAPLIIPLKATSTPVSIKQYPMSQEARLGIKPHIQRLLDQGILVPCQSPWNTPLLPVKKPGTNDYRPVQDLREVNKRVEDIHPTVPNPYNLLSGLPPSHQWYTVLDLKDAFFCLRLHPTSQSLFAFEWRDPEMGISGQLTWTRLPQGFKNSPTLFNEALHRDLADFRIQHPDLILLQYVDDLLLAATSELDCQQGTRALLQTLGDLGYRASAKKAQICQKQVKYLGYLLKEGQRWLTEARKETVMGQPTPKTPRQLREFLGKAGFCRLFIPGFAEMAAPLYPLTKPGTLFEWGPDQQKAYQEIKQALLTAPALGLPDLTKPFELFVDEKQGYAKGVLTQKLGPWRRPVAYLSKKLDPVAAGWPPCLRMVAAIAVLTKDAGKLTMGQPLVILAPHAVEALVKQPPDRWLSNARMTHYQALLLDTDRVQFGPIVALNPATLLPLPEEGLQHDCLDILAEAHGTRPDLTDQPLPDADHTWYTDGSSFLQEGQRKAGAAVTTETEVVWAKALPAGTSAQRAELIALTQALKMAEGKKLNVYTDSRYAFATAHIHGEIYRRRGWLTSEGKEIKNKDEILALLKALFLPKRLSIIHCPGHQKGNRAEARGNRMADQAAREVATRETPETSTLLAGKRTADGSEFEKRTADGSEFESPKKKAKVE

SEQ ID NO: 2578 - protein, 2096 aa, synthetic construct
  source 1..2096: note = Description of Artificial Sequence: Synthetic polypeptide
MPAAKRVKLDGGDKKYSIGLDIGTNSVGWAVITDEYKVPSKKFKVLGNTDRHSIKKNLIGALLFDSGETAEATRLKRTARRRYTRRKNRICYLQEIFSNEMAKVDDSFFHRLEESFLVEEDKKHERHPIFGNIVDEVAYHEKYPTIYHLRKKLVDSTDKADLRLIYLALAHMIKFRGHFLIEGDLNPDNSDVDKLFIQLVQTYNQLFEENPINASGVDAKAILSARLSKSRRLENLIAQLPGEKKNGLFGNLIALSLGLTPNFKSNFDLAEDAKLQLSKDTYDDDLDNLLAQIGDQYADLFLAAKNLSDAILLSDILRVNTEITKAPLSASMIKRYDEHHQDLTLLKALVRQQLPEKYKEIFFDQSKNGYAGYIDGGASQEEFYKFIKPILEKMDGTEELLVKLNREDLLRKQRTFDNGSIPHQIHLGELHAILRRQEDFYPFLKDNREKIEKILTFRIPYYVGPLARGNSRFAWMTRKSEETITPWNFEEVVDKGASAQSFIERMTNFDKNLPNEKVLPKHSLLYEYFTVYNELTKVKYVTEGMRKPAFLSGEQKKAIVDLLFKTNRKVTVKQLKEDYFKKIECFDSVEISGVEDRFNASLGTYHDLLKIIKDKDFLDNEENEDILEDIVLTLTLFEDREMIEERLKTYAHLFDDKVMKQLKRRRYTGWGRLSRKLINGIRDKQSGKTILDFLKSDGFANRNFMQLIHDDSLTFKEDIQKAQVSGQGDSLHEHIANLAGSPAIKKGILQTVKVVDELVKVMGRHKPENIVIEMARENQTTQKGQKNSRERMKRIEEGIKELGSQILKEHPVENTQLQNEKLYLYYLQNGRDMYVDQELDINRLSDYDVDHIVPQSFLKDDSIDNKVLTRSDKARGKSDNVPSEEVVKKMKNYWRQLLNAKLITQRKFDNLTKAERGGLSELDKAGFIKRQLVETRQITKHVAQILDSRMNTKYDENDKLIREVKVITLKSKLVSDFRKDFQFYKVREINNYHHAHDAYLNAVVGTALIKKYPKLESEFVYGDYKVYDVRKMIAKSEQEIGKATAKYFFYSNIMNFFKTEITLANGEIRKRPLIETNGETGEIVWDKGRDFATVRKVLSMPQVNIVKKTEVQTGGFSKESILPKRNSDKLIARKKDWDPKKYGGFDSPTVAYSVLVVAKVEKGKSKKLKSVKELLGITIMERSSFEKNPIDFLEAKGYKEVKKDLIIKLPKYSLFELENGRKRMLASAGELQKGNELALPSKYVNFLYLASHYEKLKGSPEDNEQKQLFVEQHKHYLDEIIEQISEFSKRVILADANLDKVLSAYNKHRDKPIREQAENIIHLFTLTNLGAPAAFKYFDTTIDRKRYTSTKEVLDATLIHQSITGLYETRIDLSQLGGDGGGGSEAAAKGGGGGTLNIEDEYRLHETSKGPDVPLGSTWLSDFPQAWAETGGMGLAVRQAPLIIPLKATSTPVSIKQYPMSQEARLGIKPHIQRLLDQGILVPCQSPWNTPLLPVKKPGTNDYRPVQDLREVNKRVEDIHPTVPNPYNLLSGLPPSHQWYTVLDLKDAFFCLRLHPTSQSLFAFEWRDPEMGISGQLTWTRLPQGFKNSPTLFNEALHRDLADFRIQHPDLILLQYVDDLLLAATSELDCQQGTRALLQTLGDLGYRASAKKAQICQKQVKYLGYLLKEGQRWLTEARKETVMGQPTPKTPRQLREFLGKAGFCRLFIPGFAEMAAPLYPLTKPGTLFEWGPDQQKAYQEIKQALLTAPALGLPDLTKPFELFVDEKQGYAKGVLTQKLGPWRRPVAYLSKKLDPVAAGWPPCLRMVAAIAVLTKDAGKLTMGQPLVILAPHAVEALVKQPPDRWLSNARMTHYQALLLDTDRVQFGPIVALNPATLLPLPEEGLQHDCLDILAEAHGTRPDLTDQPLPDADHTWYTDGSSFLQEGQRKAGAAVTTETEVVWAKALPAGTSAQRAELIALTQALKMAEGKKLNVYTDSRYAFATAHIHGEIYRRRGWLTSEGKEIKNKDEILALLKALFLPKRLSIIHCPGHQKGNRAEARGNRMADQAAREVATRETPETSTLLAGKRTADGSEFEKRTADGSEFESPKKKAKVE

SEQ ID NO: 2579 - protein, 2090 aa, synthetic construct
  source 1..2090: note = Description of Artificial Sequence: Synthetic polypeptide
MPAAKRVKLDGGDKKYSIGLDIGTNSVGWAVITDEYKVPSKKFKVLGNTDRHSIKKNLIGALLFDSGETAEATRLKRTARRRYTRRKNRICYLQEIFSNEMAKVDDSFFHRLEESFLVEEDKKHERHPIFGNIVDEVAYHEKYPTIYHLRKKLVDSTDKADLRLIYLALAHMIKFRGHFLIEGDLNPDNSDVDKLFIQLVQTYNQLFEENPINASGVDAKAILSARLSKSRRLENLIAQLPGEKKNGLFGNLIALSLGLTPNFKSNFDLAEDAKLQLSKDTYDDDLDNLLAQIGDQYADLFLAAKNLSDAILLSDILRVNTEITKAPLSASMIKRYDEHHQDLTLLKALVRQQLPEKYKEIFFDQSKNGYAGYIDGGASQEEFYKFIKPILEKMDGTEELLVKLNREDLLRKQRTFDNGSIPHQIHLGELHAILRRQEDFYPFLKDNREKIEKILTFRIPYYVGPLARGNSRFAWMTRKSEETITPWNFEEVVDKGASAQSFIERMTNFDKNLPNEKVLPKHSLLYEYFTVYNELTKVKYVTEGMRKPAFLSGEQKKAIVDLLFKTNRKVTVKQLKEDYFKKIECFDSVEISGVEDRFNASLGTYHDLLKIIKDKDFLDNEENEDILEDIVLTLTLFEDREMIEERLKTYAHLFDDKVMKQLKRRRYTGWGRLSRKLINGIRDKQSGKTILDFLKSDGFANRNFMQLIHDDSLTFKEDIQKAQVSGQGDSLHEHIANLAGSPAIKKGILQTVKVVDELVKVMGRHKPENIVIEMARENQTTQKGQKNSRERMKRIEEGIKELGSQILKEHPVENTQLQNEKLYLYYLQNGRDMYVDQELDINRLSDYDVDHIVPQSFLKDDSIDNKVLTRSDKARGKSDNVPSEEVVKKMKNYWRQLLNAKLITQRKFDNLTKAERGGLSELDKAGFIKRQLVETRQITKHVAQILDSRMNTKYDENDKLIREVKVITLKSKLVSDFRKDFQFYKVREINNYHHAHDAYLNAVVGTALIKKYPKLESEFVYGDYKVYDVRKMIAKSEQEIGKATAKYFFYSNIMNFFKTEITLANGEIRKRPLIETNGETGEIVWDKGRDFATVRKVLSMPQVNIVKKTEVQTGGFSKESILPKRNSDKLIARKKDWDPKKYGGFDSPTVAYSVLVVAKVEKGKSKKLKSVKELLGITIMERSSFEKNPIDFLEAKGYKEVKKDLIIKLPKYSLFELENGRKRMLASAGELQKGNELALPSKYVNFLYLASHYEKLKGSPEDNEQKQLFVEQHKHYLDEIIEQISEFSKRVILADANLDKVLSAYNKHRDKPIREQAENIIHLFTLTNLGAPAAFKYFDTTIDRKRYTSTKEVLDATLIHQSITGLYETRIDLSQLGGDGGGGGGGGGTLNIEDEYRLHETSKGPDVPLGSTWLSDFPQAWAETGGMGLAVRQAPLIIPLKATSTPVSIKQYPMSQEARLGIKPHIQRLLDQGILVPCQSPWNTPLLPVKKPGTNDYRPVQDLREVNKRVEDIHPTVPNPYNLLSGLPPSHQWYTVLDLKDAFFCLRLHPTSQSLFAFEWRDPEMGISGQLTWTRLPQGFKNSPTLFNEALHRDLADFRIQHPDLILLQYVDDLLLAATSELDCQQGTRALLQTLGDLGYRASAKKAQICQKQVKYLGYLLKEGQRWLTEARKETVMGQPTPKTPRQLREFLGKAGFCRLFIPGFAEMAAPLYPLTKPGTLFEWGPDQQKAYQEIKQALLTAPALGLPDLTKPFELFVDEKQGYAKGVLTQKLGPWRRPVAYLSKKLDPVAAGWPPCLRMVAAIAVLTKDAGKLTMGQPLVILAPHAVEALVKQPPDRWLSNARMTHYQALLLDTDRVQFGPIVALNPATLLPLPEEGLQHDCLDILAEAHGTRPDLTDQPLPDADHTWYTDGSSFLQEGQRKAGAAVTTETEVVWAKALPAGTSAQRAELIALTQALKMAEGKKLNVYTDSRYAFATAHIHGEIYRRRGWLTSEGKEIKNKDEILALLKALFLPKRLSIIHCPGHQKGNRAEARGNRMADQAAREVATRETPETSTLLAGKRTADGSEFEKRTADGSEFESPKKKAKVE

SEQ ID NO: 2580 - protein, 2094 aa, synthetic construct
  source 1..2094: note = Description of Artificial Sequence: Synthetic polypeptide
MPAAKRVKLDGGDKKYSIGLDIGTNSVGWAVITDEYKVPSKKFKVLGNTDRHSIKKNLIGALLFDSGETAEATRLKRTARRRYTRRKNRICYLQEIFSNEMAKVDDSFFHRLEESFLVEEDKKHERHPIFGNIVDEVAYHEKYPTIYHLRKKLVDSTDKADLRLIYLALAHMIKFRGHFLIEGDLNPDNSDVDKLFIQLVQTYNQLFEENPINASGVDAKAILSARLSKSRRLENLIAQLPGEKKNGLFGNLIALSLGLTPNFKSNFDLAEDAKLQLSKDTYDDDLDNLLAQIGDQYADLFLAAKNLSDAILLSDILRVNTEITKAPLSASMIKRYDEHHQDLTLLKALVRQQLPEKYKEIFFDQSKNGYAGYIDGGASQEEFYKFIKPILEKMDGTEELLVKLNREDLLRKQRTFDNGSIPHQIHLGELHAILRRQEDFYPFLKDNREKIEKILTFRIPYYVGPLARGNSRFAWMTRKSEETITPWNFEEVVDKGASAQSFIERMTNFDKNLPNEKVLPKHSLLYEYFTVYNELTKVKYVTEGMRKPAFLSGEQKKAIVDLLFKTNRKVTVKQLKEDYFKKIECFDSVEISGVEDRFNASLGTYHDLLKIIKDKDFLDNEENEDILEDIVLTLTLFEDREMIEERLKTYAHLFDDKVMKQLKRRRYTGWGRLSRKLINGIRDKQSGKTILDFLKSDGFANRNFMQLIHDDSLTFKEDIQKAQVSGQGDSLHEHIANLAGSPAIKKGILQTVKVVDELVKVMGRHKPENIVIEMARENQTTQKGQKNSRERMKRIEEGIKELGSQILKEHPVENTQLQNEKLYLYYLQNGRDMYVDQELDINRLSDYDVDHIVPQSFLKDDSIDNKVLTRSDKARGKSDNVPSEEVVKKMKNYWRQLLNAKLITQRKFDNLTKAERGGLSELDKAGFIKRQLVETRQITKHVAQILDSRMNTKYDENDKLIREVKVITLKSKLVSDFRKDFQFYKVREINNYHHAHDAYLNAVVGTALIKKYPKLESEFVYGDYKVYDVRKMIAKSEQEIGKATAKYFFYSNIMNFFKTEITLANGEIRKRPLIETNGETGEIVWDKGRDFATVRKVLSMPQVNIVKKTEVQTGGFSKESILPKRNSDKLIARKKDWDPKKYGGFDSPTVAYSVLVVAKVEKGKSKKLKSVKELLGITIMERSSFEKNPIDFLEAKGYKEVKKDLIIKLPKYSLFELENGRKRMLASAGELQKGNELALPSKYVNFLYLASHYEKLKGSPEDNEQKQLFVEQHKHYLDEIIEQISEFSKRVILADANLDKVLSAYNKHRDKPIREQAENIIHLFTLTNLGAPAAFKYFDTTIDRKRYTSTKEVLDATLIHQSITGLYETRIDLSQLGGDGGGSSPAPGGGGGTLNIEDEYRLHETSKGPDVPLGSTWLSDFPQAWAETGGMGLAVRQAPLIIPLKATSTPVSIKQYPMSQEARLGIKPHIQRLLDQGILVPCQSPWNTPLLPVKKPGTNDYRPVQDLREVNKRVEDIHPTVPNPYNLLSGLPPSHQWYTVLDLKDAFFCLRLHPTSQSLFAFEWRDPEMGISGQLTWTRLPQGFKNSPTLFNEALHRDLADFRIQHPDLILLQYVDDLLLAATSELDCQQGTRALLQTLGDLGYRASAKKAQICQKQVKYLGYLLKEGQRWLTEARKETVMGQPTPKTPRQLREFLGKAGFCRLFIPGFAEMAAPLYPLTKPGTLFEWGPDQQKAYQEIKQALLTAPALGLPDLTKPFELFVDEKQGYAKGVLTQKLGPWRRPVAYLSKKLDPVAAGWPPCLRMVAAIAVLTKDAGKLTMGQPLVILAPHAVEALVKQPPDRWLSNARMTHYQALLLDTDRVQFGPIVALNPATLLPLPEEGLQHDCLDILAEAHGTRPDLTDQPLPDADHTWYTDGSSFLQEGQRKAGAAVTTETEVVWAKALPAGTSAQRAELIALTQALKMAEGKKLNVYTDSRYAFATAHIHGEIYRRRGWLTSEGKEIKNKDEILALLKALFLPKRLSIIHCPGHQKGNRAEARGNRMADQAAREVATRETPETSTLLAGKRTADGSEFEKRTADGSEFESPKKKAKVE

SEQ ID NO: 2581 - protein, 2094 aa, synthetic construct
  source 1..2094: note = Description of Artificial Sequence: Synthetic polypeptide
MPAAKRVKLDGGDKKYSIGLDIGTNSVGWAVITDEYKVPSKKFKVLGNTDRHSIKKNLIGALLFDSGETAEATRLKRTARRRYTRRKNRICYLQEIFSNEMAKVDDSFFHRLEESFLVEEDKKHERHPIFGNIVDEVAYHEKYPTIYHLRKKLVDSTDKADLRLIYLALAHMIKFRGHFLIEGDLNPDNSDVDKLFIQLVQTYNQLFEENPINASGVDAKAILSARLSKSRRLENLIAQLPGEKKNGLFGNLIALSLGLTPNFKSNFDLAEDAKLQLSKDTYDDDLDNLLAQIGDQYADLFLAAKNLSDAILLSDILRVNTEITKAPLSASMIKRYDEHHQDLTLLKALVRQQLPEKYKEIFFDQSKNGYAGYIDGGASQEEFYKFIKPILEKMDGTEELLVKLNREDLLRKQRTFDNGSIPHQIHLGELHAILRRQEDFYPFLKDNREKIEKILTFRIPYYVGPLARGNSRFAWMTRKSEETITPWNFEEVVDKGASAQSFIERMTNFDKNLPNEKVLPKHSLLYEYFTVYNELTKVKYVTEGMRKPAFLSGEQKKAIVDLLFKTNRKVTVKQLKEDYFKKIECFDSVEISGVEDRFNASLGTYHDLLKIIKDKDFLDNEENEDILEDIVLTLTLFEDREMIEERLKTYAHLFDDKVMKQLKRRRYTGWGRLSRKLINGIRDKQSGKTILDFLKSDGFANRNFMQLIHDDSLTFKEDIQKAQVSGQGDSLHEHIANLAGSPAIKKGILQTVKVVDELVKVMGRHKPENIVIEMARENQTTQKGQKNSRERMKRIEEGIKELGSQILKEHPVENTQLQNEKLYLYYLQNGRDMYVDQELDINRLSDYDVDHIVPQSFLKDDSIDNKVLTRSDKARGKSDNVPSEEVVKKMKNYWRQLLNAKLITQRKFDNLTKAERGGLSELDKAGFIKRQLVETRQITKHVAQILDSRMNTKYDENDKLIREVKVITLKSKLVSDFRKDFQFYKVREINNYHHAHDAYLNAVVGTALIKKYPKLESEFVYGDYKVYDVRKMIAKSEQEIGKATAKYFFYSNIMNFFKTEITLANGEIRKRPLIETNGETGEIVWDKGRDFATVRKVLSMPQVNIVKKTEVQTGGFSKESILPKRNSDKLIARKKDWDPKKYGGFDSPTVAYSVLVVAKVEKGKSKKLKSVKELLGITIMERSSFEKNPIDFLEAKGYKEVKKDLIIKLPKYSLFELENGRKRMLASAGELQKGNELALPSKYVNFLYLASHYEKLKGSPEDNEQKQLFVEQHKHYLDEIIEQISEFSKRVILADANLDKVLSAYNKHRDKPIREQAENIIHLFTLTNLGAPAAFKYFDTTIDRKRYTSTKEVLDATLIHQSITGLYETRIDLSQLGGDGGPAPGSSGGSGGTLNIEDEYRLHETSKGPDVPLGSTWLSDFPQAWAETGGMGLAVRQAPLIIPLKATSTPVSIKQYPMSQEARLGIKPHIQRLLDQGILVPCQSPWNTPLLPVKKPGTNDYRPVQDLREVNKRVEDIHPTVPNPYNLLSGLPPSHQWYTVLDLKDAFFCLRLHPTSQSLFAFEWRDPEMGISGQLTWTRLPQGFKNSPTLFNEALHRDLADFRIQHPDLILLQYVDDLLLAATSELDCQQGTRALLQTLGDLGYRASAKKAQICQKQVKYLGYLLKEGQRWLTEARKETVMGQPTPKTPRQLREFLGKAGFCRLFIPGFAEMAAPLYPLTKPGTLFEWGPDQQKAYQEIKQALLTAPALGLPDLTKPFELFVDEKQGYAKGVLTQKLGPWRRPVAYLSKKLDPVAAGWPPCLRMVAAIAVLTKDAGKLTMGQPLVILAPHAVEALVKQPPDRWLSNARMTHYQALLLDTDRVQFGPIVALNPATLLPLPEEGLQHDCLDILAEAHGTRPDLTDQPLPDADHTWYTDGSSFLQEGQRKAGAAVTTETEVVWAKALPAGTSAQRAELIALTQALKMAEGKKLNVYTDSRYAFATAHIHGEIYRRRGWLTSEGKEIKNKDEILALLKALFLPKRLSIIHCPGHQKGNRAEARGNRMADQAAREVATRETPETSTLLAGKRTADGSEFEKRTADGSEFESPKKKAKVE

SEQ ID NO: 2582 - protein, 2096 aa, synthetic construct
  source 1..2096: note = Description of Artificial Sequence: Synthetic polypeptide
MPAAKRVKLDGGDKKYSIGLDIGTNSVGWAVITDEYKVPSKKFKVLGNTDRHSIKKNLIGALLFDSGETAEATRLKRTARRRYTRRKNRICYLQEIFSNEMAKVDDSFFHRLEESFLVEEDKKHERHPIFGNIVDEVAYHEKYPTIYHLRKKLVDSTDKADLRLIYLALAHMIKFRGHFLIEGDLNPDNSDVDKLFIQLVQTYNQLFEENPINASGVDAKAILSARLSKSRRLENLIAQLPGEKKNGLFGNLIALSLGLTPNFKSNFDLAEDAKLQLSKDTYDDDLDNLLAQIGDQYADLFLAAKNLSDAILLSDILRVNTEITKAPLSASMIKRYDEHHQDLTLLKALVRQQLPEKYKEIFFDQSKNGYAGYIDGGASQEEFYKFIKPILEKMDGTEELLVKLNREDLLRKQRTFDNGSIPHQIHLGELHAILRRQEDFYPFLKDNREKIEKILTFRIPYYVGPLARGNSRFAWMTRKSEETITPWNFEEVVDKGASAQSFIERMTNFDKNLPNEKVLPKHSLLYEYFTVYNELTKVKYVTEGMRKPAFLSGEQKKAIVDLLFKTNRKVTVKQLKEDYFKKIECFDSVEISGVEDRFNASLGTYHDLLKIIKDKDFLDNEENEDILEDIVLTLTLFEDREMIEERLKTYAHLFDDKVMKQLKRRRYTGWGRLSRKLINGIRDKQSGKTILDFLKSDGFANRNFMQLIHDDSLTFKEDIQKAQVSGQGDSLHEHIANLAGSPAIKKGILQTVKVVDELVKVMGRHKPENIVIEMARENQTTQKGQKNSRERMKRIEEGIKELGSQILKEHPVENTQLQNEKLYLYYLQNGRDMYVDQELDINRLSDYDVDHIVPQSFLKDDSIDNKVLTRSDKARGKSDNVPSEEVVKKMKNYWRQLLNAKLITQRKFDNLTKAERGGLSELDKAGFIKRQLVETRQITKHVAQILDSRMNTKYDENDKLIREVKVITLKSKLVSDFRKDFQFYKVREINNYHHAHDAYLNAVVGTALIKKYPKLESEFVYGDYKVYDVRKMIAKSEQEIGKATAKYFFYSNIMNFFKTEITLANGEIRKRPLIETNGETGEIVWDKGRDFATVRKVLSMPQVNIVKKTEVQTGGFSKESILPKRNSDKLIARKKDWDPKKYGGFDSPTVAYSVLVVAKVEKGKSKKLKSVKELLGITIMERSSFEKNPIDFLEAKGYKEVKKDLIIKLPKYSLFELENGRKRMLASAGELQKGNELALPSKYVNFLYLASHYEKLKGSPEDNEQKQLFVEQHKHYLDEIIEQISEFSKRVILADANLDKVLSAYNKHRDKPIREQAENIIHLFTLTNLGAPAAFKYFDTTIDRKRYTSTKEVLDATLIHQSITGLYETRIDLSQLGGDGGEAAAKGGGGGSGGTLNIEDEYRLHETSKGPDVPLGSTWLSDFPQAWAETGGMGLAVRQAPLIIPLKATSTPVSIKQYPMSQEARLGIKPHIQRLLDQGILVPCQSPWNTPLLPVKKPGTNDYRPVQDLREVNKRVEDIHPTVPNPYNLLSGLPPSHQWYTVLDLKDAFFCLRLHPTSQSLFAFEWRDPEMGISGQLTWTRLPQGFKNSPTLFNEALHRDLADFRIQHPDLILLQYVDDLLLAATSELDCQQGTRALLQTLGDLGYRASAKKAQICQKQVKYLGYLLKEGQRWLTEARKETVMGQPTPKTPRQLREFLGKAGFCRLFIPGFAEMAAPLYPLTKPGTLFEWGPDQQKAYQEIKQALLTAPALGLPDLTKPFELFVDEKQGYAKGVLTQKLGPWRRPVAYLSKKLDPVAAGWPPCLRMVAAIAVLTKDAGKLTMGQPLVILAPHAVEALVKQPPDRWLSNARMTHYQALLLDTDRVQFGPIVALNPATLLPLPEEGLQHDCLDILAEAHGTRPDLTDQPLPDADHTWYTDGSSFLQEGQRKAGAAVTTETEVVWAKALPAGTSAQRAELIALTQALKMAEGKKLNVYTDSRYAFATAHIHGEIYRRRGWLTSEGKEIKNKDEILALLKALFLPKRLSIIHCPGHQKGNRAEARGNRMADQAAREVATRETPETSTLLAGKRTADGSEFEKRTADGSEFESPKKKAKVE

SEQ ID NO: 2583 - protein, 2097 aa, synthetic construct
  source 1..2097: note = Description of Artificial Sequence: Synthetic polypeptide
MPAAKRVKLDGGDKKYSIGLDIGTNSVGWAVITDEYKVPSKKFKVLGNTDRHSIKKNLIGALLFDSGETAEATRLKRTARRRYTRRKNRICYLQEIFSNEMAKVDDSFFHRLEESFLVEEDKKHERHPIFGNIVDEVAYHEKYPTIYHLRKKLVDSTDKADLRLIYLALAHMIKFRGHFLIEGDLNPDNSDVDKLFIQLVQTYNQLFEENPINASGVDAKAILSARLSKSRRLENLIAQLPGEKKNGLFGNLIALSLGLTPNFKSNFDLAEDAKLQLSKDTYDDDLDNLLAQIGDQYADLFLAAKNLSDAILLSDILRVNTEITKAPLSASMIKRYDEHHQDLTLLKALVRQQLPEKYKEIFFDQSKNGYAGYIDGGASQEEFYKFIKPILEKMDGTEELLVKLNREDLLRKQRTFDNGSIPHQIHLGELHAILRRQEDFYPFLKDNREKIEKILTFRIPYYVGPLARGNSRFAWMTRKSEETITPWNFEEVVDKGASAQSFIERMTNFDKNLPNEKVLPKHSLLYEYFTVYNELTKVKYVTEGMRKPAFLSGEQKKAIVDLLFKTNRKVTVKQLKEDYFKKIECFDSVEISGVEDRFNASLGTYHDLLKIIKDKDFLDNEENEDILEDIVLTLTLFEDREMIEERLKTYAHLFDDKVMKQLKRRRYTGWGRLSRKLINGIRDKQSGKTILDFLKSDGFANRNFMQLIHDDSLTFKEDIQKAQVSGQGDSLHEHIANLAGSPAIKKGILQTVKVVDELVKVMGRHKPENIVIEMARENQTTQKGQKNSRERMKRIEEGIKELGSQILKEHPVENTQLQNEKLYLYYLQNGRDMYVDQELDINRLSDYDVDHIVPQSFLKDDSIDNKVLTRSDKARGKSDNVPSEEVVKKMKNYWRQLLNAKLITQRKFDNLTKAERGGLSELDKAGFIKRQLVETRQITKHVAQILDSRMNTKYDENDKLIREVKVITLKSKLVSDFRKDFQFYKVREINNYHHAHDAYLNAVVGTALIKKYPKLESEFVYGDYKVYDVRKMIAKSEQEIGKATAKYFFYSNIMNFFKTEITLANGEIRKRPLIETNGETGEIVWDKGRDFATVRKVLSMPQVNIVKKTEVQTGGFSKESILPKRNSDKLIARKKDWDPKKYGGFDSPTVAYSVLVVAKVEKGKSKKLKSVKELLGITIMERSSFEKNPIDFLEAKGYKEVKKDLIIKLPKYSLFELENGRKRMLASAGELQKGNELALPSKYVNFLYLASHYEKLKGSPEDNEQKQLFVEQHKHYLDEIIEQISEFSKRVILADANLDKVLSAYNKHRDKPIREQAENIIHLFTLTNLGAPAAFKYFDTTIDRKRYTSTKEVLDATLIHQSITGLYETRIDLSQLGGDGGGSAGSAAGSGEFGGTLNIEDEYRLHETSKGPDVPLGSTWLSDFPQAWAETGGMGLAVRQAPLIIPLKATSTPVSIKQYPMSQEARLGIKPHIQRLLDQGILVPCQSPWNTPLLPVKKPGTNDYRPVQDLREVNKRVEDIHPTVPNPYNLLSGLPPSHQWYTVLDLKDAFFCLRLHPTSQSLFAFEWRDPEMGISGQLTWTRLPQGFKNSPTLFNEALHRDLADFRIQHPDLILLQYVDDLLLAATSELDCQQGTRALLQTLGDLGYRASAKKAQICQKQVKYLGYLLKEGQRWLTEARKETVMGQPTPKTPRQLREFLGKAGFCRLFIPGFAEMAAPLYPLTKPGTLFEWGPDQQKAYQEIKQALLTAPALGLPDLTKPFELFVDEKQGYAKGVLTQKLGPWRRPVAYLSKKLDPVAAGWPPCLRMVAAIAVLTKDAGKLTMGQPLVILAPHAVEALVKQPPDRWLSNARMTHYQALLLDTDRVQFGPIVALNPATLLPLPEEGLQHDCLDILAEAHGTRPDLTDQPLPDADHTWYTDGSSFLQEGQRKAGAAVTTETEVVWAKALPAGTSAQRAELIALTQALKMAEGKKLNVYTDSRYAFATAHIHGEIYRRRGWLTSEGKEIKNKDEILALLKALFLPKRLSIIHCPGHQKGNRAEARGNRMADQAAREVATRETPETSTLLAGKRTADGSEFEKRTADGSEFESPKKKAKVE

SEQ ID NO: 2584 - protein, 2093 aa, synthetic construct
  source 1..2093: note = Description of Artificial Sequence: Synthetic polypeptide
MPAAKRVKLDGGDKKYSIGLDIGTNSVGWAVITDEYKVPSKKFKVLGNTDRHSIKKNLIGALLFDSGETAEATRLKRTARRRYTRRKNRICYLQEIFSNEMAKVDDSFFHRLEESFLVEEDKKHERHPIFGNIVDEVAYHEKYPTIYHLRKKLVDSTDKADLRLIYLALAHMIKFRGHFLIEGDLNPDNSDVDKLFIQLVQTYNQLFEENPINASGVDAKAILSARLSKSRRLENLIAQLPGEKKNGLFGNLIALSLGLTPNFKSNFDLAEDAKLQLSKDTYDDDLDNLLAQIGDQYADLFLAAKNLSDAILLSDILRVNTEITKAPLSASMIKRYDEHHQDLTLLKALVRQQLPEKYKEIFFDQSKNGYAGYIDGGASQEEFYKFIKPILEKMDGTEELLVKLNREDLLRKQRTFDNGSIPHQIHLGELHAILRRQEDFYPFLKDNREKIEKILTFRIPYYVGPLARGNSRFAWMTRKSEETITPWNFEEVVDKGASAQSFIERMTNFDKNLPNEKVLPKHSLLYEYFTVYNELTKVKYVTEGMRKPAFLSGEQKKAIVDLLFKTNRKVTVKQLKEDYFKKIECFDSVEISGVEDRFNASLGTYHDLLKIIKDKDFLDNEENEDILEDIVLTLTLFEDREMIEERLKTYAHLFDDKVMKQLKRRRYTGWGRLSRKLINGIRDKQSGKTILDFLKSDGFANRNFMQLIHDDSLTFKEDIQKAQVSGQGDSLHEHIANLAGSPAIKKGILQTVKVVDELVKVMGRHKPENIVIEMARENQTTQKGQKNSRERMKRIEEGIKELGSQILKEHPVENTQLQNEKLYLYYLQNGRDMYVDQELDINRLSDYDVDHIVPQSFLKDDSIDNKVLTRSDKARGKSDNVPSEEVVKKMKNYWRQLLNAKLITQRKFDNLTKAERGGLSELDKAGFIKRQLVETRQITKHVAQILDSRMNTKYDENDKLIREVKVITLKSKLVSDFRKDFQFYKVREINNYHHAHDAYLNAVVGTALIKKYPKLESEFVYGDYKVYDVRKMIAKSEQEIGKATAKYFFYSNIMNFFKTEITLANGEIRKRPLIETNGETGEIVWDKGRDFATVRKVLSMPQVNIVKKTEVQTGGFSKESILPKRNSDKLIARKKDWDPKKYGGFDSPTVAYSVLVVAKVEKGKSKKLKSVKELLGITIMERSSFEKNPIDFLEAKGYKEVKKDLIIKLPKYSLFELENGRKRMLASAGELQKGNELALPSKYVNFLYLASHYEKLKGSPEDNEQKQLFVEQHKHYLDEIIEQISEFSKRVILADANLDKVLSAYNKHRDKPIREQAENIIHLFTLTNLGAPAAFKYFDTTIDRKRYTSTKEVLDATLIHQSITGLYETRIDLSQLGGDGGEAAAKGGSGGTLNIEDEYRLHETSKGPDVPLGSTWLSDFPQAWAETGGMGLAVRQAPLIIPLKATSTPVSIKQYPMSQEARLGIKPHIQRLLDQGILVPCQSPWNTPLLPVKKPGTNDYRPVQDLREVNKRVEDIHPTVPNPYNLLSGLPPSHQWYTVLDLKDAFFCLRLHPTSQSLFAFEWRDPEMGISGQLTWTRLPQGFKNSPTLFNEALHRDLADFRIQHPDLILLQYVDDLLLAATSELDCQQGTRALLQTLGDLGYRASAKKAQICQKQVKYLGYLLKEGQRWLTEARKETVMGQPTPKTPRQLREFLGKAGFCRLFIPGFAEMAAPLYPLTKPGTLFEWGPDQQKAYQEIKQALLTAPALGLPDLTKPFELFVDEKQGYAKGVLTQKLGPWRRPVAYLSKKLDPVAAGWPPCLRMVAAIAVLTKDAGKLTMGQPLVILAPHAVEALVKQPPDRWLSNARMTHYQALLLDTDRVQFGPIVALNPATLLPLPEEGLQHDCLDILAEAHGTRPDLTDQPLPDADHTWYTDGSSFLQEGQRKAGAAVTTETEVVWAKALPAGTSAQRAELIALTQALKMAEGKKLNVYTDSRYAFATAHIHGEIYRRRGWLTSEGKEIKNKDEILALLKALFLPKRLSIIHCPGHQKGNRAEARGNRMADQAAREVATRETPETSTLLAGKRTADGSEFEKRTADGSEFESPKKKAKVE

SEQ ID NO: 2585 - protein, 2093 aa, synthetic construct
  source 1..2093: note = Description of Artificial Sequence: Synthetic polypeptide
MPAAKRVKLDGGDKKYSIGLDIGTNSVGWAVITDEYKVPSKKFKVLGNTDRHSIKKNLIGALLFDSGETAEATRLKRTARRRYTRRKNRICYLQEIFSNEMAKVDDSFFHRLEESFLVEEDKKHERHPIFGNIVDEVAYHEKYPTIYHLRKKLVDSTDKADLRLIYLALAHMIKFRGHFLIEGDLNPDNSDVDKLFIQLVQTYNQLFEENPINASGVDAKAILSARLSKSRRLENLIAQLPGEKKNGLFGNLIALSLGLTPNFKSNFDLAEDAKLQLSKDTYDDDLDNLLAQIGDQYADLFLAAKNLSDAILLSDILRVNTEITKAPLSASMIKRYDEHHQDLTLLKALVRQQLPEKYKEIFFDQSKNGYAGYIDGGASQEEFYKFIKPILEKMDGTEELLVKLNREDLLRKQRTFDNGSIPHQIHLGELHAILRRQEDFYPFLKDNREKIEKILTFRIPYYVGPLARGNSRFAWMTRKSEETITPWNFEEVVDKGASAQSFIERMTNFDKNLPNEKVLPKHSLLYEYFTVYNELTKVKYVTEGMRKPAFLSGEQKKAIVDLLFKTNRKVTVKQLKEDYFKKIECFDSVEISGVEDRFNASLGTYHDLLKIIKDKDFLDNEENEDILEDIVLTLTLFEDREMIEERLKTYAHLFDDKVMKQLKRRRYTGWGRLSRKLINGIRDKQSGKTILDFLKSDGFANRNFMQLIHDDSLTFKEDIQKAQVSGQGDSLHEHIANLAGSPAIKKGILQTVKVVDELVKVMGRHKPENIVIEMARENQTTQKGQKNSRERMKRIEEGIKELGSQILKEHPVENTQLQNEKLYLYYLQNGRDMYVDQELDINRLSDYDVDHIVPQSFLKDDSIDNKVLTRSDKARGKSDNVPSEEVVKKMKNYWRQLLNAKLITQRKFDNLTKAERGGLSELDKAGFIKRQLVETRQITKHVAQILDSRMNTKYDENDKLIREVKVITLKSKLVSDFRKDFQFYKVREINNYHHAHDAYLNAVVGTALIKKYPKLESEFVYGDYKVYDVRKMIAKSEQEIGKATAKYFFYSNIMNFFKTEITLANGEIRKRPLIETNGETGEIVWDKGRDFATVRKVLSMPQVNIVKKTEVQTGGFSKESILPKRNSDKLIARKKDWDPKKYGGFDSPTVAYSVLVVAKVEKGKSKKLKSVKELLGITIMERSSFEKNPIDFLEAKGYKEVKKDLIIKLPKYSLFELENGRKRMLASAGELQKGNELALPSKYVNFLYLASHYEKLKGSPEDNEQKQLFVEQHKHYLDEIIEQISEFSKRVILADANLDKVLSAYNKHRDKPIREQAENIIHLFTLTNLGAPAAFKYFDTTIDRKRYTSTKEVLDATLIHQSITGLYETRIDLSQLGGDGGEAAAKGSSGGTLNIEDEYRLHETSKGPDVPLGSTWLSDFPQAWAETGGMGLAVRQAPLIIPLKATSTPVSIKQYPMSQEARLGIKPHIQRLLDQGILVPCQSPWNTPLLPVKKPGTNDYRPVQDLREVNKRVEDIHPTVPNPYNLLSGLPPSHQWYTVLDLKDAFFCLRLHPTSQSLFAFEWRDPEMGISGQLTWTRLPQGFKNSPTLFNEALHRDLADFRIQHPDLILLQYVDDLLLAATSELDCQQGTRALLQTLGDLGYRASAKKAQICQKQVKYLGYLLKEGQRWLTEARKETVMGQPTPKTPRQLREFLGKAGFCRLFIPGFAEMAAPLYPLTKPGTLFEWGPDQQKAYQEIKQALLTAPALGLPDLTKPFELFVDEKQGYAKGVLTQKLGPWRRPVAYLSKKLDPVAAGWPPCLRMVAAIAVLTKDAGKLTMGQPLVILAPHAVEALVKQPPDRWLSNARMTHYQALLLDTDRVQFGPIVALNPATLLPLPEEGLQHDCLDILAEAHGTRPDLTDQPLPDADHTWYTDGSSFLQEGQRKAGAAVTTETEVVWAKALPAGTSAQRAELIALTQALKMAEGKKLNVYTDSRYAFATAHIHGEIYRRRGWLTSEGKEIKNKDEILALLKALFLPKRLSIIHCPGHQKGNRAEARGNRMADQAAREVATRETPETSTLLAGKRTADGSEFEKRTADGSEFESPKKKAKVE

SEQ ID NO: 2586 - protein, 2091 aa, synthetic construct
  source 1..2091: note = Description of Artificial Sequence: Synthetic polypeptide
MPAAKRVKLDGGDKKYSIGLDIGTNSVGWAVITDEYKVPSKKFKVLGNTDRHSIKKNLIGALLFDSGETAEATRLKRTARRRYTRRKNRICYLQEIFSNEMAKVDDSFFHRLEESFLVEEDKKHERHPIFGNIVDEVAYHEKYPTIYHLRKKLVDSTDKADLRLIYLALAHMIKFRGHFLIEGDLNPDNSDVDKLFIQLVQTYNQLFEENPINASGVDAKAILSARLSKSRRLENLIAQLPGEKKNGLFGNLIALSLGLTPNFKSNFDLAEDAKLQLSKDTYDDDLDNLLAQIGDQYADLFLAAKNLSDAILLSDILRVNTEITKAPLSASMIKRYDEHHQDLTLLKALVRQQLPEKYKEIFFDQSKNGYAGYIDGGASQEEFYKFIKPILEKMDGTEELLVKLNREDLLRKQRTFDNGSIPHQIHLGELHAILRRQEDFYPFLKDNREKIEKILTFRIPYYVGPLARGNSRFAWMTRKSEETITPWNFEEVVDKGASAQSFIERMTNFDKNLPNEKVLPKHSLLYEYFTVYNELTKVKYVTEGMRKPAFLSGEQKKAIVDLLFKTNRKVTVKQLKEDYFKKIECFDSVEISGVEDRFNASLGTYHDLLKIIKDKDFLDNEENEDILEDIVLTLTLFEDREMIEERLKTYAHLFDDKVMKQLKRRRYTGWGRLSRKLINGIRDKQSGKTILDFLKSDGFANRNFMQLIHDDSLTFKEDIQKAQVSGQGDSLHEHIANLAGSPAIKKGILQTVKVVDELVKVMGRHKPENIVIEMARENQTTQKGQKNSRERMKRIEEGIKELGSQILKEHPVENTQLQNEKLYLYYLQNGRDMYVDQELDINRLSDYDVDHIVPQSFLKDDSIDNKVLTRSDKARGKSDNVPSEEVVKKMKNYWRQLLNAKLITQRKFDNLTKAERGGLSELDKAGFIKRQLVETRQITKHVAQILDSRMNTKYDENDKLIREVKVITLKSKLVSDFRKDFQFYKVREINNYHHAHDAYLNAVVGTALIKKYPKLESEFVYGDYKVYDVRKMIAKSEQEIGKATAKYFFYSNIMNFFKTEITLANGEIRKRPLIETNGETGEIVWDKGRDFATVRKVLSMPQVNIVKKTEVQTGGFSKESILPKRNSDKLIARKKDWDPKKYGGFDSPTVAYSVLVVAKVEKGKSKKLKSVKELLGITIMERSSFEKNPIDFLEAKGYKEVKKDLIIKLPKYSLFELENGRKRMLASAGELQKGNELALPSKYVNFLYLASHYEKLKGSPEDNEQKQLFVEQHKHYLDEIIEQISEFSKRVILADANLDKVLSAYNKHRDKPIREQAENIIHLFTLTNLGAPAAFKYFDTTIDRKRYTSTKEVLDATLIHQSITGLYETRIDLSQLGGDGGGGGGSSGGTLNIEDEYRLHETSKGPDVPLGSTWLSDFPQAWAETGGMGLAVRQAPLIIPLKATSTPVSIKQYPMSQEARLGIKPHIQRLLDQGILVPCQSPWNTPLLPVKKPGTNDYRPVQDLREVNKRVEDIHPTVPNPYNLLSGLPPSHQWYTVLDLKDAFFCLRLHPTSQSLFAFEWRDPEMGISGQLTWTRLPQGFKNSPTLFNEALHRDLADFRIQHPDLILLQYVDDLLLAATSELDCQQGTRALLQTLGDLGYRASAKKAQICQKQVKYLGYLLKEGQRWLTEARKETVMGQPTPKTPRQLREFLGKAGFCRLFIPGFAEMAAPLYPLTKPGTLFEWGPDQQKAYQEIKQALLTAPALGLPDLTKPFELFVDEKQGYAKGVLTQKLGPWRRPVAYLSKKLDPVAAGWPPCLRMVAAIAVLTKDAGKLTMGQPLVILAPHAVEALVKQPPDRWLSNARMTHYQALLLDTDRVQFGPIVALNPATLLPLPEEGLQHDCLDILAEAHGTRPDLTDQPLPDADHTWYTDGSSFLQEGQRKAGAAVTTETEVVWAKALPAGTSAQRAELIALTQALKMAEGKKLNVYTDSRYAFATAHIHGEIYRRRGWLTSEGKEIKNKDEILALLKALFLPKRLSIIHCPGHQKGNRAEARGNRMADQAAREVATRETPETSTLLAGKRTADGSEFEKRTADGSEFESPKKKAKVE

SEQ ID NO: 2587 - protein, 2093 aa, synthetic construct
  source 1..2093: note = Description of Artificial Sequence: Synthetic polypeptide
MPAAKRVKLDGGDKKYSIGLDIGTNSVGWAVITDEYKVPSKKFKVLGNTDRHSIKKNLIGALLFDSGETAEATRLKRTARRRYTRRKNRICYLQEIFSNEMAKVDDSFFHRLEESFLVEEDKKHERHPIFGNIVDEVAYHEKYPTIYHLRKKLVDSTDKADLRLIYLALAHMIKFRGHFLIEGDLNPDNSDVDKLFIQLVQTYNQLFEENPINASGVDAKAILSARLSKSRRLENLIAQLPGEKKNGLFGNLIALSLGLTPNFKSNFDLAEDAKLQLSKDTYDDDLDNLLAQIGDQYADLFLAAKNLSDAILLSDILRVNTEITKAPLSASMIKRYDEHHQDLTLLKALVRQQLPEKYKEIFFDQSKNGYAGYIDGGASQEEFYKFIKPILEKMDGTEELLVKLNREDLLRKQRTFDNGSIPHQIHLGELHAILRRQEDFYPFLKDNREKIEKILTFRIPYYVGPLARGNSRFAWMTRKSEETITPWNFEEVVDKGASAQSFIERMTNFDKNLPNEKVLPKHSLLYEYFTVYNELTKVKYVTEGMRKPAFLSGEQKKAIVDLLFKTNRKVTVKQLKEDYFKKIECFDSVEISGVEDRFNASLGTYHDLLKIIKDKDFLDNEENEDILEDIVLTLTLFEDREMIEERLKTYAHLFDDKVMKQLKRRRYTGWGRLSRKLINGIRDKQSGKTILDFLKSDGFANRNFMQLIHDDSLTFKEDIQKAQVSGQGDSLHEHIANLAGSPAIKKGILQTVKVVDELVKVMGRHKPENIVIEMARENQTTQKGQKNSRERMKRIEEGIKELGSQILKEHPVENTQLQNEKLYLYYLQNGRDMYVDQELDINRLSDYDVDHIVPQSFLKDDSIDNKVLTRSDKARGKSDNVPSEEVVKKMKNYWRQLLNAKLITQRKFDNLTKAERGGLSELDKAGFIKRQLVETRQITKHVAQILDSRMNTKYDENDKLIREVKVITLKSKLVSDFRKDFQFYKVREINNYHHAHDAYLNAVVGTALIKKYPKLESEFVYGDYKVYDVRKMIAKSEQEIGKATAKYFFYSNIMNFFKTEITLANGEIRKRPLIETNGETGEIVWDKGRDFATVRKVLSMPQVNIVKKTEVQTGGFSKESILPKRNSDKLIARKKDWDPKKYGGFDSPTVAYSVLVVAKVEKGKSKKLKSVKELLGITIMERSSFEKNPIDFLEAKGYKEVKKDLIIKLPKYSLFELENGRKRMLASAGELQKGNELALPSKYVNFLYLASHYEKLKGSPEDNEQKQLFVEQHKHYLDEIIEQISEFSKRVILADANLDKVLSAYNKHRDKPIREQAENIIHLFTLTNLGAPAAFKYFDTTIDRKRYTSTKEVLDATLIHQSITGLYETRIDLSQLGGDGGEAAAKPAPGGTLNIEDEYRLHETSKGPDVPLGSTWLSDFPQAWAETGGMGLAVRQAPLIIPLKATSTPVSIKQYPMSQEARLGIKPHIQRLLDQGILVPCQSPWNTPLLPVKKPGTNDYRPVQDLREVNKRVEDIHPTVPNPYNLLSGLPPSHQWYTVLDLKDAFFCLRLHPTSQSLFAFEWRDPEMGISGQLTWTRLPQGFKNSPTLFNEALHRDLADFRIQHPDLILLQYVDDLLLAATSELDCQQGTRALLQTLGDLGYRASAKKAQICQKQVKYLGYLLKEGQRWLTEARKETVMGQPTPKTPRQLREFLGKAGFCRLFIPGFAEMAAPLYPLTKPGTLFEWGPDQQKAYQEIKQALLTAPALGLPDLTKPFELFVDEKQGYAKGVLTQKLGPWRRPVAYLSKKLDPVAAGWPPCLRMVAAIAVLTKDAGKLTMGQPLVILAPHAVEALVKQPPDRWLSNARMTHYQALLLDTDRVQFGPIVALNPATLLPLPEEGLQHDCLDILAEAHGTRPDLTDQPLPDADHTWYTDGSSFLQEGQRKAGAAVTTETEVVWAKALPAGTSAQRAELIALTQALKMAEGKKLNVYTDSRYAFATAHIHGEIYRRRGWLTSEGKEIKNKDEILALLKALFLPKRLSIIHCPGHQKGNRAEARGNRMADQAAREVATRETPETSTLLAGKRTADGSEFEKRTADGSEFESPKKKAKVE

SEQ ID NO: 2588 - protein, 2094 aa, synthetic construct
  source 1..2094: note = Description of Artificial Sequence: Synthetic polypeptide
MPAAKRVKLDGGDKKYSIGLDIGTNSVGWAVITDEYKVPSKKFKVLGNTDRHSIKKNLIGALLFDSGETAEATRLKRTARRRYTRRKNRICYLQEIFSNEMAKVDDSFFHRLEESFLVEEDKKHERHPIFGNIVDEVAYHEKYPTIYHLRKKLVDSTDKADLRLIYLALAHMIKFRGHFLIEGDLNPDNSDVDKLFIQLVQTYNQLFEENPINASGVDAKAILSARLSKSRRLENLIAQLPGEKKNGLFGNLIALSLGLTPNFKSNFDLAEDAKLQLSKDTYDDDLDNLLAQIGDQYADLFLAAKNLSDAILLSDILRVNTEITKAPLSASMIKRYDEHHQDLTLLKALVRQQLPEKYKEIFFDQSKNGYAGYIDGGASQEEFYKFIKPILEKMDGTEELLVKLNREDLLRKQRTFDNGSIPHQIHLGELHAILRRQEDFYPFLKDNREKIEKILTFRIPYYVGPLARGNSRFAWMTRKSEETITPWNFEEVVDKGASAQSFIERMTNFDKNLPNEKVLPKHSLLYEYFTVYNELTKVKYVTEGMRKPAFLSGEQKKAIVDLLFKTNRKVTVKQLKEDYFKKIECFDSVEISGVEDRFNASLGTYHDLLKIIKDKDFLDNEENEDILEDIVLTLTLFEDREMIEERLKTYAHLFDDKVMKQLKRRRYTGWGRLSRKLINGIRDKQSGKTILDFLKSDGFANRNFMQLIHDDSLTFKEDIQKAQVSGQGDSLHEHIANLAGSPAIKKGILQTVKVVDELVKVMGRHKPENIVIEMARENQTTQKGQKNSRERMKRIEEGIKELGSQILKEHPVENTQLQNEKLYLYYLQNGRDMYVDQELDINRLSDYDVDHIVPQSFLKDDSIDNKVLTRSDKARGKSDNVPSEEVVKKMKNYWRQLLNAKLITQRKFDNLTKAERGGLSELDKAGFIKRQLVETRQITKHVAQILDSRMNTKYDENDKLIREVKVITLKSKLVSDFRKDFQFYKVREINNYHHAHDAYLNAVVGTALIKKYPKLESEFVYGDYKVYDVRKMIAKSEQEIGKATAKYFFYSNIMNFFKTEITLANGEIRKRPLIETNGETGEIVWDKGRDFATVRKVLSMPQVNIVKKTEVQTGGFSKESILPKRNSDKLIARKKDWDPKKYGGFDSPTVAYSVLVVAKVEKGKSKKLKSVKELLGITIMERSSFEKNPIDFLEAKGYKEVKKDLIIKLPKYSLFELENGRKRMLASAGELQKGNELALPSKYVNFLYLASHYEKLKGSPEDNEQKQLFVEQHKHYLDEIIEQISEFSKRVILADANLDKVLSAYNKHRDKPIREQAENIIHLFTLTNLGAPAAFKYFDTTIDRKRYTSTKEVLDATLIHQSITGLYETRIDLSQLGGDGGGGGGGSPAPGGTLNIEDEYRLHETSKGPDVPLGSTWLSDFPQAWAETGGMGLAVRQAPLIIPLKATSTPVSIKQYPMSQEARLGIKPHIQRLLDQGILVPCQSPWNTPLLPVKKPGTNDYRPVQDLREVNKRVEDIHPTVPNPYNLLSGLPPSHQWYTVLDLKDAFFCLRLHPTSQSLFAFEWRDPEMGISGQLTWTRLPQGFKNSPTLFNEALHRDLADFRIQHPDLILLQYVDDLLLAATSELDCQQGTRALLQTLGDLGYRASAKKAQICQKQVKYLGYLLKEGQRWLTEARKETVMGQPTPKTPRQLREFLGKAGFCRLFIPGFAEMAAPLYPLTKPGTLFEWGPDQQKAYQEIKQALLTAPALGLPDLTKPFELFVDEKQGYAKGVLTQKLGPWRRPVAYLSKKLDPVAAGWPPCLRMVAAIAVLTKDAGKLTMGQPLVILAPHAVEALVKQPPDRWLSNARMTHYQALLLDTDRVQFGPIVALNPATLLPLPEEGLQHDCLDILAEAHGTRPDLTDQPLPDADHTWYTDGSSFLQEGQRKAGAAVTTETEVVWAKALPAGTSAQRAELIALTQALKMAEGKKLNVYTDSRYAFATAHIHGEIYRRRGWLTSEGKEIKNKDEILALLKALFLPKRLSIIHCPGHQKGNRAEARGNRMADQAAREVATRETPETSTLLAGKRTADGSEFEKRTADGSEFESPKKKAKVE

SEQ ID NO: 2589 - protein, 2094 aa, synthetic construct
  source 1..2094: note = Description of Artificial Sequence: Synthetic polypeptide
MPAAKRVKLDGGDKKYSIGLDIGTNSVGWAVITDEYKVPSKKFKVLGNTDRHSIKKNLIGALLFDSGETAEATRLKRTARRRYTRRKNRICYLQEIFSNEMAKVDDSFFHRLEESFLVEEDKKHERHPIFGNIVDEVAYHEKYPTIYHLRKKLVDSTDKADLRLIYLALAHMIKFRGHFLIEGDLNPDNSDVDKLFIQLVQTYNQLFEENPINASGVDAKAILSARLSKSRRLENLIAQLPGEKKNGLFGNLIALSLGLTPNFKSNFDLAEDAKLQLSKDTYDDDLDNLLAQIGDQYADLFLAAKNLSDAILLSDILRVNTEITKAPLSASMIKRYDEHHQDLTLLKALVRQQLPEKYKEIFFDQSKNGYAGYIDGGASQEEFYKFIKPILEKMDGTEELLVKLNREDLLRKQRTFDNGSIPHQIHLGELHAILRRQEDFYPFLKDNREKIEKILTFRIPYYVGPLARGNSRFAWMTRKSEETITPWNFEEVVDKGASAQSFIERMTNFDKNLPNEKVLPKHSLLYEYFTVYNELTKVKYVTEGMRKPAFLSGEQKKAIVDLLFKTNRKVTVKQLKEDYFKKIECFDSVEISGVEDRFNASLGTYHDLLKIIKDKDFLDNEENEDILEDIVLTLTLFEDREMIEERLKTYAHLFDDKVMKQLKRRRYTGWGRLSRKLINGIRDKQSGKTILDFLKSDGFANRNFMQLIHDDSLTFKEDIQKAQVSGQGDSLHEHIANLAGSPAIKKGILQTVKVVDELVKVMGRHKPENIVIEMARENQTTQKGQKNSRERMKRIEEGIKELGSQILKEHPVENTQLQNEKLYLYYLQNGRDMYVDQELDINRLSDYDVDHIVPQSFLKDDSIDNKVLTRSDKARGKSDNVPSEEVVKKMKNYWRQLLNAKLITQRKFDNLTKAERGGLSELDKAGFIKRQLVETRQITKHVAQILDSRMNTKYDENDKLIREVKVITLKSKLVSDFRKDFQFYKVREINNYHHAHDAYLNAVVGTALIKKYPKLESEFVYGDYKVYDVRKMIAKSEQEIGKATAKYFFYSNIMNFFKTEITLANGEIRKRPLIETNGETGEIVWDKGRDFATVRKVLSMPQVNIVKKTEVQTGGFSKESILPKRNSDKLIARKKDWDPKKYGGFDSPTVAYSVLVVAKVEKGKSKKLKSVKELLGITIMERSSFEKNPIDFLEAKGYKEVKKDLIIKLPKYSLFELENGRKRMLASAGELQKGNELALPSKYVNFLYLASHYEKLKGSPEDNEQKQLFVEQHKHYLDEIIEQISEFSKRVILADANLDKVLSAYNKHRDKPIREQAENIIHLFTLTNLGAPAAFKYFDTTIDRKRYTSTKEVLDATLIHQSITGLYETRIDLSQLGGDGGGGGGSSPAPGGTLNIEDEYRLHETSKGPDVPLGSTWLSDFPQAWAETGGMGLAVRQAPLIIPLKATSTPVSIKQYPMSQEARLGIKPHIQRLLDQGILVPCQSPWNTPLLPVKKPGTNDYRPVQDLREVNKRVEDIHPTVPNPYNLLSGLPPSHQWYTVLDLKDAFFCLRLHPTSQSLFAFEWRDPEMGISGQLTWTRLPQGFKNSPTLFNEALHRDLADFRIQHPDLILLQYVDDLLLAATSELDCQQGTRALLQTLGDLGYRASAKKAQICQKQVKYLGYLLKEGQRWLTEARKETVMGQPTPKTPRQLREFLGKAGFCRLFIPGFAEMAAPLYPLTKPGTLFEWGPDQQKAYQEIKQALLTAPALGLPDLTKPFELFVDEKQGYAKGVLTQKLGPWRRPVAYLSKKLDPVAAGWPPCLRMVAAIAVLTKDAGKLTMGQPLVILAPHAVEALVKQPPDRWLSNARMTHYQALLLDTDRVQFGPIVALNPATLLPLPEEGLQHDCLDILAEAHGTRPDLTDQPLPDADHTWYTDGSSFLQEGQRKAGAAVTTETEVVWAKALPAGTSAQRAELIALTQALKMAEGKKLNVYTDSRYAFATAHIHGEIYRRRGWLTSEGKEIKNKDEILALLKALFLPKRLSIIHCPGHQKGNRAEARGNRMADQAAREVATRETPETSTLLAGKRTADGSEFEKRTADGSEFESPKKKAKVE

SEQ ID NO: 2590 - protein, 2091 aa, synthetic construct
  source 1..2091: note = Description of Artificial Sequence: Synthetic polypeptide
MPAAKRVKLDGGDKKYSIGLDIGTNSVGWAVITDEYKVPSKKFKVLGNTDRHSIKKNLIGALLFDSGETAEATRLKRTARRRYTRRKNRICYLQEIFSNEMAKVDDSFFHRLEESFLVEEDKKHERHPIFGNIVDEVAYHEKYPTIYHLRKKLVDSTDKADLRLIYLALAHMIKFRGHFLIEGDLNPDNSDVDKLFIQLVQTYNQLFEENPINASGVDAKAILSARLSKSRRLENLIAQLPGEKKNGLFGNLIALSLGLTPNFKSNFDLAEDAKLQLSKDTYDDDLDNLLAQIGDQYADLFLAAKNLSDAILLSDILRVNTEITKAPLSASMIKRYDEHHQDLTLLKALVRQQLPEKYKEIFFDQSKNGYAGYIDGGASQEEFYKFIKPILEKMDGTEELLVKLNREDLLRKQRTFDNGSIPHQIHLGELHAILRRQEDFYPFLKDNREKIEKILTFRIPYYVGPLARGNSRFAWMTRKSEETITPWNFEEVVDKGASAQSFIERMTNFDKNLPNEKVLPKHSLLYEYFTVYNELTKVKYVTEGMRKPAFLSGEQKKAIVDLLFKTNRKVTVKQLKEDYFKKIECFDSVEISGVEDRFNASLGTYHDLLKIIKDKDFLDNEENEDILEDIVLTLTLFEDREMIEERLKTYAHLFDDKVMKQLKRRRYTGWGRLSRKLINGIRDKQSGKTILDFLKSDGFANRNFMQLIHDDSLTFKEDIQKAQVSGQGDSLHEHIANLAGSPAIKKGILQTVKVVDELVKVMGRHKPENIVIEMARENQTTQKGQKNSRERMKRIEEGIKELGSQILKEHPVENTQLQNEKLYLYYLQNGRDMYVDQELDINRLSDYDVDHIVPQSFLKDDSIDNKVLTRSDKARGKSDNVPSEEVVKKMKNYWRQLLNAKLITQRKFDNLTKAERGGLSELDKAGFIKRQLVETRQITKHVAQILDSRMNTKYDENDKLIREVKVITLKSKLVSDFRKDFQFYKVREINNYHHAHDAYLNAVVGTALIKKYPKLESEFVYGDYKVYDVRKMIAKSEQEIGKATAKYFFYSNIMNFFKTEITLANGEIRKRPLIETNGETGEIVWDKGRDFATVRKVLSMPQVNIVKKTEVQTGGFSKESILPKRNSDKLIARKKDWDPKKYGGFDSPTVAYSVLVVAKVEKGKSKKLKSVKELLGITIMERSSFEKNPIDFLEAKGYKEVKKDLIIKLPKYSLFELENGRKRMLASAGELQKGNELALPSKYVNFLYLASHYEKLKGSPEDNEQKQLFVEQHKHYLDEIIEQISEFSKRVILADANLDKVLSAYNKHRDKPIREQAENIIHLFTLTNLGAPAAFKYFDTTIDRKRYTSTKEVLDATLIHQSITGLYETRIDLSQLGGDGGGSSGGSGGTLNIEDEYRLHETSKGPDVPLGSTWLSDFPQAWAETGGMGLAVRQAPLIIPLKATSTPVSIKQYPMSQEARLGIKPHIQRLLDQGILVPCQSPWNTPLLPVKKPGTNDYRPVQDLREVNKRVEDIHPTVPNPYNLLSGLPPSHQWYTVLDLKDAFFCLRLHPTSQSLFAFEWRDPEMGISGQLTWTRLPQGFKNSPTLFNEALHRDLADFRIQHPDLILLQYVDDLLLAATSELDCQQGTRALLQTLGDLGYRASAKKAQICQKQVKYLGYLLKEGQRWLTEARKETVMGQPTPKTPRQLREFLGKAGFCRLFIPGFAEMAAPLYPLTKPGTLFEWGPDQQKAYQEIKQALLTAPALGLPDLTKPFELFVDEKQGYAKGVLTQKLGPWRRPVAYLSKKLDPVAAGWPPCLRMVAAIAVLTKDAGKLTMGQPLVILAPHAVEALVKQPPDRWLSNARMTHYQALLLDTDRVQFGPIVALNPATLLPLPEEGLQHDCLDILAEAHGTRPDLTDQPLPDADHTWYTDGSSFLQEGQRKAGAAVTTETEVVWAKALPAGTSAQRAELIALTQALKMAEGKKLNVYTDSRYAFATAHIHGEIYRRRGWLTSEGKEIKNKDEILALLKALFLPKRLSIIHCPGHQKGNRAEARGNRMADQAAREVATRETPETSTLLAGKRTADGSEFEKRTADGSEFESPKKKAKVE

SEQ ID NO: 2591 - protein, 2094 aa, synthetic construct
  source 1..2094: note = Description of Artificial Sequence: Synthetic polypeptide
MPAAKRVKLDGGDKKYSIGLDIGTNSVGWAVITDEYKVPSKKFKVLGNTDRHSIKKNLIGALLFDSGETAEATRLKRTARRRYTRRKNRICYLQEIFSNEMAKVDDSFFHRLEESFLVEEDKKHERHPIFGNIVDEVAYHEKYPTIYHLRKKLVDSTDKADLRLIYLALAHMIKFRGHFLIEGDLNPDNSDVDKLFIQLVQTYNQLFEENPINASGVDAKAILSARLSKSRRLENLIAQLPGEKKNGLFGNLIALSLGLTPNFKSNFDLAEDAKLQLSKDTYDDDLDNLLAQIGDQYADLFLAAKNLSDAILLSDILRVNTEITKAPLSASMIKRYDEHHQDLTLLKALVRQQLPEKYKEIFFDQSKNGYAGYIDGGASQEEFYKFIKPILEKMDGTEELLVKLNREDLLRKQRTFDNGSIPHQIHLGELHAILRRQEDFYPFLKDNREKIEKILTFRIPYYVGPLARGNSRFAWMTRKSEETITPWNFEEVVDKGASAQSFIERMTNFDKNLPNEKVLPKHSLLYEYFTVYNELTKVKYVTEGMRKPAFLSGEQKKAIVDLLFKTNRKVTVKQLKEDYFKKIECFDSVEISGVEDRFNASLGTYHDLLKIIKDKDFLDNEENEDILEDIVLTLTLFEDREMIEERLKTYAHLFDDKVMKQLKRRRYTGWGRLSRKLINGIRDKQSGKTILDFLKSDGFANRNFMQLIHDDSLTFKEDIQKAQVSGQGDSLHEHIANLAGSPAIKKGILQTVKVVDELVKVMGRHKPENIVIEMARENQTTQKGQKNSRERMKRIEEGIKELGSQILKEHPVENTQLQNEKLYLYYLQNGRDMYVDQELDINRLSDYDVDHIVPQSFLKDDSIDNKVLTRSDKARGKSDNVPSEEVVKKMKNYWRQLLNAKLITQRKFDNLTKAERGGLSELDKAGFIKRQLVETRQITKHVAQILDSRMNTKYDENDKLIREVKVITLKSKLVSDFRKDFQFYKVREINNYHHAHDAYLNAVVGTALIKKYPKLESEFVYGDYKVYDVRKMIAKSEQEIGKATAKYFFYSNIMNFFKTEITLANGEIRKRPLIETNGETGEIVWDKGRDFATVRKVLSMPQVNIVKKTEVQTGGFSKESILPKRNSDKLIARKKDWDPKKYGGFDSPTVAYSVLVVAKVEKGKSKKLKSVKELLGITIMERSSFEKNPIDFLEAKGYKEVKKDLIIKLPKYSLFELENGRKRMLASAGELQKGNELALPSKYVNFLYLASHYEKLKGSPEDNEQKQLFVEQHKHYLDEIIEQISEFSKRVILADANLDKVLSAYNKHRDKPIREQAENIIHLFTLTNLGAPAAFKYFDTTIDRKRYTSTKEVLDATLIHQSITGLYETRIDLSQLGGDGGGSSGGSPAPGGTLNIEDEYRLHETSKGPDVPLGSTWLSDFPQAWAETGGMGLAVRQAPLIIPLKATSTPVSIKQYPMSQEARLGIKPHIQRLLDQGILVPCQSPWNTPLLPVKKPGTNDYRPVQDLREVNKRVEDIHPTVPNPYNLLSGLPPSHQWYTVLDLKDAFFCLRLHPTSQSLFAFEWRDPEMGISGQLTWTRLPQGFKNSPTLFNEALHRDLADFRIQHPDLILLQYVDDLLLAATSELDCQQGTRALLQTLGDLGYRASAKKAQICQKQVKYLGYLLKEGQRWLTEARKETVMGQPTPKTPRQLREFLGKAGFCRLFIPGFAEMAAPLYPLTKPGTLFEWGPDQQKAYQEIKQALLTAPALGLPDLTKPFELFVDEKQGYAKGVLTQKLGPWRRPVAYLSKKLDPVAAGWPPCLRMVAAIAVLTKDAGKLTMGQPLVILAPHAVEALVKQPPDRWLSNARMTHYQALLLDTDRVQFGPIVALNPATLLPLPEEGLQHDCLDILAEAHGTRPDLTDQPLPDADHTWYTDGSSFLQEGQRKAGAAVTTETEVVWAKALPAGTSAQRAELIALTQALKMAEGKKLNVYTDSRYAFATAHIHGEIYRRRGWLTSEGKEIKNKDEILALLKALFLPKRLSIIHCPGHQKGNRAEARGNRMADQAAREVATRETPETSTLLAGKRTADGSEFEKRTADGSEFESPKKKAKVE

SEQ ID NO: 2592 - protein, 2096 aa, synthetic construct
  source 1..2096: note = Description of Artificial Sequence: Synthetic polypeptide
MPAAKRVKLDGGDKKYSIGLDIGTNSVGWAVITDEYKVPSKKFKVLGNTDRHSIKKNLIGALLFDSGETAEATRLKRTARRRYTRRKNRICYLQEIFSNEMAKVDDSFFHRLEESFLVEEDKKHERHPIFGNIVDEVAYHEKYPTIYHLRKKLVDSTDKADLRLIYLALAHMIKFRGHFLIEGDLNPDNSDVDKLFIQLVQTYNQLFEENPINASGVDAKAILSARLSKSRRLENLIAQLPGEKKNGLFGNLIALSLGLTPNFKSNFDLAEDAKLQLSKDTYDDDLDNLLAQIGDQYADLFLAAKNLSDAILLSDILRVNTEITKAPLSASMIKRYDEHHQDLTLLKALVRQQLPEKYKEIFFDQSKNGYAGYIDGGASQEEFYKFIKPILEKMDGTEELLVKLNREDLLRKQRTFDNGSIPHQIHLGELHAILRRQEDFYPFLKDNREKIEKILTFRIPYYVGPLARGNSRFAWMTRKSEETITPWNFEEVVDKGASAQSFIERMTNFDKNLPNEKVLPKHSLLYEYFTVYNELTKVKYVTEGMRKPAFLSGEQKKAIVDLLFKTNRKVTVKQLKEDYFKKIECFDSVEISGVEDRFNASLGTYHDLLKIIKDKDFLDNEENEDILEDIVLTLTLFEDREMIEERLKTYAHLFDDKVMKQLKRRRYTGWGRLSRKLINGIRDKQSGKTILDFLKSDGFANRNFMQLIHDDSLTFKEDIQKAQVSGQGDSLHEHIANLAGSPAIKKGILQTVKVVDELVKVMGRHKPENIVIEMARENQTTQKGQKNSRERMKRIEEGIKELGSQILKEHPVENTQLQNEKLYLYYLQNGRDMYVDQELDINRLSDYDVDHIVPQSFLKDDSIDNKVLTRSDKARGKSDNVPSEEVVKKMKNYWRQLLNAKLITQRKFDNLTKAERGGLSELDKAGFIKRQLVETRQITKHVAQILDSRMNTKYDENDKLIREVKVITLKSKLVSDFRKDFQFYKVREINNYHHAHDAYLNAVVGTALIKKYPKLESEFVYGDYKVYDVRKMIAKSEQEIGKATAKYFFYSNIMNFFKTEITLANGEIRKRPLIETNGETGEIVWDKGRDFATVRKVLSMPQVNIVKKTEVQTGGFSKESILPKRNSDKLIARKKDWDPKKYGGFDSPTVAYSVLVVAKVEKGKSKKLKSVKELLGITIMERSSFEKNPIDFLEAKGYKEVKKDLIIKLPKYSLFELENGRKRMLASAGELQKGNELALPSKYVNFLYLASHYEKLKGSPEDNEQKQLFVEQHKHYLDEIIEQISEFSKRVILADANLDKVLSAYNKHRDKPIREQAENIIHLFTLTNLGAPAAFKYFDTTIDRKRYTSTKEVLDATLIHQSITGLYETRIDLSQLGGDGGGGGPAPEAAAKGGTLNIEDEYRLHETSKGPDVPLGSTWLSDFPQAWAETGGMGLAVRQAPLIIPLKATSTPVSIKQYPMSQEARLGIKPHIQRLLDQGILVPCQSPWNTPLLPVKKPGTNDYRPVQDLREVNKRVEDIHPTVPNPYNLLSGLPPSHQWYTVLDLKDAFFCLRLHPTSQSLFAFEWRDPEMGISGQLTWTRLPQGFKNSPTLFNEALHRDLADFRIQHPDLILLQYVDDLLLAATSELDCQQGTRALLQTLGDLGYRASAKKAQICQKQVKYLGYLLKEGQRWLTEARKETVMGQPTPKTPRQLREFLGKAGFCRLFIPGFAEMAAPLYPLTKPGTLFEWGPDQQKAYQEIKQALLTAPALGLPDLTKPFELFVDEKQGYAKGVLTQKLGPWRRPVAYLSKKLDPVAAGWPPCLRMVAAIAVLTKDAGKLTMGQPLVILAPHAVEALVKQPPDRWLSNARMTHYQALLLDTDRVQFGPIVALNPATLLPLPEEGLQHDCLDILAEAHGTRPDLTDQPLPDADHTWYTDGSSFLQEGQRKAGAAVTTETEVVWAKALPAGTSAQRAELIALTQALKMAEGKKLNVYTDSRYAFATAHIHGEIYRRRGWLTSEGKEIKNKDEILALLKALFLPKRLSIIHCPGHQKGNRAEARGNRMADQAAREVATRETPETSTLLAGKRTADGSEFEKRTADGSEFESPKKKAKVE

SEQ ID NO: 2593 - protein, 2094 aa, synthetic construct
  source 1..2094: note = Description of Artificial Sequence: Synthetic polypeptide
MPAAKRVKLDGGDKKYSIGLDIGTNSVGWAVITDEYKVPSKKFKVLGNTDRHSIKKNLIGALLFDSGETAEATRLKRTARRRYTRRKNRICYLQEIFSNEMAKVDDSFFHRLEESFLVEEDKKHERHPIFGNIVDEVAYHEKYPTIYHLRKKLVDSTDKADLRLIYLALAHMIKFRGHFLIEGDLNPDNSDVDKLFIQLVQTYNQLFEENPINASGVDAKAILSARLSKSRRLENLIAQLPGEKKNGLFGNLIALSLGLTPNFKSNFDLAEDAKLQLSKDTYDDDLDNLLAQIGDQYADLFLAAKNLSDAILLSDILRVNTEITKAPLSASMIKRYDEHHQDLTLLKALVRQQLPEKYKEIFFDQSKNGYAGYIDGGASQEEFYKFIKPILEKMDGTEELLVKLNREDLLRKQRTFDNGSIPHQIHLGELHAILRRQEDFYPFLKDNREKIEKILTFRIPYYVGPLARGNSRFAWMTRKSEETITPWNFEEVVDKGASAQSFIERMTNFDKNLPNEKVLPKHSLLYEYFTVYNELTKVKYVTEGMRKPAFLSGEQKKAIVDLLFKTNRKVTVKQLKEDYFKKIECFDSVEISGVEDRFNASLGTYHDLLKIIKDKDFLDNEENEDILEDIVLTLTLFEDREMIEERLKTYAHLFDDKVMKQLKRRRYTGWGRLSRKLINGIRDKQSGKTILDFLKSDGFANRNFMQLIHDDSLTFKEDIQKAQVSGQGDSLHEHIANLAGSPAIKKGILQTVKVVDELVKVMGRHKPENIVIEMARENQTTQKGQKNSRERMKRIEEGIKELGSQILKEHPVENTQLQNEKLYLYYLQNGRDMYVDQELDINRLSDYDVDHIVPQSFLKDDSIDNKVLTRSDKARGKSDNVPSEEVVKKMKNYWRQLLNAKLITQRKFDNLTKAERGGLSELDKAGFIKRQLVETRQITKHVAQILDSRMNTKYDENDKLIREVKVITLKSKLVSDFRKDFQFYKVREINNYHHAHDAYLNAVVGTALIKKYPKLESEFVYGDYKVYDVRKMIAKSEQEIGKATAKYFFYSNIMNFFKTEITLANGEIRKRPLIETNGETGEIVWDKGRDFATVRKVLSMPQVNIVKKTEVQTGGFSKESILPKRNSDKLIARKKDWDPKKYGGFDSPTVAYSVLVVAKVEKGKSKKLKSVKELLGITIMERSSFEKNPIDFLEAKGYKEVKKDLIIKLPKYSLFELENGRKRMLASAGELQKGNELALPSKYVNFLYLASHYEKLKGSPEDNEQKQLFVEQHKHYLDEIIEQISEFSKRVILADANLDKVLSAYNKHRDKPIREQAENIIHLFTLTNLGAPAAFKYFDTTIDRKRYTSTKEVLDATLIHQSITGLYETRIDLSQLGGDGGGGGPAPGSSGGTLNIEDEYRLHETSKGPDVPLGSTWLSDFPQAWAETGGMGLAVRQAPLIIPLKATSTPVSIKQYPMSQEARLGIKPHIQRLLDQGILVPCQSPWNTPLLPVKKPGTNDYRPVQDLREVNKRVEDIHPTVPNPYNLLSGLPPSHQWYTVLDLKDAFFCLRLHPTSQSLFAFEWRDPEMGISGQLTWTRLPQGFKNSPTLFNEALHRDLADFRIQHPDLILLQYVDDLLLAATSELDCQQGTRALLQTLGDLGYRASAKKAQICQKQVKYLGYLLKEGQRWLTEARKETVMGQPTPKTPRQLREFLGKAGFCRLFIPGFAEMAAPLYPLTKPGTLFEWGPDQQKAYQEIKQALLTAPALGLPDLTKPFELFVDEKQGYAKGVLTQKLGPWRRPVAYLSKKLDPVAAGWPPCLRMVAAIAVLTKDAGKLTMGQPLVILAPHAVEALVKQPPDRWLSNARMTHYQALLLDTDRVQFGPIVALNPATLLPLPEEGLQHDCLDILAEAHGTRPDLTDQPLPDADHTWYTDGSSFLQEGQRKAGAAVTTETEVVWAKALPAGTSAQRAELIALTQALKMAEGKKLNVYTDSRYAFATAHIHGEIYRRRGWLTSEGKEIKNKDEILALLKALFLPKRLSIIHCPGHQKGNRAEARGNRMADQAAREVATRETPETSTLLAGKRTADGSEFEKRTADGSEFESPKKKAKVE

SEQ ID NO: 2594 - protein, 2091 aa, synthetic construct
  source 1..2091: note = Description of Artificial Sequence: Synthetic polypeptide
MPAAKRVKLDGGDKKYSIGLDIGTNSVGWAVITDEYKVPSKKFKVLGNTDRHSIKKNLIGALLFDSGETAEATRLKRTARRRYTRRKNRICYLQEIFSNEMAKVDDSFFHRLEESFLVEEDKKHERHPIFGNIVDEVAYHEKYPTIYHLRKKLVDSTDKADLRLIYLALAHMIKFRGHFLIEGDLNPDNSDVDKLFIQLVQTYNQLFEENPINASGVDAKAILSARLSKSRRLENLIAQLPGEKKNGLFGNLIALSLGLTPNFKSNFDLAEDAKLQLSKDTYDDDLDNLLAQIGDQYADLFLAAKNLSDAILLSDILRVNTEITKAPLSASMIKRYDEHHQDLTLLKALVRQQLPEKYKEIFFDQSKNGYAGYIDGGASQEEFYKFIKPILEKMDGTEELLVKLNREDLLRKQRTFDNGSIPHQIHLGELHAILRRQEDFYPFLKDNREKIEKILTFRIPYYVGPLARGNSRFAWMTRKSEETITPWNFEEVVDKGASAQSFIERMTNFDKNLPNEKVLPKHSLLYEYFTVYNELTKVKYVTEGMRKPAFLSGEQKKAIVDLLFKTNRKVTVKQLKEDYFKKIECFDSVEISGVEDRFNASLGTYHDLLKIIKDKDFLDNEENEDILEDIVLTLTLFEDREMIEERLKTYAHLFDDKVMKQLKRRRYTGWGRLSRKLINGIRDKQSGKTILDFLKSDGFANRNFMQLIHDDSLTFKEDIQKAQVSGQGDSLHEHIANLAGSPAIKKGILQTVKVVDELVKVMGRHKPENIVIEMARENQTTQKGQKNSRERMKRIEEGIKELGSQILKEHPVENTQLQNEKLYLYYLQNGRDMYVDQELDINRLSDYDVDHIVPQSFLKDDSIDNKVLTRSDKARGKSDNVPSEEVVKKMKNYWRQLLNAKLITQRKFDNLTKAERGGLSELDKAGFIKRQLVETRQITKHVAQILDSRMNTKYDENDKLIREVKVITLKSKLVSDFRKDFQFYKVREINNYHHAHDAYLNAVVGTALIKKYPKLESEFVYGDYKVYDVRKMIAKSEQEIGKATAKYFFYSNIMNFFKTEITLANGEIRKRPLIETNGETGEIVWDKGRDFATVRKVLSMPQVNIVKKTEVQTGGFSKESILPKRNSDKLIARKKDWDPKKYGGFDSPTVAYSVLVVAKVEKGKSKKLKSVKELLGITIMERSSFEKNPIDFLEAKGYKEVKKDLIIKLPKYSLFELENGRKRMLASAGELQKGNELALPSKYVNFLYLASHYEKLKGSPEDNEQKQLFVEQHKHYLDEIIEQISEFSKRVILADANLDKVLSAYNKHRDKPIREQAENIIHLFTLTNLGAPAAFKYFDTTIDRKRYTSTKEVLDATLIHQSITGLYETRIDLSQLGGDGGGSSGGGGGTLNIEDEYRLHETSKGPDVPLGSTWLSDFPQAWAETGGMGLAVRQAPLIIPLKATSTPVSIKQYPMSQEARLGIKPHIQRLLDQGILVPCQSPWNTPLLPVKKPGTNDYRPVQDLREVNKRVEDIHPTVPNPYNLLSGLPPSHQWYTVLDLKDAFFCLRLHPTSQSLFAFEWRDPEMGISGQLTWTRLPQGFKNSPTLFNEALHRDLADFRIQHPDLILLQYVDDLLLAATSELDCQQGTRALLQTLGDLGYRASAKKAQICQKQVKYLGYLLKEGQRWLTEARKETVMGQPTPKTPRQLREFLGKAGFCRLFIPGFAEMAAPLYPLTKPGTLFEWGPDQQKAYQEIKQALLTAPALGLPDLTKPFELFVDEKQGYAKGVLTQKLGPWRRPVAYLSKKLDPVAAGWPPCLRMVAAIAVLTKDAGKLTMGQPLVILAPHAVEALVKQPPDRWLSNARMTHYQALLLDTDRVQFGPIVALNPATLLPLPEEGLQHDCLDILAEAHGTRPDLTDQPLPDADHTWYTDGSSFLQEGQRKAGAAVTTETEVVWAKALPAGTSAQRAELIALTQALKMAEGKKLNVYTDSRYAFATAHIHGEIYRRRGWLTSEGKEIKNKDEILALLKALFLPKRLSIIHCPGHQKGNRAEARGNRMADQAAREVATRETPETSTLLAGKRTADGSEFEKRTADGSEFESPKKKAKVE

SEQ ID NO: 2595 - protein, 2103 aa, synthetic construct
  source 1..2103: note = Description of Artificial Sequence: Synthetic polypeptide
MPAAKRVKLDGGDKKYSIGLDIGTNSVGWAVITDEYKVPSKKFKVLGNTDRHSIKKNLIGALLFDSGETAEATRLKRTARRRYTRRKNRICYLQEIFSNEMAKVDDSFFHRLEESFLVEEDKKHERHPIFGNIVDEVAYHEKYPTIYHLRKKLVDSTDKADLRLIYLALAHMIKFRGHFLIEGDLNPDNSDVDKLFIQLVQTYNQLFEENPINASGVDAKAILSARLSKSRRLENLIAQLPGEKKNGLFGNLIALSLGLTPNFKSNFDLAEDAKLQLSKDTYDDDLDNLLAQIGDQYADLFLAAKNLSDAILLSDILRVNTEITKAPLSASMIKRYDEHHQDLTLLKALVRQQLPEKYKEIFFDQSKNGYAGYIDGGASQEEFYKFIKPILEKMDGTEELLVKLNREDLLRKQRTFDNGSIPHQIHLGELHAILRRQEDFYPFLKDNREKIEKILTFRIPYYVGPLARGNSRFAWMTRKSEETITPWNFEEVVDKGASAQSFIERMTNFDKNLPNEKVLPKHSLLYEYFTVYNELTKVKYVTEGMRKPAFLSGEQKKAIVDLLFKTNRKVTVKQLKEDYFKKIECFDSVEISGVEDRFNASLGTYHDLLKIIKDKDFLDNEENEDILEDIVLTLTLFEDREMIEERLKTYAHLFDDKVMKQLKRRRYTGWGRLSRKLINGIRDKQSGKTILDFLKSDGFANRNFMQLIHDDSLTFKEDIQKAQVSGQGDSLHEHIANLAGSPAIKKGILQTVKVVDELVKVMGRHKPENIVIEMARENQTTQKGQKNSRERMKRIEEGIKELGSQILKEHPVENTQLQNEKLYLYYLQNGRDMYVDQELDINRLSDYDVDHIVPQSFLKDDSIDNKVLTRSDKARGKSDNVPSEEVVKKMKNYWRQLLNAKLITQRKFDNLTKAERGGLSELDKAGFIKRQLVETRQITKHVAQILDSRMNTKYDENDKLIREVKVITLKSKLVSDFRKDFQFYKVREINNYHHAHDAYLNAVVGTALIKKYPKLESEFVYGDYKVYDVRKMIAKSEQEIGKATAKYFFYSNIMNFFKTEITLANGEIRKRPLIETNGETGEIVWDKGRDFATVRKVLSMPQVNIVKKTEVQTGGFSKESILPKRNSDKLIARKKDWDPKKYGGFDSPTVAYSVLVVAKVEKGKSKKLKSVKELLGITIMERSSFEKNPIDFLEAKGYKEVKKDLIIKLPKYSLFELENGRKRMLASAGELQKGNELALPSKYVNFLYLASHYEKLKGSPEDNEQKQLFVEQHKHYLDEIIEQISEFSKRVILADANLDKVLSAYNKHRDKPIREQAENIIHLFTLTNLGAPAAFKYFDTTIDRKRYTSTKEVLDATLIHQSITGLYETRIDLSQLGGDGGGSSGSSGSSGSSGSSGSSGGTLNIEDEYRLHETSKGPDVPLGSTWLSDFPQAWAETGGMGLAVRQAPLIIPLKATSTPVSIKQYPMSQEARLGIKPHIQRLLDQGILVPCQSPWNTPLLPVKKPGTNDYRPVQDLREVNKRVEDIHPTVPNPYNLLSGLPPSHQWYTVLDLKDAFFCLRLHPTSQSLFAFEWRDPEMGISGQLTWTRLPQGFKNSPTLFNEALHRDLADFRIQHPDLILLQYVDDLLLAATSELDCQQGTRALLQTLGDLGYRASAKKAQICQKQVKYLGYLLKEGQRWLTEARKETVMGQPTPKTPRQLREFLGKAGFCRLFIPGFAEMAAPLYPLTKPGTLFEWGPDQQKAYQEIKQALLTAPALGLPDLTKPFELFVDEKQGYAKGVLTQKLGPWRRPVAYLSKKLDPVAAGWPPCLRMVAAIAVLTKDAGKLTMGQPLVILAPHAVEALVKQPPDRWLSNARMTHYQALLLDTDRVQFGPIVALNPATLLPLPEEGLQHDCLDILAEAHGTRPDLTDQPLPDADHTWYTDGSSFLQEGQRKAGAAVTTETEVVWAKALPAGTSAQRAELIALTQALKMAEGKKLNVYTDSRYAFATAHIHGEIYRRRGWLTSEGKEIKNKDEILALLKALFLPKRLSIIHCPGHQKGNRAEARGNRMADQAAREVATRETPETSTLLAGKRTADGSEFEKRTADGSEFESPKKKAKVE

SEQ ID NO: 2596 - protein, 2088 aa, synthetic construct
  source 1..2088: note = Description of Artificial Sequence: Synthetic polypeptide
MPAAKRVKLDGGDKKYSIGLDIGTNSVGWAVITDEYKVPSKKFKVLGNTDRHSIKKNLIGALLFDSGETAEATRLKRTARRRYTRRKNRICYLQEIFSNEMAKVDDSFFHRLEESFLVEEDKKHERHPIFGNIVDEVAYHEKYPTIYHLRKKLVDSTDKADLRLIYLALAHMIKFRGHFLIEGDLNPDNSDVDKLFIQLVQTYNQLFEENPINASGVDAKAILSARLSKSRRLENLIAQLPGEKKNGLFGNLIALSLGLTPNFKSNFDLAEDAKLQLSKDTYDDDLDNLLAQIGDQYADLFLAAKNLSDAILLSDILRVNTEITKAPLSASMIKRYDEHHQDLTLLKALVRQQLPEKYKEIFFDQSKNGYAGYIDGGASQEEFYKFIKPILEKMDGTEELLVKLNREDLLRKQRTFDNGSIPHQIHLGELHAILRRQEDFYPFLKDNREKIEKILTFRIPYYVGPLARGNSRFAWMTRKSEETITPWNFEEVVDKGASAQSFIERMTNFDKNLPNEKVLPKHSLLYEYFTVYNELTKVKYVTEGMRKPAFLSGEQKKAIVDLLFKTNRKVTVKQLKEDYFKKIECFDSVEISGVEDRFNASLGTYHDLLKIIKDKDFLDNEENEDILEDIVLTLTLFEDREMIEERLKTYAHLFDDKVMKQLKRRRYTGWGRLSRKLINGIRDKQSGKTILDFLKSDGFANRNFMQLIHDDSLTFKEDIQKAQVSGQGDSLHEHIANLAGSPAIKKGILQTVKVVDELVKVMGRHKPENIVIEMARENQTTQKGQKNSRERMKRIEEGIKELGSQILKEHPVENTQLQNEKLYLYYLQNGRDMYVDQELDINRLSDYDVDHIVPQSFLKDDSIDNKVLTRSDKARGKSDNVPSEEVVKKMKNYWRQLLNAKLITQRKFDNLTKAERGGLSELDKAGFIKRQLVETRQITKHVAQILDSRMNTKYDENDKLIREVKVITLKSKLVSDFRKDFQFYKVREINNYHHAHDAYLNAVVGTALIKKYPKLESEFVYGDYKVYDVRKMIAKSEQEIGKATAKYFFYSNIMNFFKTEITLANGEIRKRPLIETNGETGEIVWDKGRDFATVRKVLSMPQVNIVKKTEVQTGGFSKESILPKRNSDKLIARKKDWDPKKYGGFDSPTVAYSVLVVAKVEKGKSKKLKSVKELLGITIMERSSFEKNPIDFLEAKGYKEVKKDLIIKLPKYSLFELENGRKRMLASAGELQKGNELALPSKYVNFLYLASHYEKLKGSPEDNEQKQLFVEQHKHYLDEIIEQISEFSKRVILADANLDKVLSAYNKHRDKPIREQAENIIHLFTLTNLGAPAAFKYFDTTIDRKRYTSTKEVLDATLIHQSITGLYETRIDLSQLGGDGGGGGGGTLNIEDEYRLHETSKGPDVPLGSTWLSDFPQAWAETGGMGLAVRQAPLIIPLKATSTPVSIKQYPMSQEARLGIKPHIQRLLDQGILVPCQSPWNTPLLPVKKPGTNDYRPVQDLREVNKRVEDIHPTVPNPYNLLSGLPPSHQWYTVLDLKDAFFCLRLHPTSQSLFAFEWRDPEMGISGQLTWTRLPQGFKNSPTLFNEALHRDLADFRIQHPDLILLQYVDDLLLAATSELDCQQGTRALLQTLGDLGYRASAKKAQICQKQVKYLGYLLKEGQRWLTEARKETVMGQPTPKTPRQLREFLGKAGFCRLFIPGFAEMAAPLYPLTKPGTLFEWGPDQQKAYQEIKQALLTAPALGLPDLTKPFELFVDEKQGYAKGVLTQKLGPWRRPVAYLSKKLDPVAAGWPPCLRMVAAIAVLTKDAGKLTMGQPLVILAPHAVEALVKQPPDRWLSNARMTHYQALLLDTDRVQFGPIVALNPATLLPLPEEGLQHDCLDILAEAHGTRPDLTDQPLPDADHTWYTDGSSFLQEGQRKAGAAVTTETEVVWAKALPAGTSAQRAELIALTQALKMAEGKKLNVYTDSRYAFATAHIHGEIYRRRGWLTSEGKEIKNKDEILALLKALFLPKRLSIIHCPGHQKGNRAEARGNRMADQAAREVATRETPETSTLLAGKRTADGSEFEKRTADGSEFESPKKKAKVE

SEQ ID NO: 2597 - protein, 2096 aa, synthetic construct
  source 1..2096: note = Description of Artificial Sequence: Synthetic polypeptide
MPAAKRVKLDGGDKKYSIGLDIGTNSVGWAVITDEYKVPSKKFKVLGNTDRHSIKKNLIGALLFDSGETAEATRLKRTARRRYTRRKNRICYLQEIFSNEMAKVDDSFFHRLEESFLVEEDKKHERHPIFGNIVDEVAYHEKYPTIYHLRKKLVDSTDKADLRLIYLALAHMIKFRGHFLIEGDLNPDNSDVDKLFIQLVQTYNQLFEENPINASGVDAKAILSARLSKSRRLENLIAQLPGEKKNGLFGNLIALSLGLTPNFKSNFDLAEDAKLQLSKDTYDDDLDNLLAQIGDQYADLFLAAKNLSDAILLSDILRVNTEITKAPLSASMIKRYDEHHQDLTLLKALVRQQLPEKYKEIFFDQSKNGYAGYIDGGASQEEFYKFIKPILEKMDGTEELLVKLNREDLLRKQRTFDNGSIPHQIHLGELHAILRRQEDFYPFLKDNREKIEKILTFRIPYYVGPLARGNSRFAWMTRKSEETITPWNFEEVVDKGASAQSFIERMTNFDKNLPNEKVLPKHSLLYEYFTVYNELTKVKYVTEGMRKPAFLSGEQKKAIVDLLFKTNRKVTVKQLKEDYFKKIECFDSVEISGVEDRFNASLGTYHDLLKIIKDKDFLDNEENEDILEDIVLTLTLFEDREMIEERLKTYAHLFDDKVMKQLKRRRYTGWGRLSRKLINGIRDKQSGKTILDFLKSDGFANRNFMQLIHDDSLTFKEDIQKAQVSGQGDSLHEHIANLAGSPAIKKGILQTVKVVDELVKVMGRHKPENIVIEMARENQTTQKGQKNSRERMKRIEEGIKELGSQILKEHPVENTQLQNEKLYLYYLQNGRDMYVDQELDINRLSDYDVDHIVPQSFLKDDSIDNKVLTRSDKARGKSDNVPSEEVVKKMKNYWRQLLNAKLITQRKFDNLTKAERGGLSELDKAGFIKRQLVETRQITKHVAQILDSRMNTKYDENDKLIREVKVITLKSKLVSDFRKDFQFYKVREINNYHHAHDAYLNAVVGTALIKKYPKLESEFVYGDYKVYDVRKMIAKSEQEIGKATAKYFFYSNIMNFFKTEITLANGEIRKRPLIETNGETGEIVWDKGRDFATVRKVLSMPQVNIVKKTEVQTGGFSKESILPKRNSDKLIARKKDWDPKKYGGFDSPTVAYSVLVVAKVEKGKSKKLKSVKELLGITIMERSSFEKNPIDFLEAKGYKEVKKDLIIKLPKYSLFELENGRKRMLASAGELQKGNELALPSKYVNFLYLASHYEKLKGSPEDNEQKQLFVEQHKHYLDEIIEQISEFSKRVILADANLDKVLSAYNKHRDKPIREQAENIIHLFTLTNLGAPAAFKYFDTTIDRKRYTSTKEVLDATLIHQSITGLYETRIDLSQLGGDGGGGGGGSEAAAKGGTLNIEDEYRLHETSKGPDVPLGSTWLSDFPQAWAETGGMGLAVRQAPLIIPLKATSTPVSIKQYPMSQEARLGIKPHIQRLLDQGILVPCQSPWNTPLLPVKKPGTNDYRPVQDLREVNKRVEDIHPTVPNPYNLLSGLPPSHQWYTVLDLKDAFFCLRLHPTSQSLFAFEWRDPEMGISGQLTWTRLPQGFKNSPTLFNEALHRDLADFRIQHPDLILLQYVDDLLLAATSELDCQQGTRALLQTLGDLGYRASAKKAQICQKQVKYLGYLLKEGQRWLTEARKETVMGQPTPKTPRQLREFLGKAGFCRLFIPGFAEMAAPLYPLTKPGTLFEWGPDQQKAYQEIKQALLTAPALGLPDLTKPFELFVDEKQGYAKGVLTQKLGPWRRPVAYLSKKLDPVAAGWPPCLRMVAAIAVLTKDAGKLTMGQPLVILAPHAVEALVKQPPDRWLSNARMTHYQALLLDTDRVQFGPIVALNPATLLPLPEEGLQHDCLDILAEAHGTRPDLTDQPLPDADHTWYTDGSSFLQEGQRKAGAAVTTETEVVWAKALPAGTSAQRAELIALTQALKMAEGKKLNVYTDSRYAFATAHIHGEIYRRRGWLTSEGKEIKNKDEILALLKALFLPKRLSIIHCPGHQKGNRAEARGNRMADQAAREVATRETPETSTLLAGKRTADGSEFEKRTADGSEFESPKKKAKVE

SEQ ID NO: 2598 - protein, 2110 aa, synthetic construct
  source 1..2110: note = Description of Artificial Sequence: Synthetic polypeptide
MPAAKRVKLDGGDKKYSIGLDIGTNSVGWAVITDEYKVPSKKFKVLGNTDRHSIKKNLIGALLFDSGETAEATRLKRTARRRYTRRKNRICYLQEIFSNEMAKVDDSFFHRLEESFLVEEDKKHERHPIFGNIVDEVAYHEKYPTIYHLRKKLVDSTDKADLRLIYLALAHMIKFRGHFLIEGDLNPDNSDVDKLFIQLVQTYNQLFEENPINASGVDAKAILSARLSKSRRLENLIAQLPGEKKNGLFGNLIALSLGLTPNFKSNFDLAEDAKLQLSKDTYDDDLDNLLAQIGDQYADLFLAAKNLSDAILLSDILRVNTEITKAPLSASMIKRYDEHHQDLTLLKALVRQQLPEKYKEIFFDQSKNGYAGYIDGGASQEEFYKFIKPILEKMDGTEELLVKLNREDLLRKQRTFDNGSIPHQIHLGELHAILRRQEDFYPFLKDNREKIEKILTFRIPYYVGPLARGNSRFAWMTRKSEETITPWNFEEVVDKGASAQSFIERMTNFDKNLPNEKVLPKHSLLYEYFTVYNELTKVKYVTEGMRKPAFLSGEQKKAIVDLLFKTNRKVTVKQLKEDYFKKIECFDSVEISGVEDRFNASLGTYHDLLKIIKDKDFLDNEENEDILEDIVLTLTLFEDREMIEERLKTYAHLFDDKVMKQLKRRRYTGWGRLSRKLINGIRDKQSGKTILDFLKSDGFANRNFMQLIHDDSLTFKEDIQKAQVSGQGDSLHEHIANLAGSPAIKKGILQTVKVVDELVKVMGRHKPENIVIEMARENQTTQKGQKNSRERMKRIEEGIKELGSQILKEHPVENTQLQNEKLYLYYLQNGRDMYVDQELDINRLSDYDVDHIVPQSFLKDDSIDNKVLTRSDKARGKSDNVPSEEVVKKMKNYWRQLLNAKLITQRKFDNLTKAERGGLSELDKAGFIKRQLVETRQITKHVAQILDSRMNTKYDENDKLIREVKVITLKSKLVSDFRKDFQFYKVREINNYHHAHDAYLNAVVGTALIKKYPKLESEFVYGDYKVYDVRKMIAKSEQEIGKATAKYFFYSNIMNFFKTEITLANGEIRKRPLIETNGETGEIVWDKGRDFATVRKVLSMPQVNIVKKTEVQTGGFSKESILPKRNSDKLIARKKDWDPKKYGGFDSPTVAYSVLVVAKVEKGKSKKLKSVKELLGITIMERSSFEKNPIDFLEAKGYKEVKKDLIIKLPKYSLFELENGRKRMLASAGELQKGNELALPSKYVNFLYLASHYEKLKGSPEDNEQKQLFVEQHKHYLDEIIEQISEFSKRVILADANLDKVLSAYNKHRDKPIREQAENIIHLFTLTNLGAPAAFKYFDTTIDRKRYTSTKEVLDATLIHQSITGLYETRIDLSQLGGDGGGGGGSGGGGSGGGGSGGGGSGGGGSGGTLNIEDEYRLHETSKGPDVPLGSTWLSDFPQAWAETGGMGLAVRQAPLIIPLKATSTPVSIKQYPMSQEARLGIKPHIQRLLDQGILVPCQSPWNTPLLPVKKPGTNDYRPVQDLREVNKRVEDIHPTVPNPYNLLSGLPPSHQWYTVLDLKDAFFCLRLHPTSQSLFAFEWRDPEMGISGQLTWTRLPQGFKNSPTLFNEALHRDLADFRIQHPDLILLQYVDDLLLAATSELDCQQGTRALLQTLGDLGYRASAKKAQICQKQVKYLGYLLKEGQRWLTEARKETVMGQPTPKTPRQLREFLGKAGFCRLFIPGFAEMAAPLYPLTKPGTLFEWGPDQQKAYQEIKQALLTAPALGLPDLTKPFELFVDEKQGYAKGVLTQKLGPWRRPVAYLSKKLDPVAAGWPPCLRMVAAIAVLTKDAGKLTMGQPLVILAPHAVEALVKQPPDRWLSNARMTHYQALLLDTDRVQFGPIVALNPATLLPLPEEGLQHDCLDILAEAHGTRPDLTDQPLPDADHTWYTDGSSFLQEGQRKAGAAVTTETEVVWAKALPAGTSAQRAELIALTQALKMAEGKKLNVYTDSRYAFATAHIHGEIYRRRGWLTSEGKEIKNKDEILALLKALFLPKRLSIIHCPGHQKGNRAEARGNRMADQAAREVATRETPETSTLLAGKRTADGSEFEKRTADGSEFESPKKKAKVE

SEQ ID NO: 2599 - protein, 2096 aa, synthetic construct
  source 1..2096: note = Description of Artificial Sequence: Synthetic polypeptide
MPAAKRVKLDGGDKKYSIGLDIGTNSVGWAVITDEYKVPSKKFKVLGNTDRHSIKKNLIGALLFDSGETAEATRLKRTARRRYTRRKNRICYLQEIFSNEMAKVDDSFFHRLEESFLVEEDKKHERHPIFGNIVDEVAYHEKYPTIYHLRKKLVDSTDKADLRLIYLALAHMIKFRGHFLIEGDLNPDNSDVDKLFIQLVQTYNQLFEENPINASGVDAKAILSARLSKSRRLENLIAQLPGEKKNGLFGNLIALSLGLTPNFKSNFDLAEDAKLQLSKDTYDDDLDNLLAQIGDQYADLFLAAKNLSDAILLSDILRVNTEITKAPLSASMIKRYDEHHQDLTLLKALVRQQLPEKYKEIFFDQSKNGYAGYIDGGASQEEFYKFIKPILEKMDGTEELLVKLNREDLLRKQRTFDNGSIPHQIHLGELHAILRRQEDFYPFLKDNREKIEKILTFRIPYYVGPLARGNSRFAWMTRKSEETITPWNFEEVVDKGASAQSFIERMTNFDKNLPNEKVLPKHSLLYEYFTVYNELTKVKYVTEGMRKPAFLSGEQKKAIVDLLFKTNRKVTVKQLKEDYFKKIECFDSVEISGVEDRFNASLGTYHDLLKIIKDKDFLDNEENEDILEDIVLTLTLFEDREMIEERLKTYAHLFDDKVMKQLKRRRYTGWGRLSRKLINGIRDKQSGKTILDFLKSDGFANRNFMQLIHDDSLTFKEDIQKAQVSGQGDSLHEHIANLAGSPAIKKGILQTVKVVDELVKVMGRHKPENIVIEMARENQTTQKGQKNSRERMKRIEEGIKELGSQILKEHPVENTQLQNEKLYLYYLQNGRDMYVDQELDINRLSDYDVDHIVPQSFLKDDSIDNKVLTRSDKARGKSDNVPSEEVVKKMKNYWRQLLNAKLITQRKFDNLTKAERGGLSELDKAGFIKRQLVETRQITKHVAQILDSRMNTKYDENDKLIREVKVITLKSKLVSDFRKDFQFYKVREINNYHHAHDAYLNAVVGTALIKKYPKLESEFVYGDYKVYDVRKMIAKSEQEIGKATAKYFFYSNIMNFFKTEITLANGEIRKRPLIETNGETGEIVWDKGRDFATVRKVLSMPQVNIVKKTEVQTGGFSKESILPKRNSDKLIARKKDWDPKKYGGFDSPTVAYSVLVVAKVEKGKSKKLKSVKELLGITIMERSSFEKNPIDFLEAKGYKEVKKDLIIKLPKYSLFELENGRKRMLASAGELQKGNELALPSKYVNFLYLASHYEKLKGSPEDNEQKQLFVEQHKHYLDEIIEQISEFSKRVILADANLDKVLSAYNKHRDKPIREQAENIIHLFTLTNLGAPAAFKYFDTTIDRKRYTSTKEVLDATLIHQSITGLYETRIDLSQLGGDGGGSSPAPEAAAKGGTLNIEDEYRLHETSKGPDVPLGSTWLSDFPQAWAETGGMGLAVRQAPLIIPLKATSTPVSIKQYPMSQEARLGIKPHIQRLLDQGILVPCQSPWNTPLLPVKKPGTNDYRPVQDLREVNKRVEDIHPTVPNPYNLLSGLPPSHQWYTVLDLKDAFFCLRLHPTSQSLFAFEWRDPEMGISGQLTWTRLPQGFKNSPTLFNEALHRDLADFRIQHPDLILLQYVDDLLLAATSELDCQQGTRALLQTLGDLGYRASAKKAQICQKQVKYLGYLLKEGQRWLTEARKETVMGQPTPKTPRQLREFLGKAGFCRLFIPGFAEMAAPLYPLTKPGTLFEWGPDQQKAYQEIKQALLTAPALGLPDLTKPFELFVDEKQGYAKGVLTQKLGPWRRPVAYLSKKLDPVAAGWPPCLRMVAAIAVLTKDAGKLTMGQPLVILAPHAVEALVKQPPDRWLSNARMTHYQALLLDTDRVQFGPIVALNPATLLPLPEEGLQHDCLDILAEAHGTRPDLTDQPLPDADHTWYTDGSSFLQEGQRKAGAAVTTETEVVWAKALPAGTSAQRAELIALTQALKMAEGKKLNVYTDSRYAFATAHIHGEIYRRRGWLTSEGKEIKNKDEILALLKALFLPKRLSIIHCPGHQKGNRAEARGNRMADQAAREVATRETPETSTLLAGKRTADGSEFEKRTADGSEFESPKKKAKVE

SEQ ID NO: 2600 - protein, 2093 aa, synthetic construct
  source 1..2093: note = Description of Artificial Sequence: Synthetic polypeptide
MPAAKRVKLDGGDKKYSIGLDIGTNSVGWAVITDEYKVPSKKFKVLGNTDRHSIKKNLIGALLFDSGETAEATRLKRTARRRYTRRKNRICYLQEIFSNEMAKVDDSFFHRLEESFLVEEDKKHERHPIFGNIVDEVAYHEKYPTIYHLRKKLVDSTDKADLRLIYLALAHMIKFRGHFLIEGDLNPDNSDVDKLFIQLVQTYNQLFEENPINASGVDAKAILSARLSKSRRLENLIAQLPGEKKNGLFGNLIALSLGLTPNFKSNFDLAEDAKLQLSKDTYDDDLDNLLAQIGDQYADLFLAAKNLSDAILLSDILRVNTEITKAPLSASMIKRYDEHHQDLTLLKALVRQQLPEKYKEIFFDQSKNGYAGYIDGGASQEEFYKFIKPILEKMDGTEELLVKLNREDLLRKQRTFDNGSIPHQIHLGELHAILRRQEDFYPFLKDNREKIEKILTFRIPYYVGPLARGNSRFAWMTRKSEETITPWNFEEVVDKGASAQSFIERMTNFDKNLPNEKVLPKHSLLYEYFTVYNELTKVKYVTEGMRKPAFLSGEQKKAIVDLLFKTNRKVTVKQLKEDYFKKIECFDSVEISGVEDRFNASLGTYHDLLKIIKDKDFLDNEENEDILEDIVLTLTLFEDREMIEERLKTYAHLFDDKVMKQLKRRRYTGWGRLSRKLINGIRDKQSGKTILDFLKSDGFANRNFMQLIHDDSLTFKEDIQKAQVSGQGDSLHEHIANLAGSPAIKKGILQTVKVVDELVKVMGRHKPENIVIEMARENQTTQKGQKNSRERMKRIEEGIKELGSQILKEHPVENTQLQNEKLYLYYLQNGRDMYVDQELDINRLSDYDVDHIVPQSFLKDDSIDNKVLTRSDKARGKSDNVPSEEVVKKMKNYWRQLLNAKLITQRKFDNLTKAERGGLSELDKAGFIKRQLVETRQITKHVAQILDSRMNTKYDENDKLIREVKVITLKSKLVSDFRKDFQFYKVREINNYHHAHDAYLNAVVGTALIKKYPKLESEFVYGDYKVYDVRKMIAKSEQEIGKATAKYFFYSNIMNFFKTEITLANGEIRKRPLIETNGETGEIVWDKGRDFATVRKVLSMPQVNIVKKTEVQTGGFSKESILPKRNSDKLIARKKDWDPKKYGGFDSPTVAYSVLVVAKVEKGKSKKLKSVKELLGITIMERSSFEKNPIDFLEAKGYKEVKKDLIIKLPKYSLFELENGRKRMLASAGELQKGNELALPSKYVNFLYLASHYEKLKGSPEDNEQKQLFVEQHKHYLDEIIEQISEFSKRVILADANLDKVLSAYNKHRDKPIREQAENIIHLFTLTNLGAPAAFKYFDTTIDRKRYTSTKEVLDATLIHQSITGLYETRIDLSQLGGDGGGGSEAAAKGGTLNIEDEYRLHETSKGPDVPLGSTWLSDFPQAWAETGGMGLAVRQAPLIIPLKATSTPVSIKQYPMSQEARLGIKPHIQRLLDQGILVPCQSPWNTPLLPVKKPGTNDYRPVQDLREVNKRVEDIHPTVPNPYNLLSGLPPSHQWYTVLDLKDAFFCLRLHPTSQSLFAFEWRDPEMGISGQLTWTRLPQGFKNSPTLFNEALHRDLADFRIQHPDLILLQYVDDLLLAATSELDCQQGTRALLQTLGDLGYRASAKKAQICQKQVKYLGYLLKEGQRWLTEARKETVMGQPTPKTPRQLREFLGKAGFCRLFIPGFAEMAAPLYPLTKPGTLFEWGPDQQKAYQEIKQALLTAPALGLPDLTKPFELFVDEKQGYAKGVLTQKLGPWRRPVAYLSKKLDPVAAGWPPCLRMVAAIAVLTKDAGKLTMGQPLVILAPHAVEALVKQPPDRWLSNARMTHYQALLLDTDRVQFGPIVALNPATLLPLPEEGLQHDCLDILAEAHGTRPDLTDQPLPDADHTWYTDGSSFLQEGQRKAGAAVTTETEVVWAKALPAGTSAQRAELIALTQALKMAEGKKLNVYTDSRYAFATAHIHGEIYRRRGWLTSEGKEIKNKDEILALLKALFLPKRLSIIHCPGHQKGNRAEARGNRMADQAAREVATRETPETSTLLAGKRTADGSEFEKRTADGSEFESPKKKAKVE

SEQ ID NO: 2601 - protein, 2094 aa, synthetic construct
  source 1..2094: note = Description of Artificial Sequence: Synthetic polypeptide
MPAAKRVKLDGGDKKYSIGLDIGTNSVGWAVITDEYKVPSKKFKVLGNTDRHSIKKNLIGALLFDSGETAEATRLKRTARRRYTRRKNRICYLQEIFSNEMAKVDDSFFHRLEESFLVEEDKKHERHPIFGNIVDEVAYHEKYPTIYHLRKKLVDSTDKADLRLIYLALAHMIKFRGHFLIEGDLNPDNSDVDKLFIQLVQTYNQLFEENPINASGVDAKAILSARLSKSRRLENLIAQLPGEKKNGLFGNLIALSLGLTPNFKSNFDLAEDAKLQLSKDTYDDDLDNLLAQIGDQYADLFLAAKNLSDAILLSDILRVNTEITKAPLSASMIKRYDEHHQDLTLLKALVRQQLPEKYKEIFFDQSKNGYAGYIDGGASQEEFYKFIKPILEKMDGTEELLVKLNREDLLRKQRTFDNGSIPHQIHLGELHAILRRQEDFYPFLKDNREKIEKILTFRIPYYVGPLARGNSRFAWMTRKSEETITPWNFEEVVDKGASAQSFIERMTNFDKNLPNEKVLPKHSLLYEYFTVYNELTKVKYVTEGMRKPAFLSGEQKKAIVDLLFKTNRKVTVKQLKEDYFKKIECFDSVEISGVEDRFNASLGTYHDLLKIIKDKDFLDNEENEDILEDIVLTLTLFEDREMIEERLKTYAHLFDDKVMKQLKRRRYTGWGRLSRKLINGIRDKQSGKTILDFLKSDGFANRNFMQLIHDDSLTFKEDIQKAQVSGQGDSLHEHIANLAGSPAIKKGILQTVKVVDELVKVMGRHKPENIVIEMARENQTTQKGQKNSRERMKRIEEGIKELGSQILKEHPVENTQLQNEKLYLYYLQNGRDMYVDQELDINRLSDYDVDHIVPQSFLKDDSIDNKVLTRSDKARGKSDNVPSEEVVKKMKNYWRQLLNAKLITQRKFDNLTKAERGGLSELDKAGFIKRQLVETRQITKHVAQILDSRMNTKYDENDKLIREVKVITLKSKLVSDFRKDFQFYKVREINNYHHAHDAYLNAVVGTALIKKYPKLESEFVYGDYKVYDVRKMIAKSEQEIGKATAKYFFYSNIMNFFKTEITLANGEIRKRPLIETNGETGEIVWDKGRDFATVRKVLSMPQVNIVKKTEVQTGGFSKESILPKRNSDKLIARKKDWDPKKYGGFDSPTVAYSVLVVAKVEKGKSKKLKSVKELLGITIMERSSFEKNPIDFLEAKGYKEVKKDLIIKLPKYSLFELENGRKRMLASAGELQKGNELALPSKYVNFLYLASHYEKLKGSPEDNEQKQLFVEQHKHYLDEIIEQISEFSKRVILADANLDKVLSAYNKHRDKPIREQAENIIHLFTLTNLGAPAAFKYFDTTIDRKRYTSTKEVLDATLIHQSITGLYETRIDLSQLGGDGGGGSGGGGSSGGTLNIEDEYRLHETSKGPDVPLGSTWLSDFPQAWAETGGMGLAVRQAPLIIPLKATSTPVSIKQYPMSQEARLGIKPHIQRLLDQGILVPCQSPWNTPLLPVKKPGTNDYRPVQDLREVNKRVEDIHPTVPNPYNLLSGLPPSHQWYTVLDLKDAFFCLRLHPTSQSLFAFEWRDPEMGISGQLTWTRLPQGFKNSPTLFNEALHRDLADFRIQHPDLILLQYVDDLLLAATSELDCQQGTRALLQTLGDLGYRASAKKAQICQKQVKYLGYLLKEGQRWLTEARKETVMGQPTPKTPRQLREFLGKAGFCRLFIPGFAEMAAPLYPLTKPGTLFEWGPDQQKAYQEIKQALLTAPALGLPDLTKPFELFVDEKQGYAKGVLTQKLGPWRRPVAYLSKKLDPVAAGWPPCLRMVAAIAVLTKDAGKLTMGQPLVILAPHAVEALVKQPPDRWLSNARMTHYQALLLDTDRVQFGPIVALNPATLLPLPEEGLQHDCLDILAEAHGTRPDLTDQPLPDADHTWYTDGSSFLQEGQRKAGAAVTTETEVVWAKALPAGTSAQRAELIALTQALKMAEGKKLNVYTDSRYAFATAHIHGEIYRRRGWLTSEGKEIKNKDEILALLKALFLPKRLSIIHCPGHQKGNRAEARGNRMADQAAREVATRETPETSTLLAGKRTADGSEFEKRTADGSEFESPKKKAKVE

SEQ ID NO: 2602 - protein, 2089 aa, synthetic construct
  source 1..2089: note = Description of Artificial Sequence: Synthetic polypeptide
MPAAKRVKLDGGDKKYSIGLDIGTNSVGWAVITDEYKVPSKKFKVLGNTDRHSIKKNLIGALLFDSGETAEATRLKRTARRRYTRRKNRICYLQEIFSNEMAKVDDSFFHRLEESFLVEEDKKHERHPIFGNIVDEVAYHEKYPTIYHLRKKLVDSTDKADLRLIYLALAHMIKFRGHFLIEGDLNPDNSDVDKLFIQLVQTYNQLFEENPINASGVDAKAILSARLSKSRRLENLIAQLPGEKKNGLFGNLIALSLGLTPNFKSNFDLAEDAKLQLSKDTYDDDLDNLLAQIGDQYADLFLAAKNLSDAILLSDILRVNTEITKAPLSASMIKRYDEHHQDLTLLKALVRQQLPEKYKEIFFDQSKNGYAGYIDGGASQEEFYKFIKPILEKMDGTEELLVKLNREDLLRKQRTFDNGSIPHQIHLGELHAILRRQEDFYPFLKDNREKIEKILTFRIPYYVGPLARGNSRFAWMTRKSEETITPWNFEEVVDKGASAQSFIERMTNFDKNLPNEKVLPKHSLLYEYFTVYNELTKVKYVTEGMRKPAFLSGEQKKAIVDLLFKTNRKVTVKQLKEDYFKKIECFDSVEISGVEDRFNASLGTYHDLLKIIKDKDFLDNEENEDILEDIVLTLTLFEDREMIEERLKTYAHLFDDKVMKQLKRRRYTGWGRLSRKLINGIRDKQSGKTILDFLKSDGFANRNFMQLIHDDSLTFKEDIQKAQVSGQGDSLHEHIANLAGSPAIKKGILQTVKVVDELVKVMGRHKPENIVIEMARENQTTQKGQKNSRERMKRIEEGIKELGSQILKEHPVENTQLQNEKLYLYYLQNGRDMYVDQELDINRLSDYDVDHIVPQSFLKDDSIDNKVLTRSDKARGKSDNVPSEEVVKKMKNYWRQLLNAKLITQRKFDNLTKAERGGLSELDKAGFIKRQLVETRQITKHVAQILDSRMNTKYDENDKLIREVKVITLKSKLVSDFRKDFQFYKVREINNYHHAHDAYLNAVVGTALIKKYPKLESEFVYGDYKVYDVRKMIAKSEQEIGKATAKYFFYSNIMNFFKTEITLANGEIRKRPLIETNGETGEIVWDKGRDFATVRKVLSMPQVNIVKKTEVQTGGFSKESILPKRNSDKLIARKKDWDPKKYGGFDSPTVAYSVLVVAKVEKGKSKKLKSVKELLGITIMERSSFEKNPIDFLEAKGYKEVKKDLIIKLPKYSLFELENGRKRMLASAGELQKGNELALPSKYVNFLYLASHYEKLKGSPEDNEQKQLFVEQHKHYLDEIIEQISEFSKRVILADANLDKVLSAYNKHRDKPIREQAENIIHLFTLTNLGAPAAFKYFDTTIDRKRYTSTKEVLDATLIHQSITGLYETRIDLSQLGGDGGGGGGGGTLNIEDEYRLHETSKGPDVPLGSTWLSDFPQAWAETGGMGLAVRQAPLIIPLKATSTPVSIKQYPMSQEARLGIKPHIQRLLDQGILVPCQSPWNTPLLPVKKPGTNDYRPVQDLREVNKRVEDIHPTVPNPYNLLSGLPPSHQWYTVLDLKDAFFCLRLHPTSQSLFAFEWRDPEMGISGQLTWTRLPQGFKNSPTLFNEALHRDLADFRIQHPDLILLQYVDDLLLAATSELDCQQGTRALLQTLGDLGYRASAKKAQICQKQVKYLGYLLKEGQRWLTEARKETVMGQPTPKTPRQLREFLGKAGFCRLFIPGFAEMAAPLYPLTKPGTLFEWGPDQQKAYQEIKQALLTAPALGLPDLTKPFELFVDEKQGYAKGVLTQKLGPWRRPVAYLSKKLDPVAAGWPPCLRMVAAIAVLTKDAGKLTMGQPLVILAPHAVEALVKQPPDRWLSNARMTHYQALLLDTDRVQFGPIVALNPATLLPLPEEGLQHDCLDILAEAHGTRPDLTDQPLPDADHTWYTDGSSFLQEGQRKAGAAVTTETEVVWAKALPAGTSAQRAELIALTQALKMAEGKKLNVYTDSRYAFATAHIHGEIYRRRGWLTSEGKEIKNKDEILALLKALFLPKRLSIIHCPGHQKGNRAEARGNRMADQAAREVATRETPETSTLLAGKRTADGSEFEKRTADGSEFESPKKKAKVE

SEQ ID NO: 2603 - protein, 2096 aa, synthetic construct
  source 1..2096: note = Description of Artificial Sequence: Synthetic polypeptide
MPAAKRVKLDGGDKKYSIGLDIGTNSVGWAVITDEYKVPSKKFKVLGNTDRHSIKKNLIGALLFDSGETAEATRLKRTARRRYTRRKNRICYLQEIFSNEMAKVDDSFFHRLEESFLVEEDKKHERHPIFGNIVDEVAYHEKYPTIYHLRKKLVDSTDKADLRLIYLALAHMIKFRGHFLIEGDLNPDNSDVDKLFIQLVQTYNQLFEENPINASGVDAKAILSARLSKSRRLENLIAQLPGEKKNGLFGNLIALSLGLTPNFKSNFDLAEDAKLQLSKDTYDDDLDNLLAQIGDQYADLFLAAKNLSDAILLSDILRVNTEITKAPLSASMIKRYDEHHQDLTLLKALVRQQLPEKYKEIFFDQSKNGYAGYIDGGASQEEFYKFIKPILEKMDGTEELLVKLNREDLLRKQRTFDNGSIPHQIHLGELHAILRRQEDFYPFLKDNREKIEKILTFRIPYYVGPLARGNSRFAWMTRKSEETITPWNFEEVVDKGASAQSFIERMTNFDKNLPNEKVLPKHSLLYEYFTVYNELTKVKYVTEGMRKPAFLSGEQKKAIVDLLFKTNRKVTVKQLKEDYFKKIECFDSVEISGVEDRFNASLGTYHDLLKIIKDKDFLDNEENEDILEDIVLTLTLFEDREMIEERLKTYAHLFDDKVMKQLKRRRYTGWGRLSRKLINGIRDKQSGKTILDFLKSDGFANRNFMQLIHDDSLTFKEDIQKAQVSGQGDSLHEHIANLAGSPAIKKGILQTVKVVDELVKVMGRHKPENIVIEMARENQTTQKGQKNSRERMKRIEEGIKELGSQILKEHPVENTQLQNEKLYLYYLQNGRDMYVDQELDINRLSDYDVDHIVPQSFLKDDSIDNKVLTRSDKARGKSDNVPSEEVVKKMKNYWRQLLNAKLITQRKFDNLTKAERGGLSELDKAGFIKRQLVETRQITKHVAQILDSRMNTKYDENDKLIREVKVITLKSKLVSDFRKDFQFYKVREINNYHHAHDAYLNAVVGTALIKKYPKLESEFVYGDYKVYDVRKMIAKSEQEIGKATAKYFFYSNIMNFFKTEITLANGEIRKRPLIETNGETGEIVWDKGRDFATVRKVLSMPQVNIVKKTEVQTGGFSKESILPKRNSDKLIARKKDWDPKKYGGFDSPTVAYSVLVVAKVEKGKSKKLKSVKELLGITIMERSSFEKNPIDFLEAKGYKEVKKDLIIKLPKYSLFELENGRKRMLASAGELQKGNELALPSKYVNFLYLASHYEKLKGSPEDNEQKQLFVEQHKHYLDEIIEQISEFSKRVILADANLDKVLSAYNKHRDKPIREQAENIIHLFTLTNLGAPAAFKYFDTTIDRKRYTSTKEVLDATLIHQSITGLYETRIDLSQLGGDGGGGSGGGEAAAKGGTLNIEDEYRLHETSKGPDVPLGSTWLSDFPQAWAETGGMGLAVRQAPLIIPLKATSTPVSIKQYPMSQEARLGIKPHIQRLLDQGILVPCQSPWNTPLLPVKKPGTNDYRPVQDLREVNKRVEDIHPTVPNPYNLLSGLPPSHQWYTVLDLKDAFFCLRLHPTSQSLFAFEWRDPEMGISGQLTWTRLPQGFKNSPTLFNEALHRDLADFRIQHPDLILLQYVDDLLLAATSELDCQQGTRALLQTLGDLGYRASAKKAQICQKQVKYLGYLLKEGQRWLTEARKETVMGQPTPKTPRQLREFLGKAGFCRLFIPGFAEMAAPLYPLTKPGTLFEWGPDQQKAYQEIKQALLTAPALGLPDLTKPFELFVDEKQGYAKGVLTQKLGPWRRPVAYLSKKLDPVAAGWPPCLRMVAAIAVLTKDAGKLTMGQPLVILAPHAVEALVKQPPDRWLSNARMTHYQALLLDTDRVQFGPIVALNPATLLPLPEEGLQHDCLDILAEAHGTRPDLTDQPLPDADHTWYTDGSSFLQEGQRKAGAAVTTETEVVWAKALPAGTSAQRAELIALTQALKMAEGKKLNVYTDSRYAFATAHIHGEIYRRRGWLTSEGKEIKNKDEILALLKALFLPKRLSIIHCPGHQKGNRAEARGNRMADQAAREVATRETPETSTLLAGKRTADGSEFEKRTADGSEFESPKKKAKVE

SEQ ID NO: 2604 - protein, 2091 aa, synthetic construct
  source 1..2091: note = Description of Artificial Sequence: Synthetic polypeptide
MPAAKRVKLDGGDKKYSIGLDIGTNSVGWAVITDEYKVPSKKFKVLGNTDRHSIKKNLIGALLFDSGETAEATRLKRTARRRYTRRKNRICYLQEIFSNEMAKVDDSFFHRLEESFLVEEDKKHERHPIFGNIVDEVAYHEKYPTIYHLRKKLVDSTDKADLRLIYLALAHMIKFRGHFLIEGDLNPDNSDVDKLFIQLVQTYNQLFEENPINASGVDAKAILSARLSKSRRLENLIAQLPGEKKNGLFGNLIALSLGLTPNFKSNFDLAEDAKLQLSKDTYDDDLDNLLAQIGDQYADLFLAAKNLSDAILLSDILRVNTEITKAPLSASMIKRYDEHHQDLTLLKALVRQQLPEKYKEIFFDQSKNGYAGYIDGGASQEEFYKFIKPILEKMDGTEELLVKLNREDLLRKQRTFDNGSIPHQIHLGELHAILRRQEDFYPFLKDNREKIEKILTFRIPYYVGPLARGNSRFAWMTRKSEETITPWNFEEVVDKGASAQSFIERMTNFDKNLPNEKVLPKHSLLYEYFTVYNELTKVKYVTEGMRKPAFLSGEQKKAIVDLLFKTNRKVTVKQLKEDYFKKIECFDSVEISGVEDRFNASLGTYHDLLKIIKDKDFLDNEENEDILEDIVLTLTLFEDREMIEERLKTYAHLFDDKVMKQLKRRRYTGWGRLSRKLINGIRDKQSGKTILDFLKSDGFANRNFMQLIHDDSLTFKEDIQKAQVSGQGDSLHEHIANLAGSPAIKKGILQTVKVVDELVKVMGRHKPENIVIEMARENQTTQKGQKNSRERMKRIEEGIKELGSQILKEHPVENTQLQNEKLYLYYLQNGRDMYVDQELDINRLSDYDVDHIVPQSFLKDDSIDNKVLTRSDKARGKSDNVPSEEVVKKMKNYWRQLLNAKLITQRKFDNLTKAERGGLSELDKAGFIKRQLVETRQITKHVAQILDSRMNTKYDENDKLIREVKVITLKSKLVSDFRKDFQFYKVREINNYHHAHDAYLNAVVGTALIKKYPKLESEFVYGDYKVYDVRKMIAKSEQEIGKATAKYFFYSNIMNFFKTEITLANGEIRKRPLIETNGETGEIVWDKGRDFATVRKVLSMPQVNIVKKTEVQTGGFSKESILPKRNSDKLIARKKDWDPKKYGGFDSPTVAYSVLVVAKVEKGKSKKLKSVKELLGITIMERSSFEKNPIDFLEAKGYKEVKKDLIIKLPKYSLFELENGRKRMLASAGELQKGNELALPSKYVNFLYLASHYEKLKGSPEDNEQKQLFVEQHKHYLDEIIEQISEFSKRVILADANLDKVLSAYNKHRDKPIREQAENIIHLFTLTNLGAPAAFKYFDTTIDRKRYTSTKEVLDATLIHQSITGLYETRIDLSQLGGDGGGGSGGSGGTLNIEDEYRLHETSKGPDVPLGSTWLSDFPQAWAETGGMGLAVRQAPLIIPLKATSTPVSIKQYPMSQEARLGIKPHIQRLLDQGILVPCQSPWNTPLLPVKKPGTNDYRPVQDLREVNKRVEDIHPTVPNPYNLLSGLPPSHQWYTVLDLKDAFFCLRLHPTSQSLFAFEWRDPEMGISGQLTWTRLPQGFKNSPTLFNEALHRDLADFRIQHPDLILLQYVDDLLLAATSELDCQQGTRALLQTLGDLGYRASAKKAQICQKQVKYLGYLLKEGQRWLTEARKETVMGQPTPKTPRQLREFLGKAGFCRLFIPGFAEMAAPLYPLTKPGTLFEWGPDQQKAYQEIKQALLTAPALGLPDLTKPFELFVDEKQGYAKGVLTQKLGPWRRPVAYLSKKLDPVAAGWPPCLRMVAAIAVLTKDAGKLTMGQPLVILAPHAVEALVKQPPDRWLSNARMTHYQALLLDTDRVQFGPIVALNPATLLPLPEEGLQHDCLDILAEAHGTRPDLTDQPLPDADHTWYTDGSSFLQEGQRKAGAAVTTETEVVWAKALPAGTSAQRAELIALTQALKMAEGKKLNVYTDSRYAFATAHIHGEIYRRRGWLTSEGKEIKNKDEILALLKALFLPKRLSIIHCPGHQKGNRAEARGNRMADQAAREVATRETPETSTLLAGKRTADGSEFEKRTADGSEFESPKKKAKVE

SEQ ID NO: 2605 - protein, 2094 aa, synthetic construct
  source 1..2094: note = Description of Artificial Sequence: Synthetic polypeptide
MPAAKRVKLDGGDKKYSIGLDIGTNSVGWAVITDEYKVPSKKFKVLGNTDRHSIKKNLIGALLFDSGETAEATRLKRTARRRYTRRKNRICYLQEIFSNEMAKVDDSFFHRLEESFLVEEDKKHERHPIFGNIVDEVAYHEKYPTIYHLRKKLVDSTDKADLRLIYLALAHMIKFRGHFLIEGDLNPDNSDVDKLFIQLVQTYNQLFEENPINASGVDAKAILSARLSKSRRLENLIAQLPGEKKNGLFGNLIALSLGLTPNFKSNFDLAEDAKLQLSKDTYDDDLDNLLAQIGDQYADLFLAAKNLSDAILLSDILRVNTEITKAPLSASMIKRYDEHHQDLTLLKALVRQQLPEKYKEIFFDQSKNGYAGYIDGGASQEEFYKFIKPILEKMDGTEELLVKLNREDLLRKQRTFDNGSIPHQIHLGELHAILRRQEDFYPFLKDNREKIEKILTFRIPYYVGPLARGNSRFAWMTRKSEETITPWNFEEVVDKGASAQSFIERMTNFDKNLPNEKVLPKHSLLYEYFTVYNELTKVKYVTEGMRKPAFLSGEQKKAIVDLLFKTNRKVTVKQLKEDYFKKIECFDSVEISGVEDRFNASLGTYHDLLKIIKDKDFLDNEENEDILEDIVLTLTLFEDREMIEERLKTYAHLFDDKVMKQLKRRRYTGWGRLSRKLINGIRDKQSGKTILDFLKSDGFANRNFMQLIHDDSLTFKEDIQKAQVSGQGDSLHEHIANLAGSPAIKKGILQTVKVVDELVKVMGRHKPENIVIEMARENQTTQKGQKNSRERMKRIEEGIKELGSQILKEHPVENTQLQNEKLYLYYLQNGRDMYVDQELDINRLSDYDVDHIVPQSFLKDDSIDNKVLTRSDKARGKSDNVPSEEVVKKMKNYWRQLLNAKLITQRKFDNLTKAERGGLSELDKAGFIKRQLVETRQITKHVAQILDSRMNTKYDENDKLIREVKVITLKSKLVSDFRKDFQFYKVREINNYHHAHDAYLNAVVGTALIKKYPKLESEFVYGDYKVYDVRKMIAKSEQEIGKATAKYFFYSNIMNFFKTEITLANGEIRKRPLIETNGETGEIVWDKGRDFATVRKVLSMPQVNIVKKTEVQTGGFSKESILPKRNSDKLIARKKDWDPKKYGGFDSPTVAYSVLVVAKVEKGKSKKLKSVKELLGITIMERSSFEKNPIDFLEAKGYKEVKKDLIIKLPKYSLFELENGRKRMLASAGELQKGNELALPSKYVNFLYLASHYEKLKGSPEDNEQKQLFVEQHKHYLDEIIEQISEFSKRVILADANLDKVLSAYNKHRDKPIREQAENIIHLFTLTNLGAPAAFKYFDTTIDRKRYTSTKEVLDATLIHQSITGLYETRIDLSQLGGDGGGGGGGSGSSGGTLNIEDEYRLHETSKGPDVPLGSTWLSDFPQAWAETGGMGLAVRQAPLIIPLKATSTPVSIKQYPMSQEARLGIKPHIQRLLDQGILVPCQSPWNTPLLPVKKPGTNDYRPVQDLREVNKRVEDIHPTVPNPYNLLSGLPPSHQWYTVLDLKDAFFCLRLHPTSQSLFAFEWRDPEMGISGQLTWTRLPQGFKNSPTLFNEALHRDLADFRIQHPDLILLQYVDDLLLAATSELDCQQGTRALLQTLGDLGYRASAKKAQICQKQVKYLGYLLKEGQRWLTEARKETVMGQPTPKTPRQLREFLGKAGFCRLFIPGFAEMAAPLYPLTKPGTLFEWGPDQQKAYQEIKQALLTAPALGLPDLTKPFELFVDEKQGYAKGVLTQKLGPWRRPVAYLSKKLDPVAAGWPPCLRMVAAIAVLTKDAGKLTMGQPLVILAPHAVEALVKQPPDRWLSNARMTHYQALLLDTDRVQFGPIVALNPATLLPLPEEGLQHDCLDILAEAHGTRPDLTDQPLPDADHTWYTDGSSFLQEGQRKAGAAVTTETEVVWAKALPAGTSAQRAELIALTQALKMAEGKKLNVYTDSRYAFATAHIHGEIYRRRGWLTSEGKEIKNKDEILALLKALFLPKRLSIIHCPGHQKGNRAEARGNRMADQAAREVATRETPETSTLLAGKRTADGSEFEKRTADGSEFESPKKKAKVE

SEQ ID NO: 2606 - protein, 2091 aa, synthetic construct
  source 1..2091: note = Description of Artificial Sequence: Synthetic polypeptide
MPAAKRVKLDGGDKKYSIGLDIGTNSVGWAVITDEYKVPSKKFKVLGNTDRHSIKKNLIGALLFDSGETAEATRLKRTARRRYTRRKNRICYLQEIFSNEMAKVDDSFFHRLEESFLVEEDKKHERHPIFGNIVDEVAYHEKYPTIYHLRKKLVDSTDKADLRLIYLALAHMIKFRGHFLIEGDLNPDNSDVDKLFIQLVQTYNQLFEENPINASGVDAKAILSARLSKSRRLENLIAQLPGEKKNGLFGNLIALSLGLTPNFKSNFDLAEDAKLQLSKDTYDDDLDNLLAQIGDQYADLFLAAKNLSDAILLSDILRVNTEITKAPLSASMIKRYDEHHQDLTLLKALVRQQLPEKYKEIFFDQSKNGYAGYIDGGASQEEFYKFIKPILEKMDGTEELLVKLNREDLLRKQRTFDNGSIPHQIHLGELHAILRRQEDFYPFLKDNREKIEKILTFRIPYYVGPLARGNSRFAWMTRKSEETITPWNFEEVVDKGASAQSFIERMTNFDKNLPNEKVLPKHSLLYEYFTVYNELTKVKYVTEGMRKPAFLSGEQKKAIVDLLFKTNRKVTVKQLKEDYFKKIECFDSVEISGVEDRFNASLGTYHDLLKIIKDKDFLDNEENEDILEDIVLTLTLFEDREMIEERLKTYAHLFDDKVMKQLKRRRYTGWGRLSRKLINGIRDKQSGKTILDFLKSDGFANRNFMQLIHDDSLTFKEDIQKAQVSGQGDSLHEHIANLAGSPAIKKGILQTVKVVDELVKVMGRHKPENIVIEMARENQTTQKGQKNSRERMKRIEEGIKELGSQILKEHPVENTQLQNEKLYLYYLQNGRDMYVDQELDINRLSDYDVDHIVPQSFLKDDSIDNKVLTRSDKARGKSDNVPSEEVVKKMKNYWRQLLNAKLITQRKFDNLTKAERGGLSELDKAGFIKRQLVETRQITKHVAQILDSRMNTKYDENDKLIREVKVITLKSKLVSDFRKDFQFYKVREINNYHHAHDAYLNAVVGTALIKKYPKLESEFVYGDYKVYDVRKMIAKSEQEIGKATAKYFFYSNIMNFFKTEITLANGEIRKRPLIETNGETGEIVWDKGRDFATVRKVLSMPQVNIVKKTEVQTGGFSKESILPKRNSDKLIARKKDWDPKKYGGFDSPTVAYSVLVVAKVEKGKSKKLKSVKELLGITIMERSSFEKNPIDFLEAKGYKEVKKDLIIKLPKYSLFELENGRKRMLASAGELQKGNELALPSKYVNFLYLASHYEKLKGSPEDNEQKQLFVEQHKHYLDEIIEQISEFSKRVILADANLDKVLSAYNKHRDKPIREQAENIIHLFTLTNLGAPAAFKYFDTTIDRKRYTSTKEVLDATLIHQSITGLYETRIDLSQLGGDGGPAPGSSGGTLNIEDEYRLHETSKGPDVPLGSTWLSDFPQAWAETGGMGLAVRQAPLIIPLKATSTPVSIKQYPMSQEARLGIKPHIQRLLDQGILVPCQSPWNTPLLPVKKPGTNDYRPVQDLREVNKRVEDIHPTVPNPYNLLSGLPPSHQWYTVLDLKDAFFCLRLHPTSQSLFAFEWRDPEMGISGQLTWTRLPQGFKNSPTLFNEALHRDLADFRIQHPDLILLQYVDDLLLAATSELDCQQGTRALLQTLGDLGYRASAKKAQICQKQVKYLGYLLKEGQRWLTEARKETVMGQPTPKTPRQLREFLGKAGFCRLFIPGFAEMAAPLYPLTKPGTLFEWGPDQQKAYQEIKQALLTAPALGLPDLTKPFELFVDEKQGYAKGVLTQKLGPWRRPVAYLSKKLDPVAAGWPPCLRMVAAIAVLTKDAGKLTMGQPLVILAPHAVEALVKQPPDRWLSNARMTHYQALLLDTDRVQFGPIVALNPATLLPLPEEGLQHDCLDILAEAHGTRPDLTDQPLPDADHTWYTDGSSFLQEGQRKAGAAVTTETEVVWAKALPAGTSAQRAELIALTQALKMAEGKKLNVYTDSRYAFATAHIHGEIYRRRGWLTSEGKEIKNKDEILALLKALFLPKRLSIIHCPGHQKGNRAEARGNRMADQAAREVATRETPETSTLLAGKRTADGSEFEKRTADGSEFESPKKKAKVE

SEQ ID NO: 2607 - protein, 2093 aa, synthetic construct
  source 1..2093: note = Description of Artificial Sequence: Synthetic polypeptide
MPAAKRVKLDGGDKKYSIGLDIGTNSVGWAVITDEYKVPSKKFKVLGNTDRHSIKKNLIGALLFDSGETAEATRLKRTARRRYTRRKNRICYLQEIFSNEMAKVDDSFFHRLEESFLVEEDKKHERHPIFGNIVDEVAYHEKYPTIYHLRKKLVDSTDKADLRLIYLALAHMIKFRGHFLIEGDLNPDNSDVDKLFIQLVQTYNQLFEENPINASGVDAKAILSARLSKSRRLENLIAQLPGEKKNGLFGNLIALSLGLTPNFKSNFDLAEDAKLQLSKDTYDDDLDNLLAQIGDQYADLFLAAKNLSDAILLSDILRVNTEITKAPLSASMIKRYDEHHQDLTLLKALVRQQLPEKYKEIFFDQSKNGYAGYIDGGASQEEFYKFIKPILEKMDGTEELLVKLNREDLLRKQRTFDNGSIPHQIHLGELHAILRRQEDFYPFLKDNREKIEKILTFRIPYYVGPLARGNSRFAWMTRKSEETITPWNFEEVVDKGASAQSFIERMTNFDKNLPNEKVLPKHSLLYEYFTVYNELTKVKYVTEGMRKPAFLSGEQKKAIVDLLFKTNRKVTVKQLKEDYFKKIECFDSVEISGVEDRFNASLGTYHDLLKIIKDKDFLDNEENEDILEDIVLTLTLFEDREMIEERLKTYAHLFDDKVMKQLKRRRYTGWGRLSRKLINGIRDKQSGKTILDFLKSDGFANRNFMQLIHDDSLTFKEDIQKAQVSGQGDSLHEHIANLAGSPAIKKGILQTVKVVDELVKVMGRHKPENIVIEMARENQTTQKGQKNSRERMKRIEEGIKELGSQILKEHPVENTQLQNEKLYLYYLQNGRDMYVDQELDINRLSDYDVDHIVPQSFLKDDSIDNKVLTRSDKARGKSDNVPSEEVVKKMKNYWRQLLNAKLITQRKFDNLTKAERGGLSELDKAGFIKRQLVETRQITKHVAQILDSRMNTKYDENDKLIREVKVITLKSKLVSDFRKDFQFYKVREINNYHHAHDAYLNAVVGTALIKKYPKLESEFVYGDYKVYDVRKMIAKSEQEIGKATAKYFFYSNIMNFFKTEITLANGEIRKRPLIETNGETGEIVWDKGRDFATVRKVLSMPQVNIVKKTEVQTGGFSKESILPKRNSDKLIARKKDWDPKKYGGFDSPTVAYSVLVVAKVEKGKSKKLKSVKELLGITIMERSSFEKNPIDFLEAKGYKEVKKDLIIKLPKYSLFELENGRKRMLASAGELQKGNELALPSKYVNFLYLASHYEKLKGSPEDNEQKQLFVEQHKHYLDEIIEQISEFSKRVILADANLDKVLSAYNKHRDKPIREQAENIIHLFTLTNLGAPAAFKYFDTTIDRKRYTSTKEVLDATLIHQSITGLYETRIDLSQLGGDGGGGGEAAAKGGTLNIEDEYRLHETSKGPDVPLGSTWLSDFPQAWAETGGMGLAVRQAPLIIPLKATSTPVSIKQYPMSQEARLGIKPHIQRLLDQGILVPCQSPWNTPLLPVKKPGTNDYRPVQDLREVNKRVEDIHPTVPNPYNLLSGLPPSHQWYTVLDLKDAFFCLRLHPTSQSLFAFEWRDPEMGISGQLTWTRLPQGFKNSPTLFNEALHRDLADFRIQHPDLILLQYVDDLLLAATSELDCQQGTRALLQTLGDLGYRASAKKAQICQKQVKYLGYLLKEGQRWLTEARKETVMGQPTPKTPRQLREFLGKAGFCRLFIPGFAEMAAPLYPLTKPGTLFEWGPDQQKAYQEIKQALLTAPALGLPDLTKPFELFVDEKQGYAKGVLTQKLGPWRRPVAYLSKKLDPVAAGWPPCLRMVAAIAVLTKDAGKLTMGQPLVILAPHAVEALVKQPPDRWLSNARMTHYQALLLDTDRVQFGPIVALNPATLLPLPEEGLQHDCLDILAEAHGTRPDLTDQPLPDADHTWYTDGSSFLQEGQRKAGAAVTTETEVVWAKALPAGTSAQRAELIALTQALKMAEGKKLNVYTDSRYAFATAHIHGEIYRRRGWLTSEGKEIKNKDEILALLKALFLPKRLSIIHCPGHQKGNRAEARGNRMADQAAREVATRETPETSTLLAGKRTADGSEFEKRTADGSEFESPKKKAKVE

SEQ ID NO: 2608 - protein, 2096 aa, synthetic construct
  source 1..2096: note = Description of Artificial Sequence: Synthetic polypeptide
MPAAKRVKLDGGDKKYSIGLDIGTNSVGWAVITDEYKVPSKKFKVLGNTDRHSIKKNLIGALLFDSGETAEATRLKRTARRRYTRRKNRICYLQEIFSNEMAKVDDSFFHRLEESFLVEEDKKHERHPIFGNIVDEVAYHEKYPTIYHLRKKLVDSTDKADLRLIYLALAHMIKFRGHFLIEGDLNPDNSDVDKLFIQLVQTYNQLFEENPINASGVDAKAILSARLSKSRRLENLIAQLPGEKKNGLFGNLIALSLGLTPNFKSNFDLAEDAKLQLSKDTYDDDLDNLLAQIGDQYADLFLAAKNLSDAILLSDILRVNTEITKAPLSASMIKRYDEHHQDLTLLKALVRQQLPEKYKEIFFDQSKNGYAGYIDGGASQEEFYKFIKPILEKMDGTEELLVKLNREDLLRKQRTFDNGSIPHQIHLGELHAILRRQEDFYPFLKDNREKIEKILTFRIPYYVGPLARGNSRFAWMTRKSEETITPWNFEEVVDKGASAQSFIERMTNFDKNLPNEKVLPKHSLLYEYFTVYNELTKVKYVTEGMRKPAFLSGEQKKAIVDLLFKTNRKVTVKQLKEDYFKKIECFDSVEISGVEDRFNASLGTYHDLLKIIKDKDFLDNEENEDILEDIVLTLTLFEDREMIEERLKTYAHLFDDKVMKQLKRRRYTGWGRLSRKLINGIRDKQSGKTILDFLKSDGFANRNFMQLIHDDSLTFKEDIQKAQVSGQGDSLHEHIANLAGSPAIKKGILQTVKVVDELVKVMGRHKPENIVIEMARENQTTQKGQKNSRERMKRIEEGIKELGSQILKEHPVENTQLQNEKLYLYYLQNGRDMYVDQELDINRLSDYDVDHIVPQSFLKDDSIDNKVLTRSDKARGKSDNVPSEEVVKKMKNYWRQLLNAKLITQRKFDNLTKAERGGLSELDKAGFIKRQLVETRQITKHVAQILDSRMNTKYDENDKLIREVKVITLKSKLVSDFRKDFQFYKVREINNYHHAHDAYLNAVVGTALIKKYPKLESEFVYGDYKVYDVRKMIAKSEQEIGKATAKYFFYSNIMNFFKTEITLANGEIRKRPLIETNGETGEIVWDKGRDFATVRKVLSMPQVNIVKKTEVQTGGFSKESILPKRNSDKLIARKKDWDPKKYGGFDSPTVAYSVLVVAKVEKGKSKKLKSVKELLGITIMERSSFEKNPIDFLEAKGYKEVKKDLIIKLPKYSLFELENGRKRMLASAGELQKGNELALPSKYVNFLYLASHYEKLKGSPEDNEQKQLFVEQHKHYLDEIIEQISEFSKRVILADANLDKVLSAYNKHRDKPIREQAENIIHLFTLTNLGAPAAFKYFDTTIDRKRYTSTKEVLDATLIHQSITGLYETRIDLSQLGGDGGGGSEAAAKGSSGGTLNIEDEYRLHETSKGPDVPLGSTWLSDFPQAWAETGGMGLAVRQAPLIIPLKATSTPVSIKQYPMSQEARLGIKPHIQRLLDQGILVPCQSPWNTPLLPVKKPGTNDYRPVQDLREVNKRVEDIHPTVPNPYNLLSGLPPSHQWYTVLDLKDAFFCLRLHPTSQSLFAFEWRDPEMGISGQLTWTRLPQGFKNSPTLFNEALHRDLADFRIQHPDLILLQYVDDLLLAATSELDCQQGTRALLQTLGDLGYRASAKKAQICQKQVKYLGYLLKEGQRWLTEARKETVMGQPTPKTPRQLREFLGKAGFCRLFIPGFAEMAAPLYPLTKPGTLFEWGPDQQKAYQEIKQALLTAPALGLPDLTKPFELFVDEKQGYAKGVLTQKLGPWRRPVAYLSKKLDPVAAGWPPCLRMVAAIAVLTKDAGKLTMGQPLVILAPHAVEALVKQPPDRWLSNARMTHYQALLLDTDRVQFGPIVALNPATLLPLPEEGLQHDCLDILAEAHGTRPDLTDQPLPDADHTWYTDGSSFLQEGQRKAGAAVTTETEVVWAKALPAGTSAQRAELIALTQALKMAEGKKLNVYTDSRYAFATAHIHGEIYRRRGWLTSEGKEIKNKDEILALLKALFLPKRLSIIHCPGHQKGNRAEARGNRMADQAAREVATRETPETSTLLAGKRTADGSEFEKRTADGSEFESPKKKAKVE

SEQ ID NO: 2609 - protein, 2118 aa, synthetic construct
  source 1..2118: note = Description of Artificial Sequence: Synthetic polypeptide
MPAAKRVKLDGGDKKYSIGLDIGTNSVGWAVITDEYKVPSKKFKVLGNTDRHSIKKNLIGALLFDSGETAEATRLKRTARRRYTRRKNRICYLQEIFSNEMAKVDDSFFHRLEESFLVEEDKKHERHPIFGNIVDEVAYHEKYPTIYHLRKKLVDSTDKADLRLIYLALAHMIKFRGHFLIEGDLNPDNSDVDKLFIQLVQTYNQLFEENPINASGVDAKAILSARLSKSRRLENLIAQLPGEKKNGLFGNLIALSLGLTPNFKSNFDLAEDAKLQLSKDTYDDDLDNLLAQIGDQYADLFLAAKNLSDAILLSDILRVNTEITKAPLSASMIKRYDEHHQDLTLLKALVRQQLPEKYKEIFFDQSKNGYAGYIDGGASQEEFYKFIKPILEKMDGTEELLVKLNREDLLRKQRTFDNGSIPHQIHLGELHAILRRQEDFYPFLKDNREKIEKILTFRIPYYVGPLARGNSRFAWMTRKSEETITPWNFEEVVDKGASAQSFIERMTNFDKNLPNEKVLPKHSLLYEYFTVYNELTKVKYVTEGMRKPAFLSGEQKKAIVDLLFKTNRKVTVKQLKEDYFKKIECFDSVEISGVEDRFNASLGTYHDLLKIIKDKDFLDNEENEDILEDIVLTLTLFEDREMIEERLKTYAHLFDDKVMKQLKRRRYTGWGRLSRKLINGIRDKQSGKTILDFLKSDGFANRNFMQLIHDDSLTFKEDIQKAQVSGQGDSLHEHIANLAGSPAIKKGILQTVKVVDELVKVMGRHKPENIVIEMARENQTTQKGQKNSRERMKRIEEGIKELGSQILKEHPVENTQLQNEKLYLYYLQNGRDMYVDQELDINRLSDYDVDHIVPQSFLKDDSIDNKVLTRSDKARGKSDNVPSEEVVKKMKNYWRQLLNAKLITQRKFDNLTKAERGGLSELDKAGFIKRQLVETRQITKHVAQILDSRMNTKYDENDKLIREVKVITLKSKLVSDFRKDFQFYKVREINNYHHAHDAYLNAVVGTALIKKYPKLESEFVYGDYKVYDVRKMIAKSEQEIGKATAKYFFYSNIMNFFKTEITLANGEIRKRPLIETNGETGEIVWDKGRDFATVRKVLSMPQVNIVKKTEVQTGGFSKESILPKRNSDKLIARKKDWDPKKYGGFDSPTVAYSVLVVAKVEKGKSKKLKSVKELLGITIMERSSFEKNPIDFLEAKGYKEVKKDLIIKLPKYSLFELENGRKRMLASAGELQKGNELALPSKYVNFLYLASHYEKLKGSPEDNEQKQLFVEQHKHYLDEIIEQISEFSKRVILADANLDKVLSAYNKHRDKPIREQAENIIHLFTLTNLGAPAAFKYFDTTIDRKRYTSTKEVLDATLIHQSITGLYETRIDLSQLGGDGGSGGSSGGSSGSETPGTSESATPESSGGSSGGSSGGTLNIEDEYRLHETSKGPDVPLGSTWLSDFPQAWAETGGMGLAVRQAPLIIPLKATSTPVSIKQYPMSQEARLGIKPHIQRLLDQGILVPCQSPWNTPLLPVKKPGTNDYRPVQDLREVNKRVEDIHPTVPNPYNLLSGLPPSHQWYTVLDLKDAFFCLRLHPTSQSLFAFEWRDPEMGISGQLTWTRLPQGFKNSPTLFNEALHRDLADFRIQHPDLILLQYVDDLLLAATSELDCQQGTRALLQTLGDLGYRASAKKAQICQKQVKYLGYLLKEGQRWLTEARKETVMGQPTPKTPRQLREFLGKAGFCRLFIPGFAEMAAPLYPLTKPGTLFEWGPDQQKAYQEIKQALLTAPALGLPDLTKPFELFVDEKQGYAKGVLTQKLGPWRRPVAYLSKKLDPVAAGWPPCLRMVAAIAVLTKDAGKLTMGQPLVILAPHAVEALVKQPPDRWLSNARMTHYQALLLDTDRVQFGPIVALNPATLLPLPEEGLQHDCLDILAEAHGTRPDLTDQPLPDADHTWYTDGSSFLQEGQRKAGAAVTTETEVVWAKALPAGTSAQRAELIALTQALKMAEGKKLNVYTDSRYAFATAHIHGEIYRRRGWLTSEGKEIKNKDEILALLKALFLPKRLSIIHCPGHQKGNRAEARGNRMADQAAREVATRETPETSTLLAGKRTADGSEFEKRTADGSEFESPKKKAKVE

SEQ ID NO: 2610 - protein, 2125 aa, synthetic construct
  source 1..2125: note = Description of Artificial Sequence: Synthetic polypeptide
MPAAKRVKLDGGDKKYSIGLDIGTNSVGWAVITDEYKVPSKKFKVLGNTDRHSIKKNLIGALLFDSGETAEATRLKRTARRRYTRRKNRICYLQEIFSNEMAKVDDSFFHRLEESFLVEEDKKHERHPIFGNIVDEVAYHEKYPTIYHLRKKLVDSTDKADLRLIYLALAHMIKFRGHFLIEGDLNPDNSDVDKLFIQLVQTYNQLFEENPINASGVDAKAILSARLSKSRRLENLIAQLPGEKKNGLFGNLIALSLGLTPNFKSNFDLAEDAKLQLSKDTYDDDLDNLLAQIGDQYADLFLAAKNLSDAILLSDILRVNTEITKAPLSASMIKRYDEHHQDLTLLKALVRQQLPEKYKEIFFDQSKNGYAGYIDGGASQEEFYKFIKPILEKMDGTEELLVKLNREDLLRKQRTFDNGSIPHQIHLGELHAILRRQEDFYPFLKDNREKIEKILTFRIPYYVGPLARGNSRFAWMTRKSEETITPWNFEEVVDKGASAQSFIERMTNFDKNLPNEKVLPKHSLLYEYFTVYNELTKVKYVTEGMRKPAFLSGEQKKAIVDLLFKTNRKVTVKQLKEDYFKKIECFDSVEISGVEDRFNASLGTYHDLLKIIKDKDFLDNEENEDILEDIVLTLTLFEDREMIEERLKTYAHLFDDKVMKQLKRRRYTGWGRLSRKLINGIRDKQSGKTILDFLKSDGFANRNFMQLIHDDSLTFKEDIQKAQVSGQGDSLHEHIANLAGSPAIKKGILQTVKVVDELVKVMGRHKPENIVIEMARENQTTQKGQKNSRERMKRIEEGIKELGSQILKEHPVENTQLQNEKLYLYYLQNGRDMYVDQELDINRLSDYDVDHIVPQSFLKDDSIDNKVLTRSDKARGKSDNVPSEEVVKKMKNYWRQLLNAKLITQRKFDNLTKAERGGLSELDKAGFIKRQLVETRQITKHVAQILDSRMNTKYDENDKLIREVKVITLKSKLVSDFRKDFQFYKVREINNYHHAHDAYLNAVVGTALIKKYPKLESEFVYGDYKVYDVRKMIAKSEQEIGKATAKYFFYSNIMNFFKTEITLANGEIRKRPLIETNGETGEIVWDKGRDFATVRKVLSMPQVNIVKKTEVQTGGFSKESILPKRNSDKLIARKKDWDPKKYGGFDSPTVAYSVLVVAKVEKGKSKKLKSVKELLGITIMERSSFEKNPIDFLEAKGYKEVKKDLIIKLPKYSLFELENGRKRMLASAGELQKGNELALPSKYVNFLYLASHYEKLKGSPEDNEQKQLFVEQHKHYLDEIIEQISEFSKRVILADANLDKVLSAYNKHRDKPIREQAENIIHLFTLTNLGAPAAFKYFDTTIDRKRYTSTKEVLDATLIHQSITGLYETRIDLSQLGGDGGEAAAKEAAAKEAAAKEAAAKGGTLNIEDEYRLHETSKEPDVSLGSTWLSDFPQAWAETGGMGLAVRQAPLIIPLKATSTPVSIKQYPMSQEARLGIKPHIQRLLDQGILVPCQSPWNTPLLPVKKPGTNDYRPVQDLREVNKRVEDIHPTVPNPYNLLSGLPPSHQWYTVLDLKDAFFCLRLHPTSQPLFAFEWRDPEMGISGQLTWTRLPQGFKNSPTLFNEALHRDLADFRIQHPDLILLQYVDDLLLAATSELDCQQGTRALLQTLGNLGYRASAKKAQICQKQVKYLGYLLKEGQRWLTEARKETVMGQPTPKTPRQLREFLGKAGFCRLFIPGFAEMAAPLYPLTKPGTLFNWGPDQQKAYQEIKQALLTAPALGLPDLTKPFELFVDEKQGYAKGVLTQKLGPWRRPVAYLSKKLDPVAAGWPPCLRMVAAIAVLTKDAGKLTMGQPLVILAPHAVEALVKQPPDRWLSNARMTHYQALLLDTDRVQFGPVVALNPATLLPLPEEGLQHNCLDILAEAHGTRPDLTDQPLPDADHTWYTDGSSLLQEGQRKAGAAVTTETEVIWAKALPAGTSAQRAELIALTQALKMAEGKKLNVYTDSRYAFATAHIHGEIYRRRGWLTSEGKEIKNKDEILALLKALFLPKRLSIIHCPGHQKGHSAEARGNRMADQAARKAAITETPDTSTLLIENSSPSGGSKRTADGSEFEAGKRTADGSEFEKRTADGSEFESPKKKAKVE

SEQ ID NO: 2611 - protein, 2151 aa, synthetic construct
  source 1..2151: note = Description of Artificial Sequence: Synthetic polypeptide
MPAAKRVKLDGGDKKYSIGLDIGTNSVGWAVITDEYKVPSKKFKVLGNTDRHSIKKNLIGALLFDSGETAEATRLKRTARRRYTRRKNRICYLQEIFSNEMAKVDDSFFHRLEESFLVEEDKKHERHPIFGNIVDEVAYHEKYPTIYHLRKKLVDSTDKADLRLIYLALAHMIKFRGHFLIEGDLNPDNSDVDKLFIQLVQTYNQLFEENPINASGVDAKAILSARLSKSRRLENLIAQLPGEKKNGLFGNLIALSLGLTPNFKSNFDLAEDAKLQLSKDTYDDDLDNLLAQIGDQYADLFLAAKNLSDAILLSDILRVNTEITKAPLSASMIKRYDEHHQDLTLLKALVRQQLPEKYKEIFFDQSKNGYAGYIDGGASQEEFYKFIKPILEKMDGTEELLVKLNREDLLRKQRTFDNGSIPHQIHLGELHAILRRQEDFYPFLKDNREKIEKILTFRIPYYVGPLARGNSRFAWMTRKSEETITPWNFEEVVDKGASAQSFIERMTNFDKNLPNEKVLPKHSLLYEYFTVYNELTKVKYVTEGMRKPAFLSGEQKKAIVDLLFKTNRKVTVKQLKEDYFKKIECFDSVEISGVEDRFNASLGTYHDLLKIIKDKDFLDNEENEDILEDIVLTLTLFEDREMIEERLKTYAHLFDDKVMKQLKRRRYTGWGRLSRKLINGIRDKQSGKTILDFLKSDGFANRNFMQLIHDDSLTFKEDIQKAQVSGQGDSLHEHIANLAGSPAIKKGILQTVKVVDELVKVMGRHKPENIVIEMARENQTTQKGQKNSRERMKRIEEGIKELGSQILKEHPVENTQLQNEKLYLYYLQNGRDMYVDQELDINRLSDYDVDHIVPQSFLKDDSIDNKVLTRSDKARGKSDNVPSEEVVKKMKNYWRQLLNAKLITQRKFDNLTKAERGGLSELDKAGFIKRQLVETRQITKHVAQILDSRMNTKYDENDKLIREVKVITLKSKLVSDFRKDFQFYKVREINNYHHAHDAYLNAVVGTALIKKYPKLESEFVYGDYKVYDVRKMIAKSEQEIGKATAKYFFYSNIMNFFKTEITLANGEIRKRPLIETNGETGEIVWDKGRDFATVRKVLSMPQVNIVKKTEVQTGGFSKESILPKRNSDKLIARKKDWDPKKYGGFDSPTVAYSVLVVAKVEKGKSKKLKSVKELLGITIMERSSFEKNPIDFLEAKGYKEVKKDLIIKLPKYSLFELENGRKRMLASAGELQKGNELALPSKYVNFLYLASHYEKLKGSPEDNEQKQLFVEQHKHYLDEIIEQISEFSKRVILADANLDKVLSAYNKHRDKPIREQAENIIHLFTLTNLGAPAAFKYFDTTIDRKRYTSTKEVLDATLIHQSITGLYETRIDLSQLGGDGGAEAAAKEAAAKEAAAKEAAAKALEAEAAAKEAAAKEAAAKEAAAKAGGTLNIEDEYRLHETSKEPDVSLGSTWLSDFPQAWAETGGMGLAVRQAPLIIPLKATSTPVSIKQYPMSQEARLGIKPHIQRLLDQGILVPCQSPWNTPLLPVKKPGTNDYRPVQDLREVNKRVEDIHPTVPNPYNLLSGLPPSHQWYTVLDLKDAFFCLRLHPTSQPLFAFEWRDPEMGISGQLTWTRLPQGFKNSPTLFNEALHRDLADFRIQHPDLILLQYVDDLLLAATSELDCQQGTRALLQTLGNLGYRASAKKAQICQKQVKYLGYLLKEGQRWLTEARKETVMGQPTPKTPRQLREFLGKAGFCRLFIPGFAEMAAPLYPLTKPGTLFNWGPDQQKAYQEIKQALLTAPALGLPDLTKPFELFVDEKQGYAKGVLTQKLGPWRRPVAYLSKKLDPVAAGWPPCLRMVAAIAVLTKDAGKLTMGQPLVILAPHAVEALVKQPPDRWLSNARMTHYQALLLDTDRVQFGPVVALNPATLLPLPEEGLQHNCLDILAEAHGTRPDLTDQPLPDADHTWYTDGSSLLQEGQRKAGAAVTTETEVIWAKALPAGTSAQRAELIALTQALKMAEGKKLNVYTDSRYAFATAHIHGEIYRRRGWLTSEGKEIKNKDEILALLKALFLPKRLSIIHCPGHQKGHSAEARGNRMADQAARKAAITETPDTSTLLIENSSPSGGSKRTADGSEFEAGKRTADGSEFEKRTADGSEFESPKKKAKVE

SEQ ID NO: 2612 - protein, 2123 aa, synthetic construct
  source 1..2123: note = Description of Artificial Sequence: Synthetic polypeptide
MPAAKRVKLDGGDKKYSIGLDIGTNSVGWAVITDEYKVPSKKFKVLGNTDRHSIKKNLIGALLFDSGETAEATRLKRTARRRYTRRKNRICYLQEIFSNEMAKVDDSFFHRLEESFLVEEDKKHERHPIFGNIVDEVAYHEKYPTIYHLRKKLVDSTDKADLRLIYLALAHMIKFRGHFLIEGDLNPDNSDVDKLFIQLVQTYNQLFEENPINASGVDAKAILSARLSKSRRLENLIAQLPGEKKNGLFGNLIALSLGLTPNFKSNFDLAEDAKLQLSKDTYDDDLDNLLAQIGDQYADLFLAAKNLSDAILLSDILRVNTEITKAPLSASMIKRYDEHHQDLTLLKALVRQQLPEKYKEIFFDQSKNGYAGYIDGGASQEEFYKFIKPILEKMDGTEELLVKLNREDLLRKQRTFDNGSIPHQIHLGELHAILRRQEDFYPFLKDNREKIEKILTFRIPYYVGPLARGNSRFAWMTRKSEETITPWNFEEVVDKGASAQSFIERMTNFDKNLPNEKVLPKHSLLYEYFTVYNELTKVKYVTEGMRKPAFLSGEQKKAIVDLLFKTNRKVTVKQLKEDYFKKIECFDSVEISGVEDRFNASLGTYHDLLKIIKDKDFLDNEENEDILEDIVLTLTLFEDREMIEERLKTYAHLFDDKVMKQLKRRRYTGWGRLSRKLINGIRDKQSGKTILDFLKSDGFANRNFMQLIHDDSLTFKEDIQKAQVSGQGDSLHEHIANLAGSPAIKKGILQTVKVVDELVKVMGRHKPENIVIEMARENQTTQKGQKNSRERMKRIEEGIKELGSQILKEHPVENTQLQNEKLYLYYLQNGRDMYVDQELDINRLSDYDVDHIVPQSFLKDDSIDNKVLTRSDKARGKSDNVPSEEVVKKMKNYWRQLLNAKLITQRKFDNLTKAERGGLSELDKAGFIKRQLVETRQITKHVAQILDSRMNTKYDENDKLIREVKVITLKSKLVSDFRKDFQFYKVREINNYHHAHDAYLNAVVGTALIKKYPKLESEFVYGDYKVYDVRKMIAKSEQEIGKATAKYFFYSNIMNFFKTEITLANGEIRKRPLIETNGETGEIVWDKGRDFATVRKVLSMPQVNIVKKTEVQTGGFSKESILPKRNSDKLIARKKDWDPKKYGGFDSPTVAYSVLVVAKVEKGKSKKLKSVKELLGITIMERSSFEKNPIDFLEAKGYKEVKKDLIIKLPKYSLFELENGRKRMLASAGELQKGNELALPSKYVNFLYLASHYEKLKGSPEDNEQKQLFVEQHKHYLDEIIEQISEFSKRVILADANLDKVLSAYNKHRDKPIREQAENIIHLFTLTNLGAPAAFKYFDTTIDRKRYTSTKEVLDATLIHQSITGLYETRIDLSQLGGDGGGSSGSSGSSGSSGSSGSSGGTLNIEDEYRLHETSKEPDVSLGSTWLSDFPQAWAETGGMGLAVRQAPLIIPLKATSTPVSIKQYPMSQEARLGIKPHIQRLLDQGILVPCQSPWNTPLLPVKKPGTNDYRPVQDLREVNKRVEDIHPTVPNPYNLLSGLPPSHQWYTVLDLKDAFFCLRLHPTSQPLFAFEWRDPEMGISGQLTWTRLPQGFKNSPTLFNEALHRDLADFRIQHPDLILLQYVDDLLLAATSELDCQQGTRALLQTLGNLGYRASAKKAQICQKQVKYLGYLLKEGQRWLTEARKETVMGQPTPKTPRQLREFLGKAGFCRLFIPGFAEMAAPLYPLTKPGTLFNWGPDQQKAYQEIKQALLTAPALGLPDLTKPFELFVDEKQGYAKGVLTQKLGPWRRPVAYLSKKLDPVAAGWPPCLRMVAAIAVLTKDAGKLTMGQPLVILAPHAVEALVKQPPDRWLSNARMTHYQALLLDTDRVQFGPVVALNPATLLPLPEEGLQHNCLDILAEAHGTRPDLTDQPLPDADHTWYTDGSSLLQEGQRKAGAAVTTETEVIWAKALPAGTSAQRAELIALTQALKMAEGKKLNVYTDSRYAFATAHIHGEIYRRRGWLTSEGKEIKNKDEILALLKALFLPKRLSIIHCPGHQKGHSAEARGNRMADQAARKAAITETPDTSTLLIENSSPSGGSKRTADGSEFEAGKRTADGSEFEKRTADGSEFESPKKKAKVE

SEQ ID NO: 2613 - protein, 2130 aa, synthetic construct
  source 1..2130: note = Description of Artificial Sequence: Synthetic polypeptide
MPAAKRVKLDGGDKKYSIGLDIGTNSVGWAVITDEYKVPSKKFKVLGNTDRHSIKKNLIGALLFDSGETAEATRLKRTARRRYTRRKNRICYLQEIFSNEMAKVDDSFFHRLEESFLVEEDKKHERHPIFGNIVDEVAYHEKYPTIYHLRKKLVDSTDKADLRLIYLALAHMIKFRGHFLIEGDLNPDNSDVDKLFIQLVQTYNQLFEENPINASGVDAKAILSARLSKSRRLENLIAQLPGEKKNGLFGNLIALSLGLTPNFKSNFDLAEDAKLQLSKDTYDDDLDNLLAQIGDQYADLFLAAKNLSDAILLSDILRVNTEITKAPLSASMIKRYDEHHQDLTLLKALVRQQLPEKYKEIFFDQSKNGYAGYIDGGASQEEFYKFIKPILEKMDGTEELLVKLNREDLLRKQRTFDNGSIPHQIHLGELHAILRRQEDFYPFLKDNREKIEKILTFRIPYYVGPLARGNSRFAWMTRKSEETITPWNFEEVVDKGASAQSFIERMTNFDKNLPNEKVLPKHSLLYEYFTVYNELTKVKYVTEGMRKPAFLSGEQKKAIVDLLFKTNRKVTVKQLKEDYFKKIECFDSVEISGVEDRFNASLGTYHDLLKIIKDKDFLDNEENEDILEDIVLTLTLFEDREMIEERLKTYAHLFDDKVMKQLKRRRYTGWGRLSRKLINGIRDKQSGKTILDFLKSDGFANRNFMQLIHDDSLTFKEDIQKAQVSGQGDSLHEHIANLAGSPAIKKGILQTVKVVDELVKVMGRHKPENIVIEMARENQTTQKGQKNSRERMKRIEEGIKELGSQILKEHPVENTQLQNEKLYLYYLQNGRDMYVDQELDINRLSDYDVDHIVPQSFLKDDSIDNKVLTRSDKARGKSDNVPSEEVVKKMKNYWRQLLNAKLITQRKFDNLTKAERGGLSELDKAGFIKRQLVETRQITKHVAQILDSRMNTKYDENDKLIREVKVITLKSKLVSDFRKDFQFYKVREINNYHHAHDAYLNAVVGTALIKKYPKLESEFVYGDYKVYDVRKMIAKSEQEIGKATAKYFFYSNIMNFFKTEITLANGEIRKRPLIETNGETGEIVWDKGRDFATVRKVLSMPQVNIVKKTEVQTGGFSKESILPKRNSDKLIARKKDWDPKKYGGFDSPTVAYSVLVVAKVEKGKSKKLKSVKELLGITIMERSSFEKNPIDFLEAKGYKEVKKDLIIKLPKYSLFELENGRKRMLASAGELQKGNELALPSKYVNFLYLASHYEKLKGSPEDNEQKQLFVEQHKHYLDEIIEQISEFSKRVILADANLDKVLSAYNKHRDKPIREQAENIIHLFTLTNLGAPAAFKYFDTTIDRKRYTSTKEVLDATLIHQSITGLYETRIDLSQLGGDGGGGGGSGGGGSGGGGSGGGGSGGGGSGGTLNIEDEYRLHETSKEPDVSLGSTWLSDFPQAWAETGGMGLAVRQAPLIIPLKATSTPVSIKQYPMSQEARLGIKPHIQRLLDQGILVPCQSPWNTPLLPVKKPGTNDYRPVQDLREVNKRVEDIHPTVPNPYNLLSGLPPSHQWYTVLDLKDAFFCLRLHPTSQPLFAFEWRDPEMGISGQLTWTRLPQGFKNSPTLFNEALHRDLADFRIQHPDLILLQYVDDLLLAATSELDCQQGTRALLQTLGNLGYRASAKKAQICQKQVKYLGYLLKEGQRWLTEARKETVMGQPTPKTPRQLREFLGKAGFCRLFIPGFAEMAAPLYPLTKPGTLFNWGPDQQKAYQEIKQALLTAPALGLPDLTKPFELFVDEKQGYAKGVLTQKLGPWRRPVAYLSKKLDPVAAGWPPCLRMVAAIAVLTKDAGKLTMGQPLVILAPHAVEALVKQPPDRWLSNARMTHYQALLLDTDRVQFGPVVALNPATLLPLPEEGLQHNCLDILAEAHGTRPDLTDQPLPDADHTWYTDGSSLLQEGQRKAGAAVTTETEVIWAKALPAGTSAQRAELIALTQALKMAEGKKLNVYTDSRYAFATAHIHGEIYRRRGWLTSEGKEIKNKDEILALLKALFLPKRLSIIHCPGHQKGHSAEARGNRMADQAARKAAITETPDTSTLLIENSSPSGGSKRTADGSEFEAGKRTADGSEFEKRTADGSEFESPKKKAKVE

SEQ ID NO: 2614 - protein, 2116 aa, synthetic construct
  source 1..2116: note = Description of Artificial Sequence: Synthetic polypeptide
MPAAKRVKLDGGDKKYSIGLDIGTNSVGWAVITDEYKVPSKKFKVLGNTDRHSIKKNLIGALLFDSGETAEATRLKRTARRRYTRRKNRICYLQEIFSNEMAKVDDSFFHRLEESFLVEEDKKHERHPIFGNIVDEVAYHEKYPTIYHLRKKLVDSTDKADLRLIYLALAHMIKFRGHFLIEGDLNPDNSDVDKLFIQLVQTYNQLFEENPINASGVDAKAILSARLSKSRRLENLIAQLPGEKKNGLFGNLIALSLGLTPNFKSNFDLAEDAKLQLSKDTYDDDLDNLLAQIGDQYADLFLAAKNLSDAILLSDILRVNTEITKAPLSASMIKRYDEHHQDLTLLKALVRQQLPEKYKEIFFDQSKNGYAGYIDGGASQEEFYKFIKPILEKMDGTEELLVKLNREDLLRKQRTFDNGSIPHQIHLGELHAILRRQEDFYPFLKDNREKIEKILTFRIPYYVGPLARGNSRFAWMTRKSEETITPWNFEEVVDKGASAQSFIERMTNFDKNLPNEKVLPKHSLLYEYFTVYNELTKVKYVTEGMRKPAFLSGEQKKAIVDLLFKTNRKVTVKQLKEDYFKKIECFDSVEISGVEDRFNASLGTYHDLLKIIKDKDFLDNEENEDILEDIVLTLTLFEDREMIEERLKTYAHLFDDKVMKQLKRRRYTGWGRLSRKLINGIRDKQSGKTILDFLKSDGFANRNFMQLIHDDSLTFKEDIQKAQVSGQGDSLHEHIANLAGSPAIKKGILQTVKVVDELVKVMGRHKPENIVIEMARENQTTQKGQKNSRERMKRIEEGIKELGSQILKEHPVENTQLQNEKLYLYYLQNGRDMYVDQELDINRLSDYDVDHIVPQSFLKDDSIDNKVLTRSDKARGKSDNVPSEEVVKKMKNYWRQLLNAKLITQRKFDNLTKAERGGLSELDKAGFIKRQLVETRQITKHVAQILDSRMNTKYDENDKLIREVKVITLKSKLVSDFRKDFQFYKVREINNYHHAHDAYLNAVVGTALIKKYPKLESEFVYGDYKVYDVRKMIAKSEQEIGKATAKYFFYSNIMNFFKTEITLANGEIRKRPLIETNGETGEIVWDKGRDFATVRKVLSMPQVNIVKKTEVQTGGFSKESILPKRNSDKLIARKKDWDPKKYGGFDSPTVAYSVLVVAKVEKGKSKKLKSVKELLGITIMERSSFEKNPIDFLEAKGYKEVKKDLIIKLPKYSLFELENGRKRMLASAGELQKGNELALPSKYVNFLYLASHYEKLKGSPEDNEQKQLFVEQHKHYLDEIIEQISEFSKRVILADANLDKVLSAYNKHRDKPIREQAENIIHLFTLTNLGAPAAFKYFDTTIDRKRYTSTKEVLDATLIHQSITGLYETRIDLSQLGGDGGEAAAKGGGPAPGGTLNIEDEYRLHETSKEPDVSLGSTWLSDFPQAWAETGGMGLAVRQAPLIIPLKATSTPVSIKQYPMSQEARLGIKPHIQRLLDQGILVPCQSPWNTPLLPVKKPGTNDYRPVQDLREVNKRVEDIHPTVPNPYNLLSGLPPSHQWYTVLDLKDAFFCLRLHPTSQPLFAFEWRDPEMGISGQLTWTRLPQGFKNSPTLFNEALHRDLADFRIQHPDLILLQYVDDLLLAATSELDCQQGTRALLQTLGNLGYRASAKKAQICQKQVKYLGYLLKEGQRWLTEARKETVMGQPTPKTPRQLREFLGKAGFCRLFIPGFAEMAAPLYPLTKPGTLFNWGPDQQKAYQEIKQALLTAPALGLPDLTKPFELFVDEKQGYAKGVLTQKLGPWRRPVAYLSKKLDPVAAGWPPCLRMVAAIAVLTKDAGKLTMGQPLVILAPHAVEALVKQPPDRWLSNARMTHYQALLLDTDRVQFGPVVALNPATLLPLPEEGLQHNCLDILAEAHGTRPDLTDQPLPDADHTWYTDGSSLLQEGQRKAGAAVTTETEVIWAKALPAGTSAQRAELIALTQALKMAEGKKLNVYTDSRYAFATAHIHGEIYRRRGWLTSEGKEIKNKDEILALLKALFLPKRLSIIHCPGHQKGHSAEARGNRMADQAARKAAITETPDTSTLLIENSSPSGGSKRTADGSEFEAGKRTADGSEFEKRTADGSEFESPKKKAKVE

SEQ ID NO: 2615 - protein, 2125 aa, synthetic construct
  source 1..2125: note = Description of Artificial Sequence: Synthetic polypeptide
MPAAKRVKLDGGDKKYSIGLDIGTNSVGWAVITDEYKVPSKKFKVLGNTDRHSIKKNLIGALLFDSGETAEATRLKRTARRRYTRRKNRICYLQEIFSNEMAKVDDSFFHRLEESFLVEEDKKHERHPIFGNIVDEVAYHEKYPTIYHLRKKLVDSTDKADLRLIYLALAHMIKFRGHFLIEGDLNPDNSDVDKLFIQLVQTYNQLFEENPINASGVDAKAILSARLSKSRRLENLIAQLPGEKKNGLFGNLIALSLGLTPNFKSNFDLAEDAKLQLSKDTYDDDLDNLLAQIGDQYADLFLAAKNLSDAILLSDILRVNTEITKAPLSASMIKRYDEHHQDLTLLKALVRQQLPEKYKEIFFDQSKNGYAGYIDGGASQEEFYKFIKPILEKMDGTEELLVKLNREDLLRKQRTFDNGSIPHQIHLGELHAILRRQEDFYPFLKDNREKIEKILTFRIPYYVGPLARGNSRFAWMTRKSEETITPWNFEEVVDKGASAQSFIERMTNFDKNLPNEKVLPKHSLLYEYFTVYNELTKVKYVTEGMRKPAFLSGEQKKAIVDLLFKTNRKVTVKQLKEDYFKKIECFDSVEISGVEDRFNASLGTYHDLLKIIKDKDFLDNEENEDILEDIVLTLTLFEDREMIEERLKTYAHLFDDKVMKQLKRRRYTGWGRLSRKLINGIRDKQSGKTILDFLKSDGFANRNFMQLIHDDSLTFKEDIQKAQVSGQGDSLHEHIANLAGSPAIKKGILQTVKVVDELVKVMGRHKPENIVIEMARENQTTQKGQKNSRERMKRIEEGIKELGSQILKEHPVENTQLQNEKLYLYYLQNGRDMYVDQELDINRLSDYDVDHIVPQSFLKDDSIDNKVLTRSDKARGKSDNVPSEEVVKKMKNYWRQLLNAKLITQRKFDNLTKAERGGLSELDKAGFIKRQLVETRQITKHVAQILDSRMNTKYDENDKLIREVKVITLKSKLVSDFRKDFQFYKVREINNYHHAHDAYLNAVVGTALIKKYPKLESEFVYGDYKVYDVRKMIAKSEQEIGKATAKYFFYSNIMNFFKTEITLANGEIRKRPLIETNGETGEIVWDKGRDFATVRKVLSMPQVNIVKKTEVQTGGFSKESILPKRNSDKLIARKKDWDPKKYGGFDSPTVAYSVLVVAKVEKGKSKKLKSVKELLGITIMERSSFEKNPIDFLEAKGYKEVKKDLIIKLPKYSLFELENGRKRMLASAGELQKGNELALPSKYVNFLYLASHYEKLKGSPEDNEQKQLFVEQHKHYLDEIIEQISEFSKRVILADANLDKVLSAYNKHRDKPIREQAENIIHLFTLTNLGAPAAFKYFDTTIDRKRYTSTKEVLDATLIHQSITGLYETRIDLSQLGGDGGGGGGSGGGGSGGGGSGGGGSGGTLNIEDEYRLHETSKEPDVSLGSTWLSDFPQAWAETGGMGLAVRQAPLIIPLKATSTPVSIKQYPMSQEARLGIKPHIQRLLDQGILVPCQSPWNTPLLPVKKPGTNDYRPVQDLREVNKRVEDIHPTVPNPYNLLSGLPPSHQWYTVLDLKDAFFCLRLHPTSQPLFAFEWRDPEMGISGQLTWTRLPQGFKNSPTLFNEALHRDLADFRIQHPDLILLQYVDDLLLAATSELDCQQGTRALLQTLGNLGYRASAKKAQICQKQVKYLGYLLKEGQRWLTEARKETVMGQPTPKTPRQLREFLGKAGFCRLFIPGFAEMAAPLYPLTKPGTLFNWGPDQQKAYQEIKQALLTAPALGLPDLTKPFELFVDEKQGYAKGVLTQKLGPWRRPVAYLSKKLDPVAAGWPPCLRMVAAIAVLTKDAGKLTMGQPLVILAPHAVEALVKQPPDRWLSNARMTHYQALLLDTDRVQFGPVVALNPATLLPLPEEGLQHNCLDILAEAHGTRPDLTDQPLPDADHTWYTDGSSLLQEGQRKAGAAVTTETEVIWAKALPAGTSAQRAELIALTQALKMAEGKKLNVYTDSRYAFATAHIHGEIYRRRGWLTSEGKEIKNKDEILALLKALFLPKRLSIIHCPGHQKGHSAEARGNRMADQAARKAAITETPDTSTLLIENSSPSGGSKRTADGSEFEAGKRTADGSEFEKRTADGSEFESPKKKAKVE

SEQ ID NO: 2616 - protein, 2114 aa, synthetic construct
  source 1..2114: note = Description of Artificial Sequence: Synthetic polypeptide
MPAAKRVKLDGGDKKYSIGLDIGTNSVGWAVITDEYKVPSKKFKVLGNTDRHSIKKNLIGALLFDSGETAEATRLKRTARRRYTRRKNRICYLQEIFSNEMAKVDDSFFHRLEESFLVEEDKKHERHPIFGNIVDEVAYHEKYPTIYHLRKKLVDSTDKADLRLIYLALAHMIKFRGHFLIEGDLNPDNSDVDKLFIQLVQTYNQLFEENPINASGVDAKAILSARLSKSRRLENLIAQLPGEKKNGLFGNLIALSLGLTPNFKSNFDLAEDAKLQLSKDTYDDDLDNLLAQIGDQYADLFLAAKNLSDAILLSDILRVNTEITKAPLSASMIKRYDEHHQDLTLLKALVRQQLPEKYKEIFFDQSKNGYAGYIDGGASQEEFYKFIKPILEKMDGTEELLVKLNREDLLRKQRTFDNGSIPHQIHLGELHAILRRQEDFYPFLKDNREKIEKILTFRIPYYVGPLARGNSRFAWMTRKSEETITPWNFEEVVDKGASAQSFIERMTNFDKNLPNEKVLPKHSLLYEYFTVYNELTKVKYVTEGMRKPAFLSGEQKKAIVDLLFKTNRKVTVKQLKEDYFKKIECFDSVEISGVEDRFNASLGTYHDLLKIIKDKDFLDNEENEDILEDIVLTLTLFEDREMIEERLKTYAHLFDDKVMKQLKRRRYTGWGRLSRKLINGIRDKQSGKTILDFLKSDGFANRNFMQLIHDDSLTFKEDIQKAQVSGQGDSLHEHIANLAGSPAIKKGILQTVKVVDELVKVMGRHKPENIVIEMARENQTTQKGQKNSRERMKRIEEGIKELGSQILKEHPVENTQLQNEKLYLYYLQNGRDMYVDQELDINRLSDYDVDHIVPQSFLKDDSIDNKVLTRSDKARGKSDNVPSEEVVKKMKNYWRQLLNAKLITQRKFDNLTKAERGGLSELDKAGFIKRQLVETRQITKHVAQILDSRMNTKYDENDKLIREVKVITLKSKLVSDFRKDFQFYKVREINNYHHAHDAYLNAVVGTALIKKYPKLESEFVYGDYKVYDVRKMIAKSEQEIGKATAKYFFYSNIMNFFKTEITLANGEIRKRPLIETNGETGEIVWDKGRDFATVRKVLSMPQVNIVKKTEVQTGGFSKESILPKRNSDKLIARKKDWDPKKYGGFDSPTVAYSVLVVAKVEKGKSKKLKSVKELLGITIMERSSFEKNPIDFLEAKGYKEVKKDLIIKLPKYSLFELENGRKRMLASAGELQKGNELALPSKYVNFLYLASHYEKLKGSPEDNEQKQLFVEQHKHYLDEIIEQISEFSKRVILADANLDKVLSAYNKHRDKPIREQAENIIHLFTLTNLGAPAAFKYFDTTIDRKRYTSTKEVLDATLIHQSITGLYETRIDLSQLGGDGGPAPGSSGGGGGTLNIEDEYRLHETSKEPDVSLGSTWLSDFPQAWAETGGMGLAVRQAPLIIPLKATSTPVSIKQYPMSQEARLGIKPHIQRLLDQGILVPCQSPWNTPLLPVKKPGTNDYRPVQDLREVNKRVEDIHPTVPNPYNLLSGLPPSHQWYTVLDLKDAFFCLRLHPTSQPLFAFEWRDPEMGISGQLTWTRLPQGFKNSPTLFNEALHRDLADFRIQHPDLILLQYVDDLLLAATSELDCQQGTRALLQTLGNLGYRASAKKAQICQKQVKYLGYLLKEGQRWLTEARKETVMGQPTPKTPRQLREFLGKAGFCRLFIPGFAEMAAPLYPLTKPGTLFNWGPDQQKAYQEIKQALLTAPALGLPDLTKPFELFVDEKQGYAKGVLTQKLGPWRRPVAYLSKKLDPVAAGWPPCLRMVAAIAVLTKDAGKLTMGQPLVILAPHAVEALVKQPPDRWLSNARMTHYQALLLDTDRVQFGPVVALNPATLLPLPEEGLQHNCLDILAEAHGTRPDLTDQPLPDADHTWYTDGSSLLQEGQRKAGAAVTTETEVIWAKALPAGTSAQRAELIALTQALKMAEGKKLNVYTDSRYAFATAHIHGEIYRRRGWLTSEGKEIKNKDEILALLKALFLPKRLSIIHCPGHQKGHSAEARGNRMADQAARKAAITETPDTSTLLIENSSPSGGSKRTADGSEFEAGKRTADGSEFEKRTADGSEFESPKKKAKVE

SEQ ID NO: 2617 - protein, 2114 aa, synthetic construct
  source 1..2114: note = Description of Artificial Sequence: Synthetic polypeptide
MPAAKRVKLDGGDKKYSIGLDIGTNSVGWAVITDEYKVPSKKFKVLGNTDRHSIKKNLIGALLFDSGETAEATRLKRTARRRYTRRKNRICYLQEIFSNEMAKVDDSFFHRLEESFLVEEDKKHERHPIFGNIVDEVAYHEKYPTIYHLRKKLVDSTDKADLRLIYLALAHMIKFRGHFLIEGDLNPDNSDVDKLFIQLVQTYNQLFEENPINASGVDAKAILSARLSKSRRLENLIAQLPGEKKNGLFGNLIALSLGLTPNFKSNFDLAEDAKLQLSKDTYDDDLDNLLAQIGDQYADLFLAAKNLSDAILLSDILRVNTEITKAPLSASMIKRYDEHHQDLTLLKALVRQQLPEKYKEIFFDQSKNGYAGYIDGGASQEEFYKFIKPILEKMDGTEELLVKLNREDLLRKQRTFDNGSIPHQIHLGELHAILRRQEDFYPFLKDNREKIEKILTFRIPYYVGPLARGNSRFAWMTRKSEETITPWNFEEVVDKGASAQSFIERMTNFDKNLPNEKVLPKHSLLYEYFTVYNELTKVKYVTEGMRKPAFLSGEQKKAIVDLLFKTNRKVTVKQLKEDYFKKIECFDSVEISGVEDRFNASLGTYHDLLKIIKDKDFLDNEENEDILEDIVLTLTLFEDREMIEERLKTYAHLFDDKVMKQLKRRRYTGWGRLSRKLINGIRDKQSGKTILDFLKSDGFANRNFMQLIHDDSLTFKEDIQKAQVSGQGDSLHEHIANLAGSPAIKKGILQTVKVVDELVKVMGRHKPENIVIEMARENQTTQKGQKNSRERMKRIEEGIKELGSQILKEHPVENTQLQNEKLYLYYLQNGRDMYVDQELDINRLSDYDVDHIVPQSFLKDDSIDNKVLTRSDKARGKSDNVPSEEVVKKMKNYWRQLLNAKLITQRKFDNLTKAERGGLSELDKAGFIKRQLVETRQITKHVAQILDSRMNTKYDENDKLIREVKVITLKSKLVSDFRKDFQFYKVREINNYHHAHDAYLNAVVGTALIKKYPKLESEFVYGDYKVYDVRKMIAKSEQEIGKATAKYFFYSNIMNFFKTEITLANGEIRKRPLIETNGETGEIVWDKGRDFATVRKVLSMPQVNIVKKTEVQTGGFSKESILPKRNSDKLIARKKDWDPKKYGGFDSPTVAYSVLVVAKVEKGKSKKLKSVKELLGITIMERSSFEKNPIDFLEAKGYKEVKKDLIIKLPKYSLFELENGRKRMLASAGELQKGNELALPSKYVNFLYLASHYEKLKGSPEDNEQKQLFVEQHKHYLDEIIEQISEFSKRVILADANLDKVLSAYNKHRDKPIREQAENIIHLFTLTNLGAPAAFKYFDTTIDRKRYTSTKEVLDATLIHQSITGLYETRIDLSQLGGDGGGSSGGGGGSGGTLNIEDEYRLHETSKEPDVSLGSTWLSDFPQAWAETGGMGLAVRQAPLIIPLKATSTPVSIKQYPMSQEARLGIKPHIQRLLDQGILVPCQSPWNTPLLPVKKPGTNDYRPVQDLREVNKRVEDIHPTVPNPYNLLSGLPPSHQWYTVLDLKDAFFCLRLHPTSQPLFAFEWRDPEMGISGQLTWTRLPQGFKNSPTLFNEALHRDLADFRIQHPDLILLQYVDDLLLAATSELDCQQGTRALLQTLGNLGYRASAKKAQICQKQVKYLGYLLKEGQRWLTEARKETVMGQPTPKTPRQLREFLGKAGFCRLFIPGFAEMAAPLYPLTKPGTLFNWGPDQQKAYQEIKQALLTAPALGLPDLTKPFELFVDEKQGYAKGVLTQKLGPWRRPVAYLSKKLDPVAAGWPPCLRMVAAIAVLTKDAGKLTMGQPLVILAPHAVEALVKQPPDRWLSNARMTHYQALLLDTDRVQFGPVVALNPATLLPLPEEGLQHNCLDILAEAHGTRPDLTDQPLPDADHTWYTDGSSLLQEGQRKAGAAVTTETEVIWAKALPAGTSAQRAELIALTQALKMAEGKKLNVYTDSRYAFATAHIHGEIYRRRGWLTSEGKEIKNKDEILALLKALFLPKRLSIIHCPGHQKGHSAEARGNRMADQAARKAAITETPDTSTLLIENSSPSGGSKRTADGSEFEAGKRTADGSEFEKRTADGSEFESPKKKAKVE

SEQ ID NO: 2618 - protein, 2114 aa, synthetic construct
  source 1..2114: note = Description of Artificial Sequence: Synthetic polypeptide
MPAAKRVKLDGGDKKYSIGLDIGTNSVGWAVITDEYKVPSKKFKVLGNTDRHSIKKNLIGALLFDSGETAEATRLKRTARRRYTRRKNRICYLQEIFSNEMAKVDDSFFHRLEESFLVEEDKKHERHPIFGNIVDEVAYHEKYPTIYHLRKKLVDSTDKADLRLIYLALAHMIKFRGHFLIEGDLNPDNSDVDKLFIQLVQTYNQLFEENPINASGVDAKAILSARLSKSRRLENLIAQLPGEKKNGLFGNLIALSLGLTPNFKSNFDLAEDAKLQLSKDTYDDDLDNLLAQIGDQYADLFLAAKNLSDAILLSDILRVNTEITKAPLSASMIKRYDEHHQDLTLLKALVRQQLPEKYKEIFFDQSKNGYAGYIDGGASQEEFYKFIKPILEKMDGTEELLVKLNREDLLRKQRTFDNGSIPHQIHLGELHAILRRQEDFYPFLKDNREKIEKILTFRIPYYVGPLARGNSRFAWMTRKSEETITPWNFEEVVDKGASAQSFIERMTNFDKNLPNEKVLPKHSLLYEYFTVYNELTKVKYVTEGMRKPAFLSGEQKKAIVDLLFKTNRKVTVKQLKEDYFKKIECFDSVEISGVEDRFNASLGTYHDLLKIIKDKDFLDNEENEDILEDIVLTLTLFEDREMIEERLKTYAHLFDDKVMKQLKRRRYTGWGRLSRKLINGIRDKQSGKTILDFLKSDGFANRNFMQLIHDDSLTFKEDIQKAQVSGQGDSLHEHIANLAGSPAIKKGILQTVKVVDELVKVMGRHKPENIVIEMARENQTTQKGQKNSRERMKRIEEGIKELGSQILKEHPVENTQLQNEKLYLYYLQNGRDMYVDQELDINRLSDYDVDHIVPQSFLKDDSIDNKVLTRSDKARGKSDNVPSEEVVKKMKNYWRQLLNAKLITQRKFDNLTKAERGGLSELDKAGFIKRQLVETRQITKHVAQILDSRMNTKYDENDKLIREVKVITLKSKLVSDFRKDFQFYKVREINNYHHAHDAYLNAVVGTALIKKYPKLESEFVYGDYKVYDVRKMIAKSEQEIGKATAKYFFYSNIMNFFKTEITLANGEIRKRPLIETNGETGEIVWDKGRDFATVRKVLSMPQVNIVKKTEVQTGGFSKESILPKRNSDKLIARKKDWDPKKYGGFDSPTVAYSVLVVAKVEKGKSKKLKSVKELLGITIMERSSFEKNPIDFLEAKGYKEVKKDLIIKLPKYSLFELENGRKRMLASAGELQKGNELALPSKYVNFLYLASHYEKLKGSPEDNEQKQLFVEQHKHYLDEIIEQISEFSKRVILADANLDKVLSAYNKHRDKPIREQAENIIHLFTLTNLGAPAAFKYFDTTIDRKRYTSTKEVLDATLIHQSITGLYETRIDLSQLGGDGGGGGPAPGGSGGTLNIEDEYRLHETSKEPDVSLGSTWLSDFPQAWAETGGMGLAVRQAPLIIPLKATSTPVSIKQYPMSQEARLGIKPHIQRLLDQGILVPCQSPWNTPLLPVKKPGTNDYRPVQDLREVNKRVEDIHPTVPNPYNLLSGLPPSHQWYTVLDLKDAFFCLRLHPTSQPLFAFEWRDPEMGISGQLTWTRLPQGFKNSPTLFNEALHRDLADFRIQHPDLILLQYVDDLLLAATSELDCQQGTRALLQTLGNLGYRASAKKAQICQKQVKYLGYLLKEGQRWLTEARKETVMGQPTPKTPRQLREFLGKAGFCRLFIPGFAEMAAPLYPLTKPGTLFNWGPDQQKAYQEIKQALLTAPALGLPDLTKPFELFVDEKQGYAKGVLTQKLGPWRRPVAYLSKKLDPVAAGWPPCLRMVAAIAVLTKDAGKLTMGQPLVILAPHAVEALVKQPPDRWLSNARMTHYQALLLDTDRVQFGPVVALNPATLLPLPEEGLQHNCLDILAEAHGTRPDLTDQPLPDADHTWYTDGSSLLQEGQRKAGAAVTTETEVIWAKALPAGTSAQRAELIALTQALKMAEGKKLNVYTDSRYAFATAHIHGEIYRRRGWLTSEGKEIKNKDEILALLKALFLPKRLSIIHCPGHQKGHSAEARGNRMADQAARKAAITETPDTSTLLIENSSPSGGSKRTADGSEFEAGKRTADGSEFEKRTADGSEFESPKKKAKVE

SEQ ID NO: 2619 - protein, 2116 aa, synthetic construct
  source 1..2116: note = Description of Artificial Sequence: Synthetic polypeptide
MPAAKRVKLDGGDKKYSIGLDIGTNSVGWAVITDEYKVPSKKFKVLGNTDRHSIKKNLIGALLFDSGETAEATRLKRTARRRYTRRKNRICYLQEIFSNEMAKVDDSFFHRLEESFLVEEDKKHERHPIFGNIVDEVAYHEKYPTIYHLRKKLVDSTDKADLRLIYLALAHMIKFRGHFLIEGDLNPDNSDVDKLFIQLVQTYNQLFEENPINASGVDAKAILSARLSKSRRLENLIAQLPGEKKNGLFGNLIALSLGLTPNFKSNFDLAEDAKLQLSKDTYDDDLDNLLAQIGDQYADLFLAAKNLSDAILLSDILRVNTEITKAPLSASMIKRYDEHHQDLTLLKALVRQQLPEKYKEIFFDQSKNGYAGYIDGGASQEEFYKFIKPILEKMDGTEELLVKLNREDLLRKQRTFDNGSIPHQIHLGELHAILRRQEDFYPFLKDNREKIEKILTFRIPYYVGPLARGNSRFAWMTRKSEETITPWNFEEVVDKGASAQSFIERMTNFDKNLPNEKVLPKHSLLYEYFTVYNELTKVKYVTEGMRKPAFLSGEQKKAIVDLLFKTNRKVTVKQLKEDYFKKIECFDSVEISGVEDRFNASLGTYHDLLKIIKDKDFLDNEENEDILEDIVLTLTLFEDREMIEERLKTYAHLFDDKVMKQLKRRRYTGWGRLSRKLINGIRDKQSGKTILDFLKSDGFANRNFMQLIHDDSLTFKEDIQKAQVSGQGDSLHEHIANLAGSPAIKKGILQTVKVVDELVKVMGRHKPENIVIEMARENQTTQKGQKNSRERMKRIEEGIKELGSQILKEHPVENTQLQNEKLYLYYLQNGRDMYVDQELDINRLSDYDVDHIVPQSFLKDDSIDNKVLTRSDKARGKSDNVPSEEVVKKMKNYWRQLLNAKLITQRKFDNLTKAERGGLSELDKAGFIKRQLVETRQITKHVAQILDSRMNTKYDENDKLIREVKVITLKSKLVSDFRKDFQFYKVREINNYHHAHDAYLNAVVGTALIKKYPKLESEFVYGDYKVYDVRKMIAKSEQEIGKATAKYFFYSNIMNFFKTEITLANGEIRKRPLIETNGETGEIVWDKGRDFATVRKVLSMPQVNIVKKTEVQTGGFSKESILPKRNSDKLIARKKDWDPKKYGGFDSPTVAYSVLVVAKVEKGKSKKLKSVKELLGITIMERSSFEKNPIDFLEAKGYKEVKKDLIIKLPKYSLFELENGRKRMLASAGELQKGNELALPSKYVNFLYLASHYEKLKGSPEDNEQKQLFVEQHKHYLDEIIEQISEFSKRVILADANLDKVLSAYNKHRDKPIREQAENIIHLFTLTNLGAPAAFKYFDTTIDRKRYTSTKEVLDATLIHQSITGLYETRIDLSQLGGDGGPAPAPAPAPAPGGTLNIEDEYRLHETSKEPDVSLGSTWLSDFPQAWAETGGMGLAVRQAPLIIPLKATSTPVSIKQYPMSQEARLGIKPHIQRLLDQGILVPCQSPWNTPLLPVKKPGTNDYRPVQDLREVNKRVEDIHPTVPNPYNLLSGLPPSHQWYTVLDLKDAFFCLRLHPTSQPLFAFEWRDPEMGISGQLTWTRLPQGFKNSPTLFNEALHRDLADFRIQHPDLILLQYVDDLLLAATSELDCQQGTRALLQTLGNLGYRASAKKAQICQKQVKYLGYLLKEGQRWLTEARKETVMGQPTPKTPRQLREFLGKAGFCRLFIPGFAEMAAPLYPLTKPGTLFNWGPDQQKAYQEIKQALLTAPALGLPDLTKPFELFVDEKQGYAKGVLTQKLGPWRRPVAYLSKKLDPVAAGWPPCLRMVAAIAVLTKDAGKLTMGQPLVILAPHAVEALVKQPPDRWLSNARMTHYQALLLDTDRVQFGPVVALNPATLLPLPEEGLQHNCLDILAEAHGTRPDLTDQPLPDADHTWYTDGSSLLQEGQRKAGAAVTTETEVIWAKALPAGTSAQRAELIALTQALKMAEGKKLNVYTDSRYAFATAHIHGEIYRRRGWLTSEGKEIKNKDEILALLKALFLPKRLSIIHCPGHQKGHSAEARGNRMADQAARKAAITETPDTSTLLIENSSPSGGSKRTADGSEFEAGKRTADGSEFEKRTADGSEFESPKKKAKVE

SEQ ID NO: 2620 - protein, 2110 aa, synthetic construct
  source 1..2110: note = Description of Artificial Sequence: Synthetic polypeptide
MPAAKRVKLDGGDKKYSIGLDIGTNSVGWAVITDEYKVPSKKFKVLGNTDRHSIKKNLIGALLFDSGETAEATRLKRTARRRYTRRKNRICYLQEIFSNEMAKVDDSFFHRLEESFLVEEDKKHERHPIFGNIVDEVAYHEKYPTIYHLRKKLVDSTDKADLRLIYLALAHMIKFRGHFLIEGDLNPDNSDVDKLFIQLVQTYNQLFEENPINASGVDAKAILSARLSKSRRLENLIAQLPGEKKNGLFGNLIALSLGLTPNFKSNFDLAEDAKLQLSKDTYDDDLDNLLAQIGDQYADLFLAAKNLSDAILLSDILRVNTEITKAPLSASMIKRYDEHHQDLTLLKALVRQQLPEKYKEIFFDQSKNGYAGYIDGGASQEEFYKFIKPILEKMDGTEELLVKLNREDLLRKQRTFDNGSIPHQIHLGELHAILRRQEDFYPFLKDNREKIEKILTFRIPYYVGPLARGNSRFAWMTRKSEETITPWNFEEVVDKGASAQSFIERMTNFDKNLPNEKVLPKHSLLYEYFTVYNELTKVKYVTEGMRKPAFLSGEQKKAIVDLLFKTNRKVTVKQLKEDYFKKIECFDSVEISGVEDRFNASLGTYHDLLKIIKDKDFLDNEENEDILEDIVLTLTLFEDREMIEERLKTYAHLFDDKVMKQLKRRRYTGWGRLSRKLINGIRDKQSGKTILDFLKSDGFANRNFMQLIHDDSLTFKEDIQKAQVSGQGDSLHEHIANLAGSPAIKKGILQTVKVVDELVKVMGRHKPENIVIEMARENQTTQKGQKNSRERMKRIEEGIKELGSQILKEHPVENTQLQNEKLYLYYLQNGRDMYVDQELDINRLSDYDVDHIVPQSFLKDDSIDNKVLTRSDKARGKSDNVPSEEVVKKMKNYWRQLLNAKLITQRKFDNLTKAERGGLSELDKAGFIKRQLVETRQITKHVAQILDSRMNTKYDENDKLIREVKVITLKSKLVSDFRKDFQFYKVREINNYHHAHDAYLNAVVGTALIKKYPKLESEFVYGDYKVYDVRKMIAKSEQEIGKATAKYFFYSNIMNFFKTEITLANGEIRKRPLIETNGETGEIVWDKGRDFATVRKVLSMPQVNIVKKTEVQTGGFSKESILPKRNSDKLIARKKDWDPKKYGGFDSPTVAYSVLVVAKVEKGKSKKLKSVKELLGITIMERSSFEKNPIDFLEAKGYKEVKKDLIIKLPKYSLFELENGRKRMLASAGELQKGNELALPSKYVNFLYLASHYEKLKGSPEDNEQKQLFVEQHKHYLDEIIEQISEFSKRVILADANLDKVLSAYNKHRDKPIREQAENIIHLFTLTNLGAPAAFKYFDTTIDRKRYTSTKEVLDATLIHQSITGLYETRIDLSQLGGDGGEAAAKGGTLNIEDEYRLHETSKEPDVSLGSTWLSDFPQAWAETGGMGLAVRQAPLIIPLKATSTPVSIKQYPMSQEARLGIKPHIQRLLDQGILVPCQSPWNTPLLPVKKPGTNDYRPVQDLREVNKRVEDIHPTVPNPYNLLSGLPPSHQWYTVLDLKDAFFCLRLHPTSQPLFAFEWRDPEMGISGQLTWTRLPQGFKNSPTLFNEALHRDLADFRIQHPDLILLQYVDDLLLAATSELDCQQGTRALLQTLGNLGYRASAKKAQICQKQVKYLGYLLKEGQRWLTEARKETVMGQPTPKTPRQLREFLGKAGFCRLFIPGFAEMAAPLYPLTKPGTLFNWGPDQQKAYQEIKQALLTAPALGLPDLTKPFELFVDEKQGYAKGVLTQKLGPWRRPVAYLSKKLDPVAAGWPPCLRMVAAIAVLTKDAGKLTMGQPLVILAPHAVEALVKQPPDRWLSNARMTHYQALLLDTDRVQFGPVVALNPATLLPLPEEGLQHNCLDILAEAHGTRPDLTDQPLPDADHTWYTDGSSLLQEGQRKAGAAVTTETEVIWAKALPAGTSAQRAELIALTQALKMAEGKKLNVYTDSRYAFATAHIHGEIYRRRGWLTSEGKEIKNKDEILALLKALFLPKRLSIIHCPGHQKGHSAEARGNRMADQAARKAAITETPDTSTLLIENSSPSGGSKRTADGSEFEAGKRTADGSEFEKRTADGSEFESPKKKAKVE

SEQ ID NO: 2621 - protein, 2111 aa, synthetic construct
  source 1..2111: note = Description of Artificial Sequence: Synthetic polypeptide
MPAAKRVKLDGGDKKYSIGLDIGTNSVGWAVITDEYKVPSKKFKVLGNTDRHSIKKNLIGALLFDSGETAEATRLKRTARRRYTRRKNRICYLQEIFSNEMAKVDDSFFHRLEESFLVEEDKKHERHPIFGNIVDEVAYHEKYPTIYHLRKKLVDSTDKADLRLIYLALAHMIKFRGHFLIEGDLNPDNSDVDKLFIQLVQTYNQLFEENPINASGVDAKAILSARLSKSRRLENLIAQLPGEKKNGLFGNLIALSLGLTPNFKSNFDLAEDAKLQLSKDTYDDDLDNLLAQIGDQYADLFLAAKNLSDAILLSDILRVNTEITKAPLSASMIKRYDEHHQDLTLLKALVRQQLPEKYKEIFFDQSKNGYAGYIDGGASQEEFYKFIKPILEKMDGTEELLVKLNREDLLRKQRTFDNGSIPHQIHLGELHAILRRQEDFYPFLKDNREKIEKILTFRIPYYVGPLARGNSRFAWMTRKSEETITPWNFEEVVDKGASAQSFIERMTNFDKNLPNEKVLPKHSLLYEYFTVYNELTKVKYVTEGMRKPAFLSGEQKKAIVDLLFKTNRKVTVKQLKEDYFKKIECFDSVEISGVEDRFNASLGTYHDLLKIIKDKDFLDNEENEDILEDIVLTLTLFEDREMIEERLKTYAHLFDDKVMKQLKRRRYTGWGRLSRKLINGIRDKQSGKTILDFLKSDGFANRNFMQLIHDDSLTFKEDIQKAQVSGQGDSLHEHIANLAGSPAIKKGILQTVKVVDELVKVMGRHKPENIVIEMARENQTTQKGQKNSRERMKRIEEGIKELGSQILKEHPVENTQLQNEKLYLYYLQNGRDMYVDQELDINRLSDYDVDHIVPQSFLKDDSIDNKVLTRSDKARGKSDNVPSEEVVKKMKNYWRQLLNAKLITQRKFDNLTKAERGGLSELDKAGFIKRQLVETRQITKHVAQILDSRMNTKYDENDKLIREVKVITLKSKLVSDFRKDFQFYKVREINNYHHAHDAYLNAVVGTALIKKYPKLESEFVYGDYKVYDVRKMIAKSEQEIGKATAKYFFYSNIMNFFKTEITLANGEIRKRPLIETNGETGEIVWDKGRDFATVRKVLSMPQVNIVKKTEVQTGGFSKESILPKRNSDKLIARKKDWDPKKYGGFDSPTVAYSVLVVAKVEKGKSKKLKSVKELLGITIMERSSFEKNPIDFLEAKGYKEVKKDLIIKLPKYSLFELENGRKRMLASAGELQKGNELALPSKYVNFLYLASHYEKLKGSPEDNEQKQLFVEQHKHYLDEIIEQISEFSKRVILADANLDKVLSAYNKHRDKPIREQAENIIHLFTLTNLGAPAAFKYFDTTIDRKRYTSTKEVLDATLIHQSITGLYETRIDLSQLGGDGGGGGGSSGGTLNIEDEYRLHETSKEPDVSLGSTWLSDFPQAWAETGGMGLAVRQAPLIIPLKATSTPVSIKQYPMSQEARLGIKPHIQRLLDQGILVPCQSPWNTPLLPVKKPGTNDYRPVQDLREVNKRVEDIHPTVPNPYNLLSGLPPSHQWYTVLDLKDAFFCLRLHPTSQPLFAFEWRDPEMGISGQLTWTRLPQGFKNSPTLFNEALHRDLADFRIQHPDLILLQYVDDLLLAATSELDCQQGTRALLQTLGNLGYRASAKKAQICQKQVKYLGYLLKEGQRWLTEARKETVMGQPTPKTPRQLREFLGKAGFCRLFIPGFAEMAAPLYPLTKPGTLFNWGPDQQKAYQEIKQALLTAPALGLPDLTKPFELFVDEKQGYAKGVLTQKLGPWRRPVAYLSKKLDPVAAGWPPCLRMVAAIAVLTKDAGKLTMGQPLVILAPHAVEALVKQPPDRWLSNARMTHYQALLLDTDRVQFGPVVALNPATLLPLPEEGLQHNCLDILAEAHGTRPDLTDQPLPDADHTWYTDGSSLLQEGQRKAGAAVTTETEVIWAKALPAGTSAQRAELIALTQALKMAEGKKLNVYTDSRYAFATAHIHGEIYRRRGWLTSEGKEIKNKDEILALLKALFLPKRLSIIHCPGHQKGHSAEARGNRMADQAARKAAITETPDTSTLLIENSSPSGGSKRTADGSEFEAGKRTADGSEFEKRTADGSEFESPKKKAKVE

SEQ ID NO: 2622 - protein, 2114 aa, synthetic construct
  source 1..2114: note = Description of Artificial Sequence: Synthetic polypeptide
MPAAKRVKLDGGDKKYSIGLDIGTNSVGWAVITDEYKVPSKKFKVLGNTDRHSIKKNLIGALLFDSGETAEATRLKRTARRRYTRRKNRICYLQEIFSNEMAKVDDSFFHRLEESFLVEEDKKHERHPIFGNIVDEVAYHEKYPTIYHLRKKLVDSTDKADLRLIYLALAHMIKFRGHFLIEGDLNPDNSDVDKLFIQLVQTYNQLFEENPINASGVDAKAILSARLSKSRRLENLIAQLPGEKKNGLFGNLIALSLGLTPNFKSNFDLAEDAKLQLSKDTYDDDLDNLLAQIGDQYADLFLAAKNLSDAILLSDILRVNTEITKAPLSASMIKRYDEHHQDLTLLKALVRQQLPEKYKEIFFDQSKNGYAGYIDGGASQEEFYKFIKPILEKMDGTEELLVKLNREDLLRKQRTFDNGSIPHQIHLGELHAILRRQEDFYPFLKDNREKIEKILTFRIPYYVGPLARGNSRFAWMTRKSEETITPWNFEEVVDKGASAQSFIERMTNFDKNLPNEKVLPKHSLLYEYFTVYNELTKVKYVTEGMRKPAFLSGEQKKAIVDLLFKTNRKVTVKQLKEDYFKKIECFDSVEISGVEDRFNASLGTYHDLLKIIKDKDFLDNEENEDILEDIVLTLTLFEDREMIEERLKTYAHLFDDKVMKQLKRRRYTGWGRLSRKLINGIRDKQSGKTILDFLKSDGFANRNFMQLIHDDSLTFKEDIQKAQVSGQGDSLHEHIANLAGSPAIKKGILQTVKVVDELVKVMGRHKPENIVIEMARENQTTQKGQKNSRERMKRIEEGIKELGSQILKEHPVENTQLQNEKLYLYYLQNGRDMYVDQELDINRLSDYDVDHIVPQSFLKDDSIDNKVLTRSDKARGKSDNVPSEEVVKKMKNYWRQLLNAKLITQRKFDNLTKAERGGLSELDKAGFIKRQLVETRQITKHVAQILDSRMNTKYDENDKLIREVKVITLKSKLVSDFRKDFQFYKVREINNYHHAHDAYLNAVVGTALIKKYPKLESEFVYGDYKVYDVRKMIAKSEQEIGKATAKYFFYSNIMNFFKTEITLANGEIRKRPLIETNGETGEIVWDKGRDFATVRKVLSMPQVNIVKKTEVQTGGFSKESILPKRNSDKLIARKKDWDPKKYGGFDSPTVAYSVLVVAKVEKGKSKKLKSVKELLGITIMERSSFEKNPIDFLEAKGYKEVKKDLIIKLPKYSLFELENGRKRMLASAGELQKGNELALPSKYVNFLYLASHYEKLKGSPEDNEQKQLFVEQHKHYLDEIIEQISEFSKRVILADANLDKVLSAYNKHRDKPIREQAENIIHLFTLTNLGAPAAFKYFDTTIDRKRYTSTKEVLDATLIHQSITGLYETRIDLSQLGGDGGGGSGGGPAPGGTLNIEDEYRLHETSKEPDVSLGSTWLSDFPQAWAETGGMGLAVRQAPLIIPLKATSTPVSIKQYPMSQEARLGIKPHIQRLLDQGILVPCQSPWNTPLLPVKKPGTNDYRPVQDLREVNKRVEDIHPTVPNPYNLLSGLPPSHQWYTVLDLKDAFFCLRLHPTSQPLFAFEWRDPEMGISGQLTWTRLPQGFKNSPTLFNEALHRDLADFRIQHPDLILLQYVDDLLLAATSELDCQQGTRALLQTLGNLGYRASAKKAQICQKQVKYLGYLLKEGQRWLTEARKETVMGQPTPKTPRQLREFLGKAGFCRLFIPGFAEMAAPLYPLTKPGTLFNWGPDQQKAYQEIKQALLTAPALGLPDLTKPFELFVDEKQGYAKGVLTQKLGPWRRPVAYLSKKLDPVAAGWPPCLRMVAAIAVLTKDAGKLTMGQPLVILAPHAVEALVKQPPDRWLSNARMTHYQALLLDTDRVQFGPVVALNPATLLPLPEEGLQHNCLDILAEAHGTRPDLTDQPLPDADHTWYTDGSSLLQEGQRKAGAAVTTETEVIWAKALPAGTSAQRAELIALTQALKMAEGKKLNVYTDSRYAFATAHIHGEIYRRRGWLTSEGKEIKNKDEILALLKALFLPKRLSIIHCPGHQKGHSAEARGNRMADQAARKAAITETPDTSTLLIENSSPSGGSKRTADGSEFEAGKRTADGSEFEKRTADGSEFESPKKKAKVE

SEQ ID NO: 2623 - protein, 2120 aa, synthetic construct
  source 1..2120: note = Description of Artificial Sequence: Synthetic polypeptide
MPAAKRVKLDGGDKKYSIGLDIGTNSVGWAVITDEYKVPSKKFKVLGNTDRHSIKKNLIGALLFDSGETAEATRLKRTARRRYTRRKNRICYLQEIFSNEMAKVDDSFFHRLEESFLVEEDKKHERHPIFGNIVDEVAYHEKYPTIYHLRKKLVDSTDKADLRLIYLALAHMIKFRGHFLIEGDLNPDNSDVDKLFIQLVQTYNQLFEENPINASGVDAKAILSARLSKSRRLENLIAQLPGEKKNGLFGNLIALSLGLTPNFKSNFDLAEDAKLQLSKDTYDDDLDNLLAQIGDQYADLFLAAKNLSDAILLSDILRVNTEITKAPLSASMIKRYDEHHQDLTLLKALVRQQLPEKYKEIFFDQSKNGYAGYIDGGASQEEFYKFIKPILEKMDGTEELLVKLNREDLLRKQRTFDNGSIPHQIHLGELHAILRRQEDFYPFLKDNREKIEKILTFRIPYYVGPLARGNSRFAWMTRKSEETITPWNFEEVVDKGASAQSFIERMTNFDKNLPNEKVLPKHSLLYEYFTVYNELTKVKYVTEGMRKPAFLSGEQKKAIVDLLFKTNRKVTVKQLKEDYFKKIECFDSVEISGVEDRFNASLGTYHDLLKIIKDKDFLDNEENEDILEDIVLTLTLFEDREMIEERLKTYAHLFDDKVMKQLKRRRYTGWGRLSRKLINGIRDKQSGKTILDFLKSDGFANRNFMQLIHDDSLTFKEDIQKAQVSGQGDSLHEHIANLAGSPAIKKGILQTVKVVDELVKVMGRHKPENIVIEMARENQTTQKGQKNSRERMKRIEEGIKELGSQILKEHPVENTQLQNEKLYLYYLQNGRDMYVDQELDINRLSDYDVDHIVPQSFLKDDSIDNKVLTRSDKARGKSDNVPSEEVVKKMKNYWRQLLNAKLITQRKFDNLTKAERGGLSELDKAGFIKRQLVETRQITKHVAQILDSRMNTKYDENDKLIREVKVITLKSKLVSDFRKDFQFYKVREINNYHHAHDAYLNAVVGTALIKKYPKLESEFVYGDYKVYDVRKMIAKSEQEIGKATAKYFFYSNIMNFFKTEITLANGEIRKRPLIETNGETGEIVWDKGRDFATVRKVLSMPQVNIVKKTEVQTGGFSKESILPKRNSDKLIARKKDWDPKKYGGFDSPTVAYSVLVVAKVEKGKSKKLKSVKELLGITIMERSSFEKNPIDFLEAKGYKEVKKDLIIKLPKYSLFELENGRKRMLASAGELQKGNELALPSKYVNFLYLASHYEKLKGSPEDNEQKQLFVEQHKHYLDEIIEQISEFSKRVILADANLDKVLSAYNKHRDKPIREQAENIIHLFTLTNLGAPAAFKYFDTTIDRKRYTSTKEVLDATLIHQSITGLYETRIDLSQLGGDGGEAAAKGGGGSEAAAKGGTLNIEDEYRLHETSKEPDVSLGSTWLSDFPQAWAETGGMGLAVRQAPLIIPLKATSTPVSIKQYPMSQEARLGIKPHIQRLLDQGILVPCQSPWNTPLLPVKKPGTNDYRPVQDLREVNKRVEDIHPTVPNPYNLLSGLPPSHQWYTVLDLKDAFFCLRLHPTSQPLFAFEWRDPEMGISGQLTWTRLPQGFKNSPTLFNEALHRDLADFRIQHPDLILLQYVDDLLLAATSELDCQQGTRALLQTLGNLGYRASAKKAQICQKQVKYLGYLLKEGQRWLTEARKETVMGQPTPKTPRQLREFLGKAGFCRLFIPGFAEMAAPLYPLTKPGTLFNWGPDQQKAYQEIKQALLTAPALGLPDLTKPFELFVDEKQGYAKGVLTQKLGPWRRPVAYLSKKLDPVAAGWPPCLRMVAAIAVLTKDAGKLTMGQPLVILAPHAVEALVKQPPDRWLSNARMTHYQALLLDTDRVQFGPVVALNPATLLPLPEEGLQHNCLDILAEAHGTRPDLTDQPLPDADHTWYTDGSSLLQEGQRKAGAAVTTETEVIWAKALPAGTSAQRAELIALTQALKMAEGKKLNVYTDSRYAFATAHIHGEIYRRRGWLTSEGKEIKNKDEILALLKALFLPKRLSIIHCPGHQKGHSAEARGNRMADQAARKAAITETPDTSTLLIENSSPSGGSKRTADGSEFEAGKRTADGSEFEKRTADGSEFESPKKKAKVE

SEQ ID NO: 2624 - protein, 2108 aa, synthetic construct
  source 1..2108: note = Description of Artificial Sequence: Synthetic polypeptide
MPAAKRVKLDGGDKKYSIGLDIGTNSVGWAVITDEYKVPSKKFKVLGNTDRHSIKKNLIGALLFDSGETAEATRLKRTARRRYTRRKNRICYLQEIFSNEMAKVDDSFFHRLEESFLVEEDKKHERHPIFGNIVDEVAYHEKYPTIYHLRKKLVDSTDKADLRLIYLALAHMIKFRGHFLIEGDLNPDNSDVDKLFIQLVQTYNQLFEENPINASGVDAKAILSARLSKSRRLENLIAQLPGEKKNGLFGNLIALSLGLTPNFKSNFDLAEDAKLQLSKDTYDDDLDNLLAQIGDQYADLFLAAKNLSDAILLSDILRVNTEITKAPLSASMIKRYDEHHQDLTLLKALVRQQLPEKYKEIFFDQSKNGYAGYIDGGASQEEFYKFIKPILEKMDGTEELLVKLNREDLLRKQRTFDNGSIPHQIHLGELHAILRRQEDFYPFLKDNREKIEKILTFRIPYYVGPLARGNSRFAWMTRKSEETITPWNFEEVVDKGASAQSFIERMTNFDKNLPNEKVLPKHSLLYEYFTVYNELTKVKYVTEGMRKPAFLSGEQKKAIVDLLFKTNRKVTVKQLKEDYFKKIECFDSVEISGVEDRFNASLGTYHDLLKIIKDKDFLDNEENEDILEDIVLTLTLFEDREMIEERLKTYAHLFDDKVMKQLKRRRYTGWGRLSRKLINGIRDKQSGKTILDFLKSDGFANRNFMQLIHDDSLTFKEDIQKAQVSGQGDSLHEHIANLAGSPAIKKGILQTVKVVDELVKVMGRHKPENIVIEMARENQTTQKGQKNSRERMKRIEEGIKELGSQILKEHPVENTQLQNEKLYLYYLQNGRDMYVDQELDINRLSDYDVDHIVPQSFLKDDSIDNKVLTRSDKARGKSDNVPSEEVVKKMKNYWRQLLNAKLITQRKFDNLTKAERGGLSELDKAGFIKRQLVETRQITKHVAQILDSRMNTKYDENDKLIREVKVITLKSKLVSDFRKDFQFYKVREINNYHHAHDAYLNAVVGTALIKKYPKLESEFVYGDYKVYDVRKMIAKSEQEIGKATAKYFFYSNIMNFFKTEITLANGEIRKRPLIETNGETGEIVWDKGRDFATVRKVLSMPQVNIVKKTEVQTGGFSKESILPKRNSDKLIARKKDWDPKKYGGFDSPTVAYSVLVVAKVEKGKSKKLKSVKELLGITIMERSSFEKNPIDFLEAKGYKEVKKDLIIKLPKYSLFELENGRKRMLASAGELQKGNELALPSKYVNFLYLASHYEKLKGSPEDNEQKQLFVEQHKHYLDEIIEQISEFSKRVILADANLDKVLSAYNKHRDKPIREQAENIIHLFTLTNLGAPAAFKYFDTTIDRKRYTSTKEVLDATLIHQSITGLYETRIDLSQLGGDGGPAPGGTLNIEDEYRLHETSKEPDVSLGSTWLSDFPQAWAETGGMGLAVRQAPLIIPLKATSTPVSIKQYPMSQEARLGIKPHIQRLLDQGILVPCQSPWNTPLLPVKKPGTNDYRPVQDLREVNKRVEDIHPTVPNPYNLLSGLPPSHQWYTVLDLKDAFFCLRLHPTSQPLFAFEWRDPEMGISGQLTWTRLPQGFKNSPTLFNEALHRDLADFRIQHPDLILLQYVDDLLLAATSELDCQQGTRALLQTLGNLGYRASAKKAQICQKQVKYLGYLLKEGQRWLTEARKETVMGQPTPKTPRQLREFLGKAGFCRLFIPGFAEMAAPLYPLTKPGTLFNWGPDQQKAYQEIKQALLTAPALGLPDLTKPFELFVDEKQGYAKGVLTQKLGPWRRPVAYLSKKLDPVAAGWPPCLRMVAAIAVLTKDAGKLTMGQPLVILAPHAVEALVKQPPDRWLSNARMTHYQALLLDTDRVQFGPVVALNPATLLPLPEEGLQHNCLDILAEAHGTRPDLTDQPLPDADHTWYTDGSSLLQEGQRKAGAAVTTETEVIWAKALPAGTSAQRAELIALTQALKMAEGKKLNVYTDSRYAFATAHIHGEIYRRRGWLTSEGKEIKNKDEILALLKALFLPKRLSIIHCPGHQKGHSAEARGNRMADQAARKAAITETPDTSTLLIENSSPSGGSKRTADGSEFEAGKRTADGSEFEKRTADGSEFESPKKKAKVE

SEQ ID NO: 2625 - protein, 2113 aa, synthetic construct
  source 1..2113: note = Description of Artificial Sequence: Synthetic polypeptide
MPAAKRVKLDGGDKKYSIGLDIGTNSVGWAVITDEYKVPSKKFKVLGNTDRHSIKKNLIGALLFDSGETAEATRLKRTARRRYTRRKNRICYLQEIFSNEMAKVDDSFFHRLEESFLVEEDKKHERHPIFGNIVDEVAYHEKYPTIYHLRKKLVDSTDKADLRLIYLALAHMIKFRGHFLIEGDLNPDNSDVDKLFIQLVQTYNQLFEENPINASGVDAKAILSARLSKSRRLENLIAQLPGEKKNGLFGNLIALSLGLTPNFKSNFDLAEDAKLQLSKDTYDDDLDNLLAQIGDQYADLFLAAKNLSDAILLSDILRVNTEITKAPLSASMIKRYDEHHQDLTLLKALVRQQLPEKYKEIFFDQSKNGYAGYIDGGASQEEFYKFIKPILEKMDGTEELLVKLNREDLLRKQRTFDNGSIPHQIHLGELHAILRRQEDFYPFLKDNREKIEKILTFRIPYYVGPLARGNSRFAWMTRKSEETITPWNFEEVVDKGASAQSFIERMTNFDKNLPNEKVLPKHSLLYEYFTVYNELTKVKYVTEGMRKPAFLSGEQKKAIVDLLFKTNRKVTVKQLKEDYFKKIECFDSVEISGVEDRFNASLGTYHDLLKIIKDKDFLDNEENEDILEDIVLTLTLFEDREMIEERLKTYAHLFDDKVMKQLKRRRYTGWGRLSRKLINGIRDKQSGKTILDFLKSDGFANRNFMQLIHDDSLTFKEDIQKAQVSGQGDSLHEHIANLAGSPAIKKGILQTVKVVDELVKVMGRHKPENIVIEMARENQTTQKGQKNSRERMKRIEEGIKELGSQILKEHPVENTQLQNEKLYLYYLQNGRDMYVDQELDINRLSDYDVDHIVPQSFLKDDSIDNKVLTRSDKARGKSDNVPSEEVVKKMKNYWRQLLNAKLITQRKFDNLTKAERGGLSELDKAGFIKRQLVETRQITKHVAQILDSRMNTKYDENDKLIREVKVITLKSKLVSDFRKDFQFYKVREINNYHHAHDAYLNAVVGTALIKKYPKLESEFVYGDYKVYDVRKMIAKSEQEIGKATAKYFFYSNIMNFFKTEITLANGEIRKRPLIETNGETGEIVWDKGRDFATVRKVLSMPQVNIVKKTEVQTGGFSKESILPKRNSDKLIARKKDWDPKKYGGFDSPTVAYSVLVVAKVEKGKSKKLKSVKELLGITIMERSSFEKNPIDFLEAKGYKEVKKDLIIKLPKYSLFELENGRKRMLASAGELQKGNELALPSKYVNFLYLASHYEKLKGSPEDNEQKQLFVEQHKHYLDEIIEQISEFSKRVILADANLDKVLSAYNKHRDKPIREQAENIIHLFTLTNLGAPAAFKYFDTTIDRKRYTSTKEVLDATLIHQSITGLYETRIDLSQLGGDGGEAAAKGSSGGTLNIEDEYRLHETSKEPDVSLGSTWLSDFPQAWAETGGMGLAVRQAPLIIPLKATSTPVSIKQYPMSQEARLGIKPHIQRLLDQGILVPCQSPWNTPLLPVKKPGTNDYRPVQDLREVNKRVEDIHPTVPNPYNLLSGLPPSHQWYTVLDLKDAFFCLRLHPTSQPLFAFEWRDPEMGISGQLTWTRLPQGFKNSPTLFNEALHRDLADFRIQHPDLILLQYVDDLLLAATSELDCQQGTRALLQTLGNLGYRASAKKAQICQKQVKYLGYLLKEGQRWLTEARKETVMGQPTPKTPRQLREFLGKAGFCRLFIPGFAEMAAPLYPLTKPGTLFNWGPDQQKAYQEIKQALLTAPALGLPDLTKPFELFVDEKQGYAKGVLTQKLGPWRRPVAYLSKKLDPVAAGWPPCLRMVAAIAVLTKDAGKLTMGQPLVILAPHAVEALVKQPPDRWLSNARMTHYQALLLDTDRVQFGPVVALNPATLLPLPEEGLQHNCLDILAEAHGTRPDLTDQPLPDADHTWYTDGSSLLQEGQRKAGAAVTTETEVIWAKALPAGTSAQRAELIALTQALKMAEGKKLNVYTDSRYAFATAHIHGEIYRRRGWLTSEGKEIKNKDEILALLKALFLPKRLSIIHCPGHQKGHSAEARGNRMADQAARKAAITETPDTSTLLIENSSPSGGSKRTADGSEFEAGKRTADGSEFEKRTADGSEFESPKKKAKVE

SEQ ID NO: 2626 - protein, 2113 aa, synthetic construct
  source 1..2113: note = Description of Artificial Sequence: Synthetic polypeptide
MPAAKRVKLDGGDKKYSIGLDIGTNSVGWAVITDEYKVPSKKFKVLGNTDRHSIKKNLIGALLFDSGETAEATRLKRTARRRYTRRKNRICYLQEIFSNEMAKVDDSFFHRLEESFLVEEDKKHERHPIFGNIVDEVAYHEKYPTIYHLRKKLVDSTDKADLRLIYLALAHMIKFRGHFLIEGDLNPDNSDVDKLFIQLVQTYNQLFEENPINASGVDAKAILSARLSKSRRLENLIAQLPGEKKNGLFGNLIALSLGLTPNFKSNFDLAEDAKLQLSKDTYDDDLDNLLAQIGDQYADLFLAAKNLSDAILLSDILRVNTEITKAPLSASMIKRYDEHHQDLTLLKALVRQQLPEKYKEIFFDQSKNGYAGYIDGGASQEEFYKFIKPILEKMDGTEELLVKLNREDLLRKQRTFDNGSIPHQIHLGELHAILRRQEDFYPFLKDNREKIEKILTFRIPYYVGPLARGNSRFAWMTRKSEETITPWNFEEVVDKGASAQSFIERMTNFDKNLPNEKVLPKHSLLYEYFTVYNELTKVKYVTEGMRKPAFLSGEQKKAIVDLLFKTNRKVTVKQLKEDYFKKIECFDSVEISGVEDRFNASLGTYHDLLKIIKDKDFLDNEENEDILEDIVLTLTLFEDREMIEERLKTYAHLFDDKVMKQLKRRRYTGWGRLSRKLINGIRDKQSGKTILDFLKSDGFANRNFMQLIHDDSLTFKEDIQKAQVSGQGDSLHEHIANLAGSPAIKKGILQTVKVVDELVKVMGRHKPENIVIEMARENQTTQKGQKNSRERMKRIEEGIKELGSQILKEHPVENTQLQNEKLYLYYLQNGRDMYVDQELDINRLSDYDVDHIVPQSFLKDDSIDNKVLTRSDKARGKSDNVPSEEVVKKMKNYWRQLLNAKLITQRKFDNLTKAERGGLSELDKAGFIKRQLVETRQITKHVAQILDSRMNTKYDENDKLIREVKVITLKSKLVSDFRKDFQFYKVREINNYHHAHDAYLNAVVGTALIKKYPKLESEFVYGDYKVYDVRKMIAKSEQEIGKATAKYFFYSNIMNFFKTEITLANGEIRKRPLIETNGETGEIVWDKGRDFATVRKVLSMPQVNIVKKTEVQTGGFSKESILPKRNSDKLIARKKDWDPKKYGGFDSPTVAYSVLVVAKVEKGKSKKLKSVKELLGITIMERSSFEKNPIDFLEAKGYKEVKKDLIIKLPKYSLFELENGRKRMLASAGELQKGNELALPSKYVNFLYLASHYEKLKGSPEDNEQKQLFVEQHKHYLDEIIEQISEFSKRVILADANLDKVLSAYNKHRDKPIREQAENIIHLFTLTNLGAPAAFKYFDTTIDRKRYTSTKEVLDATLIHQSITGLYETRIDLSQLGGDGGGGGGGGGGGGTLNIEDEYRLHETSKEPDVSLGSTWLSDFPQAWAETGGMGLAVRQAPLIIPLKATSTPVSIKQYPMSQEARLGIKPHIQRLLDQGILVPCQSPWNTPLLPVKKPGTNDYRPVQDLREVNKRVEDIHPTVPNPYNLLSGLPPSHQWYTVLDLKDAFFCLRLHPTSQPLFAFEWRDPEMGISGQLTWTRLPQGFKNSPTLFNEALHRDLADFRIQHPDLILLQYVDDLLLAATSELDCQQGTRALLQTLGNLGYRASAKKAQICQKQVKYLGYLLKEGQRWLTEARKETVMGQPTPKTPRQLREFLGKAGFCRLFIPGFAEMAAPLYPLTKPGTLFNWGPDQQKAYQEIKQALLTAPALGLPDLTKPFELFVDEKQGYAKGVLTQKLGPWRRPVAYLSKKLDPVAAGWPPCLRMVAAIAVLTKDAGKLTMGQPLVILAPHAVEALVKQPPDRWLSNARMTHYQALLLDTDRVQFGPVVALNPATLLPLPEEGLQHNCLDILAEAHGTRPDLTDQPLPDADHTWYTDGSSLLQEGQRKAGAAVTTETEVIWAKALPAGTSAQRAELIALTQALKMAEGKKLNVYTDSRYAFATAHIHGEIYRRRGWLTSEGKEIKNKDEILALLKALFLPKRLSIIHCPGHQKGHSAEARGNRMADQAARKAAITETPDTSTLLIENSSPSGGSKRTADGSEFEAGKRTADGSEFEKRTADGSEFESPKKKAKVE

SEQ ID NO: 2627 - protein, 2120 aa, synthetic construct
  source 1..2120: note = Description of Artificial Sequence: Synthetic polypeptide
MPAAKRVKLDGGDKKYSIGLDIGTNSVGWAVITDEYKVPSKKFKVLGNTDRHSIKKNLIGALLFDSGETAEATRLKRTARRRYTRRKNRICYLQEIFSNEMAKVDDSFFHRLEESFLVEEDKKHERHPIFGNIVDEVAYHEKYPTIYHLRKKLVDSTDKADLRLIYLALAHMIKFRGHFLIEGDLNPDNSDVDKLFIQLVQTYNQLFEENPINASGVDAKAILSARLSKSRRLENLIAQLPGEKKNGLFGNLIALSLGLTPNFKSNFDLAEDAKLQLSKDTYDDDLDNLLAQIGDQYADLFLAAKNLSDAILLSDILRVNTEITKAPLSASMIKRYDEHHQDLTLLKALVRQQLPEKYKEIFFDQSKNGYAGYIDGGASQEEFYKFIKPILEKMDGTEELLVKLNREDLLRKQRTFDNGSIPHQIHLGELHAILRRQEDFYPFLKDNREKIEKILTFRIPYYVGPLARGNSRFAWMTRKSEETITPWNFEEVVDKGASAQSFIERMTNFDKNLPNEKVLPKHSLLYEYFTVYNELTKVKYVTEGMRKPAFLSGEQKKAIVDLLFKTNRKVTVKQLKEDYFKKIECFDSVEISGVEDRFNASLGTYHDLLKIIKDKDFLDNEENEDILEDIVLTLTLFEDREMIEERLKTYAHLFDDKVMKQLKRRRYTGWGRLSRKLINGIRDKQSGKTILDFLKSDGFANRNFMQLIHDDSLTFKEDIQKAQVSGQGDSLHEHIANLAGSPAIKKGILQTVKVVDELVKVMGRHKPENIVIEMARENQTTQKGQKNSRERMKRIEEGIKELGSQILKEHPVENTQLQNEKLYLYYLQNGRDMYVDQELDINRLSDYDVDHIVPQSFLKDDSIDNKVLTRSDKARGKSDNVPSEEVVKKMKNYWRQLLNAKLITQRKFDNLTKAERGGLSELDKAGFIKRQLVETRQITKHVAQILDSRMNTKYDENDKLIREVKVITLKSKLVSDFRKDFQFYKVREINNYHHAHDAYLNAVVGTALIKKYPKLESEFVYGDYKVYDVRKMIAKSEQEIGKATAKYFFYSNIMNFFKTEITLANGEIRKRPLIETNGETGEIVWDKGRDFATVRKVLSMPQVNIVKKTEVQTGGFSKESILPKRNSDKLIARKKDWDPKKYGGFDSPTVAYSVLVVAKVEKGKSKKLKSVKELLGITIMERSSFEKNPIDFLEAKGYKEVKKDLIIKLPKYSLFELENGRKRMLASAGELQKGNELALPSKYVNFLYLASHYEKLKGSPEDNEQKQLFVEQHKHYLDEIIEQISEFSKRVILADANLDKVLSAYNKHRDKPIREQAENIIHLFTLTNLGAPAAFKYFDTTIDRKRYTSTKEVLDATLIHQSITGLYETRIDLSQLGGDGGEAAAKEAAAKEAAAKGGTLNIEDEYRLHETSKEPDVSLGSTWLSDFPQAWAETGGMGLAVRQAPLIIPLKATSTPVSIKQYPMSQEARLGIKPHIQRLLDQGILVPCQSPWNTPLLPVKKPGTNDYRPVQDLREVNKRVEDIHPTVPNPYNLLSGLPPSHQWYTVLDLKDAFFCLRLHPTSQPLFAFEWRDPEMGISGQLTWTRLPQGFKNSPTLFNEALHRDLADFRIQHPDLILLQYVDDLLLAATSELDCQQGTRALLQTLGNLGYRASAKKAQICQKQVKYLGYLLKEGQRWLTEARKETVMGQPTPKTPRQLREFLGKAGFCRLFIPGFAEMAAPLYPLTKPGTLFNWGPDQQKAYQEIKQALLTAPALGLPDLTKPFELFVDEKQGYAKGVLTQKLGPWRRPVAYLSKKLDPVAAGWPPCLRMVAAIAVLTKDAGKLTMGQPLVILAPHAVEALVKQPPDRWLSNARMTHYQALLLDTDRVQFGPVVALNPATLLPLPEEGLQHNCLDILAEAHGTRPDLTDQPLPDADHTWYTDGSSLLQEGQRKAGAAVTTETEVIWAKALPAGTSAQRAELIALTQALKMAEGKKLNVYTDSRYAFATAHIHGEIYRRRGWLTSEGKEIKNKDEILALLKALFLPKRLSIIHCPGHQKGHSAEARGNRMADQAARKAAITETPDTSTLLIENSSPSGGSKRTADGSEFEAGKRTADGSEFEKRTADGSEFESPKKKAKVE

SEQ ID NO: 2628 - protein, 2116 aa, synthetic construct
  source 1..2116: note = Description of Artificial Sequence: Synthetic polypeptide
MPAAKRVKLDGGDKKYSIGLDIGTNSVGWAVITDEYKVPSKKFKVLGNTDRHSIKKNLIGALLFDSGETAEATRLKRTARRRYTRRKNRICYLQEIFSNEMAKVDDSFFHRLEESFLVEEDKKHERHPIFGNIVDEVAYHEKYPTIYHLRKKLVDSTDKADLRLIYLALAHMIKFRGHFLIEGDLNPDNSDVDKLFIQLVQTYNQLFEENPINASGVDAKAILSARLSKSRRLENLIAQLPGEKKNGLFGNLIALSLGLTPNFKSNFDLAEDAKLQLSKDTYDDDLDNLLAQIGDQYADLFLAAKNLSDAILLSDILRVNTEITKAPLSASMIKRYDEHHQDLTLLKALVRQQLPEKYKEIFFDQSKNGYAGYIDGGASQEEFYKFIKPILEKMDGTEELLVKLNREDLLRKQRTFDNGSIPHQIHLGELHAILRRQEDFYPFLKDNREKIEKILTFRIPYYVGPLARGNSRFAWMTRKSEETITPWNFEEVVDKGASAQSFIERMTNFDKNLPNEKVLPKHSLLYEYFTVYNELTKVKYVTEGMRKPAFLSGEQKKAIVDLLFKTNRKVTVKQLKEDYFKKIECFDSVEISGVEDRFNASLGTYHDLLKIIKDKDFLDNEENEDILEDIVLTLTLFEDREMIEERLKTYAHLFDDKVMKQLKRRRYTGWGRLSRKLINGIRDKQSGKTILDFLKSDGFANRNFMQLIHDDSLTFKEDIQKAQVSGQGDSLHEHIANLAGSPAIKKGILQTVKVVDELVKVMGRHKPENIVIEMARENQTTQKGQKNSRERMKRIEEGIKELGSQILKEHPVENTQLQNEKLYLYYLQNGRDMYVDQELDINRLSDYDVDHIVPQSFLKDDSIDNKVLTRSDKARGKSDNVPSEEVVKKMKNYWRQLLNAKLITQRKFDNLTKAERGGLSELDKAGFIKRQLVETRQITKHVAQILDSRMNTKYDENDKLIREVKVITLKSKLVSDFRKDFQFYKVREINNYHHAHDAYLNAVVGTALIKKYPKLESEFVYGDYKVYDVRKMIAKSEQEIGKATAKYFFYSNIMNFFKTEITLANGEIRKRPLIETNGETGEIVWDKGRDFATVRKVLSMPQVNIVKKTEVQTGGFSKESILPKRNSDKLIARKKDWDPKKYGGFDSPTVAYSVLVVAKVEKGKSKKLKSVKELLGITIMERSSFEKNPIDFLEAKGYKEVKKDLIIKLPKYSLFELENGRKRMLASAGELQKGNELALPSKYVNFLYLASHYEKLKGSPEDNEQKQLFVEQHKHYLDEIIEQISEFSKRVILADANLDKVLSAYNKHRDKPIREQAENIIHLFTLTNLGAPAAFKYFDTTIDRKRYTSTKEVLDATLIHQSITGLYETRIDLSQLGGDGGEAAAKPAPGSSGGTLNIEDEYRLHETSKEPDVSLGSTWLSDFPQAWAETGGMGLAVRQAPLIIPLKATSTPVSIKQYPMSQEARLGIKPHIQRLLDQGILVPCQSPWNTPLLPVKKPGTNDYRPVQDLREVNKRVEDIHPTVPNPYNLLSGLPPSHQWYTVLDLKDAFFCLRLHPTSQPLFAFEWRDPEMGISGQLTWTRLPQGFKNSPTLFNEALHRDLADFRIQHPDLILLQYVDDLLLAATSELDCQQGTRALLQTLGNLGYRASAKKAQICQKQVKYLGYLLKEGQRWLTEARKETVMGQPTPKTPRQLREFLGKAGFCRLFIPGFAEMAAPLYPLTKPGTLFNWGPDQQKAYQEIKQALLTAPALGLPDLTKPFELFVDEKQGYAKGVLTQKLGPWRRPVAYLSKKLDPVAAGWPPCLRMVAAIAVLTKDAGKLTMGQPLVILAPHAVEALVKQPPDRWLSNARMTHYQALLLDTDRVQFGPVVALNPATLLPLPEEGLQHNCLDILAEAHGTRPDLTDQPLPDADHTWYTDGSSLLQEGQRKAGAAVTTETEVIWAKALPAGTSAQRAELIALTQALKMAEGKKLNVYTDSRYAFATAHIHGEIYRRRGWLTSEGKEIKNKDEILALLKALFLPKRLSIIHCPGHQKGHSAEARGNRMADQAARKAAITETPDTSTLLIENSSPSGGSKRTADGSEFEAGKRTADGSEFEKRTADGSEFESPKKKAKVE

SEQ ID NO: 2629 - protein, 2116 aa, synthetic construct
  source 1..2116: note = Description of Artificial Sequence: Synthetic polypeptide
MPAAKRVKLDGGDKKYSIGLDIGTNSVGWAVITDEYKVPSKKFKVLGNTDRHSIKKNLIGALLFDSGETAEATRLKRTARRRYTRRKNRICYLQEIFSNEMAKVDDSFFHRLEESFLVEEDKKHERHPIFGNIVDEVAYHEKYPTIYHLRKKLVDSTDKADLRLIYLALAHMIKFRGHFLIEGDLNPDNSDVDKLFIQLVQTYNQLFEENPINASGVDAKAILSARLSKSRRLENLIAQLPGEKKNGLFGNLIALSLGLTPNFKSNFDLAEDAKLQLSKDTYDDDLDNLLAQIGDQYADLFLAAKNLSDAILLSDILRVNTEITKAPLSASMIKRYDEHHQDLTLLKALVRQQLPEKYKEIFFDQSKNGYAGYIDGGASQEEFYKFIKPILEKMDGTEELLVKLNREDLLRKQRTFDNGSIPHQIHLGELHAILRRQEDFYPFLKDNREKIEKILTFRIPYYVGPLARGNSRFAWMTRKSEETITPWNFEEVVDKGASAQSFIERMTNFDKNLPNEKVLPKHSLLYEYFTVYNELTKVKYVTEGMRKPAFLSGEQKKAIVDLLFKTNRKVTVKQLKEDYFKKIECFDSVEISGVEDRFNASLGTYHDLLKIIKDKDFLDNEENEDILEDIVLTLTLFEDREMIEERLKTYAHLFDDKVMKQLKRRRYTGWGRLSRKLINGIRDKQSGKTILDFLKSDGFANRNFMQLIHDDSLTFKEDIQKAQVSGQGDSLHEHIANLAGSPAIKKGILQTVKVVDELVKVMGRHKPENIVIEMARENQTTQKGQKNSRERMKRIEEGIKELGSQILKEHPVENTQLQNEKLYLYYLQNGRDMYVDQELDINRLSDYDVDHIVPQSFLKDDSIDNKVLTRSDKARGKSDNVPSEEVVKKMKNYWRQLLNAKLITQRKFDNLTKAERGGLSELDKAGFIKRQLVETRQITKHVAQILDSRMNTKYDENDKLIREVKVITLKSKLVSDFRKDFQFYKVREINNYHHAHDAYLNAVVGTALIKKYPKLESEFVYGDYKVYDVRKMIAKSEQEIGKATAKYFFYSNIMNFFKTEITLANGEIRKRPLIETNGETGEIVWDKGRDFATVRKVLSMPQVNIVKKTEVQTGGFSKESILPKRNSDKLIARKKDWDPKKYGGFDSPTVAYSVLVVAKVEKGKSKKLKSVKELLGITIMERSSFEKNPIDFLEAKGYKEVKKDLIIKLPKYSLFELENGRKRMLASAGELQKGNELALPSKYVNFLYLASHYEKLKGSPEDNEQKQLFVEQHKHYLDEIIEQISEFSKRVILADANLDKVLSAYNKHRDKPIREQAENIIHLFTLTNLGAPAAFKYFDTTIDRKRYTSTKEVLDATLIHQSITGLYETRIDLSQLGGDGGGGSEAAAKGGGGGTLNIEDEYRLHETSKEPDVSLGSTWLSDFPQAWAETGGMGLAVRQAPLIIPLKATSTPVSIKQYPMSQEARLGIKPHIQRLLDQGILVPCQSPWNTPLLPVKKPGTNDYRPVQDLREVNKRVEDIHPTVPNPYNLLSGLPPSHQWYTVLDLKDAFFCLRLHPTSQPLFAFEWRDPEMGISGQLTWTRLPQGFKNSPTLFNEALHRDLADFRIQHPDLILLQYVDDLLLAATSELDCQQGTRALLQTLGNLGYRASAKKAQICQKQVKYLGYLLKEGQRWLTEARKETVMGQPTPKTPRQLREFLGKAGFCRLFIPGFAEMAAPLYPLTKPGTLFNWGPDQQKAYQEIKQALLTAPALGLPDLTKPFELFVDEKQGYAKGVLTQKLGPWRRPVAYLSKKLDPVAAGWPPCLRMVAAIAVLTKDAGKLTMGQPLVILAPHAVEALVKQPPDRWLSNARMTHYQALLLDTDRVQFGPVVALNPATLLPLPEEGLQHNCLDILAEAHGTRPDLTDQPLPDADHTWYTDGSSLLQEGQRKAGAAVTTETEVIWAKALPAGTSAQRAELIALTQALKMAEGKKLNVYTDSRYAFATAHIHGEIYRRRGWLTSEGKEIKNKDEILALLKALFLPKRLSIIHCPGHQKGHSAEARGNRMADQAARKAAITETPDTSTLLIENSSPSGGSKRTADGSEFEAGKRTADGSEFEKRTADGSEFESPKKKAKVE

SEQ ID NO: 2630 - protein, 2135 aa, synthetic construct
  source 1..2135: note = Description of Artificial Sequence: Synthetic polypeptide
MPAAKRVKLDGGDKKYSIGLDIGTNSVGWAVITDEYKVPSKKFKVLGNTDRHSIKKNLIGALLFDSGETAEATRLKRTARRRYTRRKNRICYLQEIFSNEMAKVDDSFFHRLEESFLVEEDKKHERHPIFGNIVDEVAYHEKYPTIYHLRKKLVDSTDKADLRLIYLALAHMIKFRGHFLIEGDLNPDNSDVDKLFIQLVQTYNQLFEENPINASGVDAKAILSARLSKSRRLENLIAQLPGEKKNGLFGNLIALSLGLTPNFKSNFDLAEDAKLQLSKDTYDDDLDNLLAQIGDQYADLFLAAKNLSDAILLSDILRVNTEITKAPLSASMIKRYDEHHQDLTLLKALVRQQLPEKYKEIFFDQSKNGYAGYIDGGASQEEFYKFIKPILEKMDGTEELLVKLNREDLLRKQRTFDNGSIPHQIHLGELHAILRRQEDFYPFLKDNREKIEKILTFRIPYYVGPLARGNSRFAWMTRKSEETITPWNFEEVVDKGASAQSFIERMTNFDKNLPNEKVLPKHSLLYEYFTVYNELTKVKYVTEGMRKPAFLSGEQKKAIVDLLFKTNRKVTVKQLKEDYFKKIECFDSVEISGVEDRFNASLGTYHDLLKIIKDKDFLDNEENEDILEDIVLTLTLFEDREMIEERLKTYAHLFDDKVMKQLKRRRYTGWGRLSRKLINGIRDKQSGKTILDFLKSDGFANRNFMQLIHDDSLTFKEDIQKAQVSGQGDSLHEHIANLAGSPAIKKGILQTVKVVDELVKVMGRHKPENIVIEMARENQTTQKGQKNSRERMKRIEEGIKELGSQILKEHPVENTQLQNEKLYLYYLQNGRDMYVDQELDINRLSDYDVDHIVPQSFLKDDSIDNKVLTRSDKARGKSDNVPSEEVVKKMKNYWRQLLNAKLITQRKFDNLTKAERGGLSELDKAGFIKRQLVETRQITKHVAQILDSRMNTKYDENDKLIREVKVITLKSKLVSDFRKDFQFYKVREINNYHHAHDAYLNAVVGTALIKKYPKLESEFVYGDYKVYDVRKMIAKSEQEIGKATAKYFFYSNIMNFFKTEITLANGEIRKRPLIETNGETGEIVWDKGRDFATVRKVLSMPQVNIVKKTEVQTGGFSKESILPKRNSDKLIARKKDWDPKKYGGFDSPTVAYSVLVVAKVEKGKSKKLKSVKELLGITIMERSSFEKNPIDFLEAKGYKEVKKDLIIKLPKYSLFELENGRKRMLASAGELQKGNELALPSKYVNFLYLASHYEKLKGSPEDNEQKQLFVEQHKHYLDEIIEQISEFSKRVILADANLDKVLSAYNKHRDKPIREQAENIIHLFTLTNLGAPAAFKYFDTTIDRKRYTSTKEVLDATLIHQSITGLYETRIDLSQLGGDGGEAAAKEAAAKEAAAKEAAAKEAAAKEAAAKGGTLNIEDEYRLHETSKEPDVSLGSTWLSDFPQAWAETGGMGLAVRQAPLIIPLKATSTPVSIKQYPMSQEARLGIKPHIQRLLDQGILVPCQSPWNTPLLPVKKPGTNDYRPVQDLREVNKRVEDIHPTVPNPYNLLSGLPPSHQWYTVLDLKDAFFCLRLHPTSQPLFAFEWRDPEMGISGQLTWTRLPQGFKNSPTLFNEALHRDLADFRIQHPDLILLQYVDDLLLAATSELDCQQGTRALLQTLGNLGYRASAKKAQICQKQVKYLGYLLKEGQRWLTEARKETVMGQPTPKTPRQLREFLGKAGFCRLFIPGFAEMAAPLYPLTKPGTLFNWGPDQQKAYQEIKQALLTAPALGLPDLTKPFELFVDEKQGYAKGVLTQKLGPWRRPVAYLSKKLDPVAAGWPPCLRMVAAIAVLTKDAGKLTMGQPLVILAPHAVEALVKQPPDRWLSNARMTHYQALLLDTDRVQFGPVVALNPATLLPLPEEGLQHNCLDILAEAHGTRPDLTDQPLPDADHTWYTDGSSLLQEGQRKAGAAVTTETEVIWAKALPAGTSAQRAELIALTQALKMAEGKKLNVYTDSRYAFATAHIHGEIYRRRGWLTSEGKEIKNKDEILALLKALFLPKRLSIIHCPGHQKGHSAEARGNRMADQAARKAAITETPDTSTLLIENSSPSGGSKRTADGSEFEAGKRTADGSEFEKRTADGSEFESPKKKAKVE

SEQ ID NO: 2631 - protein, 2108 aa, synthetic construct
  source 1..2108: note = Description of Artificial Sequence: Synthetic polypeptide
MPAAKRVKLDGGDKKYSIGLDIGTNSVGWAVITDEYKVPSKKFKVLGNTDRHSIKKNLIGALLFDSGETAEATRLKRTARRRYTRRKNRICYLQEIFSNEMAKVDDSFFHRLEESFLVEEDKKHERHPIFGNIVDEVAYHEKYPTIYHLRKKLVDSTDKADLRLIYLALAHMIKFRGHFLIEGDLNPDNSDVDKLFIQLVQTYNQLFEENPINASGVDAKAILSARLSKSRRLENLIAQLPGEKKNGLFGNLIALSLGLTPNFKSNFDLAEDAKLQLSKDTYDDDLDNLLAQIGDQYADLFLAAKNLSDAILLSDILRVNTEITKAPLSASMIKRYDEHHQDLTLLKALVRQQLPEKYKEIFFDQSKNGYAGYIDGGASQEEFYKFIKPILEKMDGTEELLVKLNREDLLRKQRTFDNGSIPHQIHLGELHAILRRQEDFYPFLKDNREKIEKILTFRIPYYVGPLARGNSRFAWMTRKSEETITPWNFEEVVDKGASAQSFIERMTNFDKNLPNEKVLPKHSLLYEYFTVYNELTKVKYVTEGMRKPAFLSGEQKKAIVDLLFKTNRKVTVKQLKEDYFKKIECFDSVEISGVEDRFNASLGTYHDLLKIIKDKDFLDNEENEDILEDIVLTLTLFEDREMIEERLKTYAHLFDDKVMKQLKRRRYTGWGRLSRKLINGIRDKQSGKTILDFLKSDGFANRNFMQLIHDDSLTFKEDIQKAQVSGQGDSLHEHIANLAGSPAIKKGILQTVKVVDELVKVMGRHKPENIVIEMARENQTTQKGQKNSRERMKRIEEGIKELGSQILKEHPVENTQLQNEKLYLYYLQNGRDMYVDQELDINRLSDYDVDHIVPQSFLKDDSIDNKVLTRSDKARGKSDNVPSEEVVKKMKNYWRQLLNAKLITQRKFDNLTKAERGGLSELDKAGFIKRQLVETRQITKHVAQILDSRMNTKYDENDKLIREVKVITLKSKLVSDFRKDFQFYKVREINNYHHAHDAYLNAVVGTALIKKYPKLESEFVYGDYKVYDVRKMIAKSEQEIGKATAKYFFYSNIMNFFKTEITLANGEIRKRPLIETNGETGEIVWDKGRDFATVRKVLSMPQVNIVKKTEVQTGGFSKESILPKRNSDKLIARKKDWDPKKYGGFDSPTVAYSVLVVAKVEKGKSKKLKSVKELLGITIMERSSFEKNPIDFLEAKGYKEVKKDLIIKLPKYSLFELENGRKRMLASAGELQKGNELALPSKYVNFLYLASHYEKLKGSPEDNEQKQLFVEQHKHYLDEIIEQISEFSKRVILADANLDKVLSAYNKHRDKPIREQAENIIHLFTLTNLGAPAAFKYFDTTIDRKRYTSTKEVLDATLIHQSITGLYETRIDLSQLGGDGGGGSGGTLNIEDEYRLHETSKEPDVSLGSTWLSDFPQAWAETGGMGLAVRQAPLIIPLKATSTPVSIKQYPMSQEARLGIKPHIQRLLDQGILVPCQSPWNTPLLPVKKPGTNDYRPVQDLREVNKRVEDIHPTVPNPYNLLSGLPPSHQWYTVLDLKDAFFCLRLHPTSQPLFAFEWRDPEMGISGQLTWTRLPQGFKNSPTLFNEALHRDLADFRIQHPDLILLQYVDDLLLAATSELDCQQGTRALLQTLGNLGYRASAKKAQICQKQVKYLGYLLKEGQRWLTEARKETVMGQPTPKTPRQLREFLGKAGFCRLFIPGFAEMAAPLYPLTKPGTLFNWGPDQQKAYQEIKQALLTAPALGLPDLTKPFELFVDEKQGYAKGVLTQKLGPWRRPVAYLSKKLDPVAAGWPPCLRMVAAIAVLTKDAGKLTMGQPLVILAPHAVEALVKQPPDRWLSNARMTHYQALLLDTDRVQFGPVVALNPATLLPLPEEGLQHNCLDILAEAHGTRPDLTDQPLPDADHTWYTDGSSLLQEGQRKAGAAVTTETEVIWAKALPAGTSAQRAELIALTQALKMAEGKKLNVYTDSRYAFATAHIHGEIYRRRGWLTSEGKEIKNKDEILALLKALFLPKRLSIIHCPGHQKGHSAEARGNRMADQAARKAAITETPDTSTLLIENSSPSGGSKRTADGSEFEAGKRTADGSEFEKRTADGSEFESPKKKAKVE

SEQ ID NO: 2632 - protein, 2114 aa, synthetic construct
  source 1..2114: note = Description of Artificial Sequence: Synthetic polypeptide
MPAAKRVKLDGGDKKYSIGLDIGTNSVGWAVITDEYKVPSKKFKVLGNTDRHSIKKNLIGALLFDSGETAEATRLKRTARRRYTRRKNRICYLQEIFSNEMAKVDDSFFHRLEESFLVEEDKKHERHPIFGNIVDEVAYHEKYPTIYHLRKKLVDSTDKADLRLIYLALAHMIKFRGHFLIEGDLNPDNSDVDKLFIQLVQTYNQLFEENPINASGVDAKAILSARLSKSRRLENLIAQLPGEKKNGLFGNLIALSLGLTPNFKSNFDLAEDAKLQLSKDTYDDDLDNLLAQIGDQYADLFLAAKNLSDAILLSDILRVNTEITKAPLSASMIKRYDEHHQDLTLLKALVRQQLPEKYKEIFFDQSKNGYAGYIDGGASQEEFYKFIKPILEKMDGTEELLVKLNREDLLRKQRTFDNGSIPHQIHLGELHAILRRQEDFYPFLKDNREKIEKILTFRIPYYVGPLARGNSRFAWMTRKSEETITPWNFEEVVDKGASAQSFIERMTNFDKNLPNEKVLPKHSLLYEYFTVYNELTKVKYVTEGMRKPAFLSGEQKKAIVDLLFKTNRKVTVKQLKEDYFKKIECFDSVEISGVEDRFNASLGTYHDLLKIIKDKDFLDNEENEDILEDIVLTLTLFEDREMIEERLKTYAHLFDDKVMKQLKRRRYTGWGRLSRKLINGIRDKQSGKTILDFLKSDGFANRNFMQLIHDDSLTFKEDIQKAQVSGQGDSLHEHIANLAGSPAIKKGILQTVKVVDELVKVMGRHKPENIVIEMARENQTTQKGQKNSRERMKRIEEGIKELGSQILKEHPVENTQLQNEKLYLYYLQNGRDMYVDQELDINRLSDYDVDHIVPQSFLKDDSIDNKVLTRSDKARGKSDNVPSEEVVKKMKNYWRQLLNAKLITQRKFDNLTKAERGGLSELDKAGFIKRQLVETRQITKHVAQILDSRMNTKYDENDKLIREVKVITLKSKLVSDFRKDFQFYKVREINNYHHAHDAYLNAVVGTALIKKYPKLESEFVYGDYKVYDVRKMIAKSEQEIGKATAKYFFYSNIMNFFKTEITLANGEIRKRPLIETNGETGEIVWDKGRDFATVRKVLSMPQVNIVKKTEVQTGGFSKESILPKRNSDKLIARKKDWDPKKYGGFDSPTVAYSVLVVAKVEKGKSKKLKSVKELLGITIMERSSFEKNPIDFLEAKGYKEVKKDLIIKLPKYSLFELENGRKRMLASAGELQKGNELALPSKYVNFLYLASHYEKLKGSPEDNEQKQLFVEQHKHYLDEIIEQISEFSKRVILADANLDKVLSAYNKHRDKPIREQAENIIHLFTLTNLGAPAAFKYFDTTIDRKRYTSTKEVLDATLIHQSITGLYETRIDLSQLGGDGGGGGGSSGGSGGTLNIEDEYRLHETSKEPDVSLGSTWLSDFPQAWAETGGMGLAVRQAPLIIPLKATSTPVSIKQYPMSQEARLGIKPHIQRLLDQGILVPCQSPWNTPLLPVKKPGTNDYRPVQDLREVNKRVEDIHPTVPNPYNLLSGLPPSHQWYTVLDLKDAFFCLRLHPTSQPLFAFEWRDPEMGISGQLTWTRLPQGFKNSPTLFNEALHRDLADFRIQHPDLILLQYVDDLLLAATSELDCQQGTRALLQTLGNLGYRASAKKAQICQKQVKYLGYLLKEGQRWLTEARKETVMGQPTPKTPRQLREFLGKAGFCRLFIPGFAEMAAPLYPLTKPGTLFNWGPDQQKAYQEIKQALLTAPALGLPDLTKPFELFVDEKQGYAKGVLTQKLGPWRRPVAYLSKKLDPVAAGWPPCLRMVAAIAVLTKDAGKLTMGQPLVILAPHAVEALVKQPPDRWLSNARMTHYQALLLDTDRVQFGPVVALNPATLLPLPEEGLQHNCLDILAEAHGTRPDLTDQPLPDADHTWYTDGSSLLQEGQRKAGAAVTTETEVIWAKALPAGTSAQRAELIALTQALKMAEGKKLNVYTDSRYAFATAHIHGEIYRRRGWLTSEGKEIKNKDEILALLKALFLPKRLSIIHCPGHQKGHSAEARGNRMADQAARKAAITETPDTSTLLIENSSPSGGSKRTADGSEFEAGKRTADGSEFEKRTADGSEFESPKKKAKVE

SEQ ID NO: 2633 - protein, 2114 aa, synthetic construct
  source 1..2114: note = Description of Artificial Sequence: Synthetic polypeptide
MPAAKRVKLDGGDKKYSIGLDIGTNSVGWAVITDEYKVPSKKFKVLGNTDRHSIKKNLIGALLFDSGETAEATRLKRTARRRYTRRKNRICYLQEIFSNEMAKVDDSFFHRLEESFLVEEDKKHERHPIFGNIVDEVAYHEKYPTIYHLRKKLVDSTDKADLRLIYLALAHMIKFRGHFLIEGDLNPDNSDVDKLFIQLVQTYNQLFEENPINASGVDAKAILSARLSKSRRLENLIAQLPGEKKNGLFGNLIALSLGLTPNFKSNFDLAEDAKLQLSKDTYDDDLDNLLAQIGDQYADLFLAAKNLSDAILLSDILRVNTEITKAPLSASMIKRYDEHHQDLTLLKALVRQQLPEKYKEIFFDQSKNGYAGYIDGGASQEEFYKFIKPILEKMDGTEELLVKLNREDLLRKQRTFDNGSIPHQIHLGELHAILRRQEDFYPFLKDNREKIEKILTFRIPYYVGPLARGNSRFAWMTRKSEETITPWNFEEVVDKGASAQSFIERMTNFDKNLPNEKVLPKHSLLYEYFTVYNELTKVKYVTEGMRKPAFLSGEQKKAIVDLLFKTNRKVTVKQLKEDYFKKIECFDSVEISGVEDRFNASLGTYHDLLKIIKDKDFLDNEENEDILEDIVLTLTLFEDREMIEERLKTYAHLFDDKVMKQLKRRRYTGWGRLSRKLINGIRDKQSGKTILDFLKSDGFANRNFMQLIHDDSLTFKEDIQKAQVSGQGDSLHEHIANLAGSPAIKKGILQTVKVVDELVKVMGRHKPENIVIEMARENQTTQKGQKNSRERMKRIEEGIKELGSQILKEHPVENTQLQNEKLYLYYLQNGRDMYVDQELDINRLSDYDVDHIVPQSFLKDDSIDNKVLTRSDKARGKSDNVPSEEVVKKMKNYWRQLLNAKLITQRKFDNLTKAERGGLSELDKAGFIKRQLVETRQITKHVAQILDSRMNTKYDENDKLIREVKVITLKSKLVSDFRKDFQFYKVREINNYHHAHDAYLNAVVGTALIKKYPKLESEFVYGDYKVYDVRKMIAKSEQEIGKATAKYFFYSNIMNFFKTEITLANGEIRKRPLIETNGETGEIVWDKGRDFATVRKVLSMPQVNIVKKTEVQTGGFSKESILPKRNSDKLIARKKDWDPKKYGGFDSPTVAYSVLVVAKVEKGKSKKLKSVKELLGITIMERSSFEKNPIDFLEAKGYKEVKKDLIIKLPKYSLFELENGRKRMLASAGELQKGNELALPSKYVNFLYLASHYEKLKGSPEDNEQKQLFVEQHKHYLDEIIEQISEFSKRVILADANLDKVLSAYNKHRDKPIREQAENIIHLFTLTNLGAPAAFKYFDTTIDRKRYTSTKEVLDATLIHQSITGLYETRIDLSQLGGDGGGSSPAPGGGGGTLNIEDEYRLHETSKEPDVSLGSTWLSDFPQAWAETGGMGLAVRQAPLIIPLKATSTPVSIKQYPMSQEARLGIKPHIQRLLDQGILVPCQSPWNTPLLPVKKPGTNDYRPVQDLREVNKRVEDIHPTVPNPYNLLSGLPPSHQWYTVLDLKDAFFCLRLHPTSQPLFAFEWRDPEMGISGQLTWTRLPQGFKNSPTLFNEALHRDLADFRIQHPDLILLQYVDDLLLAATSELDCQQGTRALLQTLGNLGYRASAKKAQICQKQVKYLGYLLKEGQRWLTEARKETVMGQPTPKTPRQLREFLGKAGFCRLFIPGFAEMAAPLYPLTKPGTLFNWGPDQQKAYQEIKQALLTAPALGLPDLTKPFELFVDEKQGYAKGVLTQKLGPWRRPVAYLSKKLDPVAAGWPPCLRMVAAIAVLTKDAGKLTMGQPLVILAPHAVEALVKQPPDRWLSNARMTHYQALLLDTDRVQFGPVVALNPATLLPLPEEGLQHNCLDILAEAHGTRPDLTDQPLPDADHTWYTDGSSLLQEGQRKAGAAVTTETEVIWAKALPAGTSAQRAELIALTQALKMAEGKKLNVYTDSRYAFATAHIHGEIYRRRGWLTSEGKEIKNKDEILALLKALFLPKRLSIIHCPGHQKGHSAEARGNRMADQAARKAAITETPDTSTLLIENSSPSGGSKRTADGSEFEAGKRTADGSEFEKRTADGSEFESPKKKAKVE

SEQ ID NO: 2634 - protein, 2114 aa, synthetic construct
  source 1..2114: note = Description of Artificial Sequence: Synthetic polypeptide
MPAAKRVKLDGGDKKYSIGLDIGTNSVGWAVITDEYKVPSKKFKVLGNTDRHSIKKNLIGALLFDSGETAEATRLKRTARRRYTRRKNRICYLQEIFSNEMAKVDDSFFHRLEESFLVEEDKKHERHPIFGNIVDEVAYHEKYPTIYHLRKKLVDSTDKADLRLIYLALAHMIKFRGHFLIEGDLNPDNSDVDKLFIQLVQTYNQLFEENPINASGVDAKAILSARLSKSRRLENLIAQLPGEKKNGLFGNLIALSLGLTPNFKSNFDLAEDAKLQLSKDTYDDDLDNLLAQIGDQYADLFLAAKNLSDAILLSDILRVNTEITKAPLSASMIKRYDEHHQDLTLLKALVRQQLPEKYKEIFFDQSKNGYAGYIDGGASQEEFYKFIKPILEKMDGTEELLVKLNREDLLRKQRTFDNGSIPHQIHLGELHAILRRQEDFYPFLKDNREKIEKILTFRIPYYVGPLARGNSRFAWMTRKSEETITPWNFEEVVDKGASAQSFIERMTNFDKNLPNEKVLPKHSLLYEYFTVYNELTKVKYVTEGMRKPAFLSGEQKKAIVDLLFKTNRKVTVKQLKEDYFKKIECFDSVEISGVEDRFNASLGTYHDLLKIIKDKDFLDNEENEDILEDIVLTLTLFEDREMIEERLKTYAHLFDDKVMKQLKRRRYTGWGRLSRKLINGIRDKQSGKTILDFLKSDGFANRNFMQLIHDDSLTFKEDIQKAQVSGQGDSLHEHIANLAGSPAIKKGILQTVKVVDELVKVMGRHKPENIVIEMARENQTTQKGQKNSRERMKRIEEGIKELGSQILKEHPVENTQLQNEKLYLYYLQNGRDMYVDQELDINRLSDYDVDHIVPQSFLKDDSIDNKVLTRSDKARGKSDNVPSEEVVKKMKNYWRQLLNAKLITQRKFDNLTKAERGGLSELDKAGFIKRQLVETRQITKHVAQILDSRMNTKYDENDKLIREVKVITLKSKLVSDFRKDFQFYKVREINNYHHAHDAYLNAVVGTALIKKYPKLESEFVYGDYKVYDVRKMIAKSEQEIGKATAKYFFYSNIMNFFKTEITLANGEIRKRPLIETNGETGEIVWDKGRDFATVRKVLSMPQVNIVKKTEVQTGGFSKESILPKRNSDKLIARKKDWDPKKYGGFDSPTVAYSVLVVAKVEKGKSKKLKSVKELLGITIMERSSFEKNPIDFLEAKGYKEVKKDLIIKLPKYSLFELENGRKRMLASAGELQKGNELALPSKYVNFLYLASHYEKLKGSPEDNEQKQLFVEQHKHYLDEIIEQISEFSKRVILADANLDKVLSAYNKHRDKPIREQAENIIHLFTLTNLGAPAAFKYFDTTIDRKRYTSTKEVLDATLIHQSITGLYETRIDLSQLGGDGGGSSGSSGSSGGTLNIEDEYRLHETSKEPDVSLGSTWLSDFPQAWAETGGMGLAVRQAPLIIPLKATSTPVSIKQYPMSQEARLGIKPHIQRLLDQGILVPCQSPWNTPLLPVKKPGTNDYRPVQDLREVNKRVEDIHPTVPNPYNLLSGLPPSHQWYTVLDLKDAFFCLRLHPTSQPLFAFEWRDPEMGISGQLTWTRLPQGFKNSPTLFNEALHRDLADFRIQHPDLILLQYVDDLLLAATSELDCQQGTRALLQTLGNLGYRASAKKAQICQKQVKYLGYLLKEGQRWLTEARKETVMGQPTPKTPRQLREFLGKAGFCRLFIPGFAEMAAPLYPLTKPGTLFNWGPDQQKAYQEIKQALLTAPALGLPDLTKPFELFVDEKQGYAKGVLTQKLGPWRRPVAYLSKKLDPVAAGWPPCLRMVAAIAVLTKDAGKLTMGQPLVILAPHAVEALVKQPPDRWLSNARMTHYQALLLDTDRVQFGPVVALNPATLLPLPEEGLQHNCLDILAEAHGTRPDLTDQPLPDADHTWYTDGSSLLQEGQRKAGAAVTTETEVIWAKALPAGTSAQRAELIALTQALKMAEGKKLNVYTDSRYAFATAHIHGEIYRRRGWLTSEGKEIKNKDEILALLKALFLPKRLSIIHCPGHQKGHSAEARGNRMADQAARKAAITETPDTSTLLIENSSPSGGSKRTADGSEFEAGKRTADGSEFEKRTADGSEFESPKKKAKVE

SEQ ID NO: 2635 - protein, 2112 aa, synthetic construct
  source 1..2112: note = Description of Artificial Sequence: Synthetic polypeptide
MPAAKRVKLDGGDKKYSIGLDIGTNSVGWAVITDEYKVPSKKFKVLGNTDRHSIKKNLIGALLFDSGETAEATRLKRTARRRYTRRKNRICYLQEIFSNEMAKVDDSFFHRLEESFLVEEDKKHERHPIFGNIVDEVAYHEKYPTIYHLRKKLVDSTDKADLRLIYLALAHMIKFRGHFLIEGDLNPDNSDVDKLFIQLVQTYNQLFEENPINASGVDAKAILSARLSKSRRLENLIAQLPGEKKNGLFGNLIALSLGLTPNFKSNFDLAEDAKLQLSKDTYDDDLDNLLAQIGDQYADLFLAAKNLSDAILLSDILRVNTEITKAPLSASMIKRYDEHHQDLTLLKALVRQQLPEKYKEIFFDQSKNGYAGYIDGGASQEEFYKFIKPILEKMDGTEELLVKLNREDLLRKQRTFDNGSIPHQIHLGELHAILRRQEDFYPFLKDNREKIEKILTFRIPYYVGPLARGNSRFAWMTRKSEETITPWNFEEVVDKGASAQSFIERMTNFDKNLPNEKVLPKHSLLYEYFTVYNELTKVKYVTEGMRKPAFLSGEQKKAIVDLLFKTNRKVTVKQLKEDYFKKIECFDSVEISGVEDRFNASLGTYHDLLKIIKDKDFLDNEENEDILEDIVLTLTLFEDREMIEERLKTYAHLFDDKVMKQLKRRRYTGWGRLSRKLINGIRDKQSGKTILDFLKSDGFANRNFMQLIHDDSLTFKEDIQKAQVSGQGDSLHEHIANLAGSPAIKKGILQTVKVVDELVKVMGRHKPENIVIEMARENQTTQKGQKNSRERMKRIEEGIKELGSQILKEHPVENTQLQNEKLYLYYLQNGRDMYVDQELDINRLSDYDVDHIVPQSFLKDDSIDNKVLTRSDKARGKSDNVPSEEVVKKMKNYWRQLLNAKLITQRKFDNLTKAERGGLSELDKAGFIKRQLVETRQITKHVAQILDSRMNTKYDENDKLIREVKVITLKSKLVSDFRKDFQFYKVREINNYHHAHDAYLNAVVGTALIKKYPKLESEFVYGDYKVYDVRKMIAKSEQEIGKATAKYFFYSNIMNFFKTEITLANGEIRKRPLIETNGETGEIVWDKGRDFATVRKVLSMPQVNIVKKTEVQTGGFSKESILPKRNSDKLIARKKDWDPKKYGGFDSPTVAYSVLVVAKVEKGKSKKLKSVKELLGITIMERSSFEKNPIDFLEAKGYKEVKKDLIIKLPKYSLFELENGRKRMLASAGELQKGNELALPSKYVNFLYLASHYEKLKGSPEDNEQKQLFVEQHKHYLDEIIEQISEFSKRVILADANLDKVLSAYNKHRDKPIREQAENIIHLFTLTNLGAPAAFKYFDTTIDRKRYTSTKEVLDATLIHQSITGLYETRIDLSQLGGDGGGGGGGGGGGTLNIEDEYRLHETSKEPDVSLGSTWLSDFPQAWAETGGMGLAVRQAPLIIPLKATSTPVSIKQYPMSQEARLGIKPHIQRLLDQGILVPCQSPWNTPLLPVKKPGTNDYRPVQDLREVNKRVEDIHPTVPNPYNLLSGLPPSHQWYTVLDLKDAFFCLRLHPTSQPLFAFEWRDPEMGISGQLTWTRLPQGFKNSPTLFNEALHRDLADFRIQHPDLILLQYVDDLLLAATSELDCQQGTRALLQTLGNLGYRASAKKAQICQKQVKYLGYLLKEGQRWLTEARKETVMGQPTPKTPRQLREFLGKAGFCRLFIPGFAEMAAPLYPLTKPGTLFNWGPDQQKAYQEIKQALLTAPALGLPDLTKPFELFVDEKQGYAKGVLTQKLGPWRRPVAYLSKKLDPVAAGWPPCLRMVAAIAVLTKDAGKLTMGQPLVILAPHAVEALVKQPPDRWLSNARMTHYQALLLDTDRVQFGPVVALNPATLLPLPEEGLQHNCLDILAEAHGTRPDLTDQPLPDADHTWYTDGSSLLQEGQRKAGAAVTTETEVIWAKALPAGTSAQRAELIALTQALKMAEGKKLNVYTDSRYAFATAHIHGEIYRRRGWLTSEGKEIKNKDEILALLKALFLPKRLSIIHCPGHQKGHSAEARGNRMADQAARKAAITETPDTSTLLIENSSPSGGSKRTADGSEFEAGKRTADGSEFEKRTADGSEFESPKKKAKVE

SEQ ID NO: 2636 - protein, 2120 aa, synthetic construct
  source 1..2120: note = Description of Artificial Sequence: Synthetic polypeptide
MPAAKRVKLDGGDKKYSIGLDIGTNSVGWAVITDEYKVPSKKFKVLGNTDRHSIKKNLIGALLFDSGETAEATRLKRTARRRYTRRKNRICYLQEIFSNEMAKVDDSFFHRLEESFLVEEDKKHERHPIFGNIVDEVAYHEKYPTIYHLRKKLVDSTDKADLRLIYLALAHMIKFRGHFLIEGDLNPDNSDVDKLFIQLVQTYNQLFEENPINASGVDAKAILSARLSKSRRLENLIAQLPGEKKNGLFGNLIALSLGLTPNFKSNFDLAEDAKLQLSKDTYDDDLDNLLAQIGDQYADLFLAAKNLSDAILLSDILRVNTEITKAPLSASMIKRYDEHHQDLTLLKALVRQQLPEKYKEIFFDQSKNGYAGYIDGGASQEEFYKFIKPILEKMDGTEELLVKLNREDLLRKQRTFDNGSIPHQIHLGELHAILRRQEDFYPFLKDNREKIEKILTFRIPYYVGPLARGNSRFAWMTRKSEETITPWNFEEVVDKGASAQSFIERMTNFDKNLPNEKVLPKHSLLYEYFTVYNELTKVKYVTEGMRKPAFLSGEQKKAIVDLLFKTNRKVTVKQLKEDYFKKIECFDSVEISGVEDRFNASLGTYHDLLKIIKDKDFLDNEENEDILEDIVLTLTLFEDREMIEERLKTYAHLFDDKVMKQLKRRRYTGWGRLSRKLINGIRDKQSGKTILDFLKSDGFANRNFMQLIHDDSLTFKEDIQKAQVSGQGDSLHEHIANLAGSPAIKKGILQTVKVVDELVKVMGRHKPENIVIEMARENQTTQKGQKNSRERMKRIEEGIKELGSQILKEHPVENTQLQNEKLYLYYLQNGRDMYVDQELDINRLSDYDVDHIVPQSFLKDDSIDNKVLTRSDKARGKSDNVPSEEVVKKMKNYWRQLLNAKLITQRKFDNLTKAERGGLSELDKAGFIKRQLVETRQITKHVAQILDSRMNTKYDENDKLIREVKVITLKSKLVSDFRKDFQFYKVREINNYHHAHDAYLNAVVGTALIKKYPKLESEFVYGDYKVYDVRKMIAKSEQEIGKATAKYFFYSNIMNFFKTEITLANGEIRKRPLIETNGETGEIVWDKGRDFATVRKVLSMPQVNIVKKTEVQTGGFSKESILPKRNSDKLIARKKDWDPKKYGGFDSPTVAYSVLVVAKVEKGKSKKLKSVKELLGITIMERSSFEKNPIDFLEAKGYKEVKKDLIIKLPKYSLFELENGRKRMLASAGELQKGNELALPSKYVNFLYLASHYEKLKGSPEDNEQKQLFVEQHKHYLDEIIEQISEFSKRVILADANLDKVLSAYNKHRDKPIREQAENIIHLFTLTNLGAPAAFKYFDTTIDRKRYTSTKEVLDATLIHQSITGLYETRIDLSQLGGDGGGGGGSEAAAKGGGGSGGTLNIEDEYRLHETSKEPDVSLGSTWLSDFPQAWAETGGMGLAVRQAPLIIPLKATSTPVSIKQYPMSQEARLGIKPHIQRLLDQGILVPCQSPWNTPLLPVKKPGTNDYRPVQDLREVNKRVEDIHPTVPNPYNLLSGLPPSHQWYTVLDLKDAFFCLRLHPTSQPLFAFEWRDPEMGISGQLTWTRLPQGFKNSPTLFNEALHRDLADFRIQHPDLILLQYVDDLLLAATSELDCQQGTRALLQTLGNLGYRASAKKAQICQKQVKYLGYLLKEGQRWLTEARKETVMGQPTPKTPRQLREFLGKAGFCRLFIPGFAEMAAPLYPLTKPGTLFNWGPDQQKAYQEIKQALLTAPALGLPDLTKPFELFVDEKQGYAKGVLTQKLGPWRRPVAYLSKKLDPVAAGWPPCLRMVAAIAVLTKDAGKLTMGQPLVILAPHAVEALVKQPPDRWLSNARMTHYQALLLDTDRVQFGPVVALNPATLLPLPEEGLQHNCLDILAEAHGTRPDLTDQPLPDADHTWYTDGSSLLQEGQRKAGAAVTTETEVIWAKALPAGTSAQRAELIALTQALKMAEGKKLNVYTDSRYAFATAHIHGEIYRRRGWLTSEGKEIKNKDEILALLKALFLPKRLSIIHCPGHQKGHSAEARGNRMADQAARKAAITETPDTSTLLIENSSPSGGSKRTADGSEFEAGKRTADGSEFEKRTADGSEFESPKKKAKVE

SEQ ID NO: 2637 - protein, 2116 aa, synthetic construct
  source 1..2116: note = Description of Artificial Sequence: Synthetic polypeptide
MPAAKRVKLDGGDKKYSIGLDIGTNSVGWAVITDEYKVPSKKFKVLGNTDRHSIKKNLIGALLFDSGETAEATRLKRTARRRYTRRKNRICYLQEIFSNEMAKVDDSFFHRLEESFLVEEDKKHERHPIFGNIVDEVAYHEKYPTIYHLRKKLVDSTDKADLRLIYLALAHMIKFRGHFLIEGDLNPDNSDVDKLFIQLVQTYNQLFEENPINASGVDAKAILSARLSKSRRLENLIAQLPGEKKNGLFGNLIALSLGLTPNFKSNFDLAEDAKLQLSKDTYDDDLDNLLAQIGDQYADLFLAAKNLSDAILLSDILRVNTEITKAPLSASMIKRYDEHHQDLTLLKALVRQQLPEKYKEIFFDQSKNGYAGYIDGGASQEEFYKFIKPILEKMDGTEELLVKLNREDLLRKQRTFDNGSIPHQIHLGELHAILRRQEDFYPFLKDNREKIEKILTFRIPYYVGPLARGNSRFAWMTRKSEETITPWNFEEVVDKGASAQSFIERMTNFDKNLPNEKVLPKHSLLYEYFTVYNELTKVKYVTEGMRKPAFLSGEQKKAIVDLLFKTNRKVTVKQLKEDYFKKIECFDSVEISGVEDRFNASLGTYHDLLKIIKDKDFLDNEENEDILEDIVLTLTLFEDREMIEERLKTYAHLFDDKVMKQLKRRRYTGWGRLSRKLINGIRDKQSGKTILDFLKSDGFANRNFMQLIHDDSLTFKEDIQKAQVSGQGDSLHEHIANLAGSPAIKKGILQTVKVVDELVKVMGRHKPENIVIEMARENQTTQKGQKNSRERMKRIEEGIKELGSQILKEHPVENTQLQNEKLYLYYLQNGRDMYVDQELDINRLSDYDVDHIVPQSFLKDDSIDNKVLTRSDKARGKSDNVPSEEVVKKMKNYWRQLLNAKLITQRKFDNLTKAERGGLSELDKAGFIKRQLVETRQITKHVAQILDSRMNTKYDENDKLIREVKVITLKSKLVSDFRKDFQFYKVREINNYHHAHDAYLNAVVGTALIKKYPKLESEFVYGDYKVYDVRKMIAKSEQEIGKATAKYFFYSNIMNFFKTEITLANGEIRKRPLIETNGETGEIVWDKGRDFATVRKVLSMPQVNIVKKTEVQTGGFSKESILPKRNSDKLIARKKDWDPKKYGGFDSPTVAYSVLVVAKVEKGKSKKLKSVKELLGITIMERSSFEKNPIDFLEAKGYKEVKKDLIIKLPKYSLFELENGRKRMLASAGELQKGNELALPSKYVNFLYLASHYEKLKGSPEDNEQKQLFVEQHKHYLDEIIEQISEFSKRVILADANLDKVLSAYNKHRDKPIREQAENIIHLFTLTNLGAPAAFKYFDTTIDRKRYTSTKEVLDATLIHQSITGLYETRIDLSQLGGDGGEAAAKGGSGGGGGTLNIEDEYRLHETSKEPDVSLGSTWLSDFPQAWAETGGMGLAVRQAPLIIPLKATSTPVSIKQYPMSQEARLGIKPHIQRLLDQGILVPCQSPWNTPLLPVKKPGTNDYRPVQDLREVNKRVEDIHPTVPNPYNLLSGLPPSHQWYTVLDLKDAFFCLRLHPTSQPLFAFEWRDPEMGISGQLTWTRLPQGFKNSPTLFNEALHRDLADFRIQHPDLILLQYVDDLLLAATSELDCQQGTRALLQTLGNLGYRASAKKAQICQKQVKYLGYLLKEGQRWLTEARKETVMGQPTPKTPRQLREFLGKAGFCRLFIPGFAEMAAPLYPLTKPGTLFNWGPDQQKAYQEIKQALLTAPALGLPDLTKPFELFVDEKQGYAKGVLTQKLGPWRRPVAYLSKKLDPVAAGWPPCLRMVAAIAVLTKDAGKLTMGQPLVILAPHAVEALVKQPPDRWLSNARMTHYQALLLDTDRVQFGPVVALNPATLLPLPEEGLQHNCLDILAEAHGTRPDLTDQPLPDADHTWYTDGSSLLQEGQRKAGAAVTTETEVIWAKALPAGTSAQRAELIALTQALKMAEGKKLNVYTDSRYAFATAHIHGEIYRRRGWLTSEGKEIKNKDEILALLKALFLPKRLSIIHCPGHQKGHSAEARGNRMADQAARKAAITETPDTSTLLIENSSPSGGSKRTADGSEFEAGKRTADGSEFEKRTADGSEFESPKKKAKVE

SEQ ID NO: 2638 - protein, 2116 aa, synthetic construct
  source 1..2116: note = Description of Artificial Sequence: Synthetic polypeptide
MPAAKRVKLDGGDKKYSIGLDIGTNSVGWAVITDEYKVPSKKFKVLGNTDRHSIKKNLIGALLFDSGETAEATRLKRTARRRYTRRKNRICYLQEIFSNEMAKVDDSFFHRLEESFLVEEDKKHERHPIFGNIVDEVAYHEKYPTIYHLRKKLVDSTDKADLRLIYLALAHMIKFRGHFLIEGDLNPDNSDVDKLFIQLVQTYNQLFEENPINASGVDAKAILSARLSKSRRLENLIAQLPGEKKNGLFGNLIALSLGLTPNFKSNFDLAEDAKLQLSKDTYDDDLDNLLAQIGDQYADLFLAAKNLSDAILLSDILRVNTEITKAPLSASMIKRYDEHHQDLTLLKALVRQQLPEKYKEIFFDQSKNGYAGYIDGGASQEEFYKFIKPILEKMDGTEELLVKLNREDLLRKQRTFDNGSIPHQIHLGELHAILRRQEDFYPFLKDNREKIEKILTFRIPYYVGPLARGNSRFAWMTRKSEETITPWNFEEVVDKGASAQSFIERMTNFDKNLPNEKVLPKHSLLYEYFTVYNELTKVKYVTEGMRKPAFLSGEQKKAIVDLLFKTNRKVTVKQLKEDYFKKIECFDSVEISGVEDRFNASLGTYHDLLKIIKDKDFLDNEENEDILEDIVLTLTLFEDREMIEERLKTYAHLFDDKVMKQLKRRRYTGWGRLSRKLINGIRDKQSGKTILDFLKSDGFANRNFMQLIHDDSLTFKEDIQKAQVSGQGDSLHEHIANLAGSPAIKKGILQTVKVVDELVKVMGRHKPENIVIEMARENQTTQKGQKNSRERMKRIEEGIKELGSQILKEHPVENTQLQNEKLYLYYLQNGRDMYVDQELDINRLSDYDVDHIVPQSFLKDDSIDNKVLTRSDKARGKSDNVPSEEVVKKMKNYWRQLLNAKLITQRKFDNLTKAERGGLSELDKAGFIKRQLVETRQITKHVAQILDSRMNTKYDENDKLIREVKVITLKSKLVSDFRKDFQFYKVREINNYHHAHDAYLNAVVGTALIKKYPKLESEFVYGDYKVYDVRKMIAKSEQEIGKATAKYFFYSNIMNFFKTEITLANGEIRKRPLIETNGETGEIVWDKGRDFATVRKVLSMPQVNIVKKTEVQTGGFSKESILPKRNSDKLIARKKDWDPKKYGGFDSPTVAYSVLVVAKVEKGKSKKLKSVKELLGITIMERSSFEKNPIDFLEAKGYKEVKKDLIIKLPKYSLFELENGRKRMLASAGELQKGNELALPSKYVNFLYLASHYEKLKGSPEDNEQKQLFVEQHKHYLDEIIEQISEFSKRVILADANLDKVLSAYNKHRDKPIREQAENIIHLFTLTNLGAPAAFKYFDTTIDRKRYTSTKEVLDATLIHQSITGLYETRIDLSQLGGDGGGGGEAAAKGGSGGTLNIEDEYRLHETSKEPDVSLGSTWLSDFPQAWAETGGMGLAVRQAPLIIPLKATSTPVSIKQYPMSQEARLGIKPHIQRLLDQGILVPCQSPWNTPLLPVKKPGTNDYRPVQDLREVNKRVEDIHPTVPNPYNLLSGLPPSHQWYTVLDLKDAFFCLRLHPTSQPLFAFEWRDPEMGISGQLTWTRLPQGFKNSPTLFNEALHRDLADFRIQHPDLILLQYVDDLLLAATSELDCQQGTRALLQTLGNLGYRASAKKAQICQKQVKYLGYLLKEGQRWLTEARKETVMGQPTPKTPRQLREFLGKAGFCRLFIPGFAEMAAPLYPLTKPGTLFNWGPDQQKAYQEIKQALLTAPALGLPDLTKPFELFVDEKQGYAKGVLTQKLGPWRRPVAYLSKKLDPVAAGWPPCLRMVAAIAVLTKDAGKLTMGQPLVILAPHAVEALVKQPPDRWLSNARMTHYQALLLDTDRVQFGPVVALNPATLLPLPEEGLQHNCLDILAEAHGTRPDLTDQPLPDADHTWYTDGSSLLQEGQRKAGAAVTTETEVIWAKALPAGTSAQRAELIALTQALKMAEGKKLNVYTDSRYAFATAHIHGEIYRRRGWLTSEGKEIKNKDEILALLKALFLPKRLSIIHCPGHQKGHSAEARGNRMADQAARKAAITETPDTSTLLIENSSPSGGSKRTADGSEFEAGKRTADGSEFEKRTADGSEFESPKKKAKVE

SEQ ID NO: 2639 - protein, 2115 aa, synthetic construct
  source 1..2115: note = Description of Artificial Sequence: Synthetic polypeptide
MPAAKRVKLDGGDKKYSIGLDIGTNSVGWAVITDEYKVPSKKFKVLGNTDRHSIKKNLIGALLFDSGETAEATRLKRTARRRYTRRKNRICYLQEIFSNEMAKVDDSFFHRLEESFLVEEDKKHERHPIFGNIVDEVAYHEKYPTIYHLRKKLVDSTDKADLRLIYLALAHMIKFRGHFLIEGDLNPDNSDVDKLFIQLVQTYNQLFEENPINASGVDAKAILSARLSKSRRLENLIAQLPGEKKNGLFGNLIALSLGLTPNFKSNFDLAEDAKLQLSKDTYDDDLDNLLAQIGDQYADLFLAAKNLSDAILLSDILRVNTEITKAPLSASMIKRYDEHHQDLTLLKALVRQQLPEKYKEIFFDQSKNGYAGYIDGGASQEEFYKFIKPILEKMDGTEELLVKLNREDLLRKQRTFDNGSIPHQIHLGELHAILRRQEDFYPFLKDNREKIEKILTFRIPYYVGPLARGNSRFAWMTRKSEETITPWNFEEVVDKGASAQSFIERMTNFDKNLPNEKVLPKHSLLYEYFTVYNELTKVKYVTEGMRKPAFLSGEQKKAIVDLLFKTNRKVTVKQLKEDYFKKIECFDSVEISGVEDRFNASLGTYHDLLKIIKDKDFLDNEENEDILEDIVLTLTLFEDREMIEERLKTYAHLFDDKVMKQLKRRRYTGWGRLSRKLINGIRDKQSGKTILDFLKSDGFANRNFMQLIHDDSLTFKEDIQKAQVSGQGDSLHEHIANLAGSPAIKKGILQTVKVVDELVKVMGRHKPENIVIEMARENQTTQKGQKNSRERMKRIEEGIKELGSQILKEHPVENTQLQNEKLYLYYLQNGRDMYVDQELDINRLSDYDVDHIVPQSFLKDDSIDNKVLTRSDKARGKSDNVPSEEVVKKMKNYWRQLLNAKLITQRKFDNLTKAERGGLSELDKAGFIKRQLVETRQITKHVAQILDSRMNTKYDENDKLIREVKVITLKSKLVSDFRKDFQFYKVREINNYHHAHDAYLNAVVGTALIKKYPKLESEFVYGDYKVYDVRKMIAKSEQEIGKATAKYFFYSNIMNFFKTEITLANGEIRKRPLIETNGETGEIVWDKGRDFATVRKVLSMPQVNIVKKTEVQTGGFSKESILPKRNSDKLIARKKDWDPKKYGGFDSPTVAYSVLVVAKVEKGKSKKLKSVKELLGITIMERSSFEKNPIDFLEAKGYKEVKKDLIIKLPKYSLFELENGRKRMLASAGELQKGNELALPSKYVNFLYLASHYEKLKGSPEDNEQKQLFVEQHKHYLDEIIEQISEFSKRVILADANLDKVLSAYNKHRDKPIREQAENIIHLFTLTNLGAPAAFKYFDTTIDRKRYTSTKEVLDATLIHQSITGLYETRIDLSQLGGDGGGGGGSGGGGSGGTLNIEDEYRLHETSKEPDVSLGSTWLSDFPQAWAETGGMGLAVRQAPLIIPLKATSTPVSIKQYPMSQEARLGIKPHIQRLLDQGILVPCQSPWNTPLLPVKKPGTNDYRPVQDLREVNKRVEDIHPTVPNPYNLLSGLPPSHQWYTVLDLKDAFFCLRLHPTSQPLFAFEWRDPEMGISGQLTWTRLPQGFKNSPTLFNEALHRDLADFRIQHPDLILLQYVDDLLLAATSELDCQQGTRALLQTLGNLGYRASAKKAQICQKQVKYLGYLLKEGQRWLTEARKETVMGQPTPKTPRQLREFLGKAGFCRLFIPGFAEMAAPLYPLTKPGTLFNWGPDQQKAYQEIKQALLTAPALGLPDLTKPFELFVDEKQGYAKGVLTQKLGPWRRPVAYLSKKLDPVAAGWPPCLRMVAAIAVLTKDAGKLTMGQPLVILAPHAVEALVKQPPDRWLSNARMTHYQALLLDTDRVQFGPVVALNPATLLPLPEEGLQHNCLDILAEAHGTRPDLTDQPLPDADHTWYTDGSSLLQEGQRKAGAAVTTETEVIWAKALPAGTSAQRAELIALTQALKMAEGKKLNVYTDSRYAFATAHIHGEIYRRRGWLTSEGKEIKNKDEILALLKALFLPKRLSIIHCPGHQKGHSAEARGNRMADQAARKAAITETPDTSTLLIENSSPSGGSKRTADGSEFEAGKRTADGSEFEKRTADGSEFESPKKKAKVE

SEQ ID NO: 2640 - protein, 2116 aa, synthetic construct
  source 1..2116: note = Description of Artificial Sequence: Synthetic polypeptide
MPAAKRVKLDGGDKKYSIGLDIGTNSVGWAVITDEYKVPSKKFKVLGNTDRHSIKKNLIGALLFDSGETAEATRLKRTARRRYTRRKNRICYLQEIFSNEMAKVDDSFFHRLEESFLVEEDKKHERHPIFGNIVDEVAYHEKYPTIYHLRKKLVDSTDKADLRLIYLALAHMIKFRGHFLIEGDLNPDNSDVDKLFIQLVQTYNQLFEENPINASGVDAKAILSARLSKSRRLENLIAQLPGEKKNGLFGNLIALSLGLTPNFKSNFDLAEDAKLQLSKDTYDDDLDNLLAQIGDQYADLFLAAKNLSDAILLSDILRVNTEITKAPLSASMIKRYDEHHQDLTLLKALVRQQLPEKYKEIFFDQSKNGYAGYIDGGASQEEFYKFIKPILEKMDGTEELLVKLNREDLLRKQRTFDNGSIPHQIHLGELHAILRRQEDFYPFLKDNREKIEKILTFRIPYYVGPLARGNSRFAWMTRKSEETITPWNFEEVVDKGASAQSFIERMTNFDKNLPNEKVLPKHSLLYEYFTVYNELTKVKYVTEGMRKPAFLSGEQKKAIVDLLFKTNRKVTVKQLKEDYFKKIECFDSVEISGVEDRFNASLGTYHDLLKIIKDKDFLDNEENEDILEDIVLTLTLFEDREMIEERLKTYAHLFDDKVMKQLKRRRYTGWGRLSRKLINGIRDKQSGKTILDFLKSDGFANRNFMQLIHDDSLTFKEDIQKAQVSGQGDSLHEHIANLAGSPAIKKGILQTVKVVDELVKVMGRHKPENIVIEMARENQTTQKGQKNSRERMKRIEEGIKELGSQILKEHPVENTQLQNEKLYLYYLQNGRDMYVDQELDINRLSDYDVDHIVPQSFLKDDSIDNKVLTRSDKARGKSDNVPSEEVVKKMKNYWRQLLNAKLITQRKFDNLTKAERGGLSELDKAGFIKRQLVETRQITKHVAQILDSRMNTKYDENDKLIREVKVITLKSKLVSDFRKDFQFYKVREINNYHHAHDAYLNAVVGTALIKKYPKLESEFVYGDYKVYDVRKMIAKSEQEIGKATAKYFFYSNIMNFFKTEITLANGEIRKRPLIETNGETGEIVWDKGRDFATVRKVLSMPQVNIVKKTEVQTGGFSKESILPKRNSDKLIARKKDWDPKKYGGFDSPTVAYSVLVVAKVEKGKSKKLKSVKELLGITIMERSSFEKNPIDFLEAKGYKEVKKDLIIKLPKYSLFELENGRKRMLASAGELQKGNELALPSKYVNFLYLASHYEKLKGSPEDNEQKQLFVEQHKHYLDEIIEQISEFSKRVILADANLDKVLSAYNKHRDKPIREQAENIIHLFTLTNLGAPAAFKYFDTTIDRKRYTSTKEVLDATLIHQSITGLYETRIDLSQLGGDGGPAPGGSEAAAKGGTLNIEDEYRLHETSKEPDVSLGSTWLSDFPQAWAETGGMGLAVRQAPLIIPLKATSTPVSIKQYPMSQEARLGIKPHIQRLLDQGILVPCQSPWNTPLLPVKKPGTNDYRPVQDLREVNKRVEDIHPTVPNPYNLLSGLPPSHQWYTVLDLKDAFFCLRLHPTSQPLFAFEWRDPEMGISGQLTWTRLPQGFKNSPTLFNEALHRDLADFRIQHPDLILLQYVDDLLLAATSELDCQQGTRALLQTLGNLGYRASAKKAQICQKQVKYLGYLLKEGQRWLTEARKETVMGQPTPKTPRQLREFLGKAGFCRLFIPGFAEMAAPLYPLTKPGTLFNWGPDQQKAYQEIKQALLTAPALGLPDLTKPFELFVDEKQGYAKGVLTQKLGPWRRPVAYLSKKLDPVAAGWPPCLRMVAAIAVLTKDAGKLTMGQPLVILAPHAVEALVKQPPDRWLSNARMTHYQALLLDTDRVQFGPVVALNPATLLPLPEEGLQHNCLDILAEAHGTRPDLTDQPLPDADHTWYTDGSSLLQEGQRKAGAAVTTETEVIWAKALPAGTSAQRAELIALTQALKMAEGKKLNVYTDSRYAFATAHIHGEIYRRRGWLTSEGKEIKNKDEILALLKALFLPKRLSIIHCPGHQKGHSAEARGNRMADQAARKAAITETPDTSTLLIENSSPSGGSKRTADGSEFEAGKRTADGSEFEKRTADGSEFESPKKKAKVE

SEQ ID NO: 2641 - protein, 2116 aa, synthetic construct
  source 1..2116: note = Description of Artificial Sequence: Synthetic polypeptide
MPAAKRVKLDGGDKKYSIGLDIGTNSVGWAVITDEYKVPSKKFKVLGNTDRHSIKKNLIGALLFDSGETAEATRLKRTARRRYTRRKNRICYLQEIFSNEMAKVDDSFFHRLEESFLVEEDKKHERHPIFGNIVDEVAYHEKYPTIYHLRKKLVDSTDKADLRLIYLALAHMIKFRGHFLIEGDLNPDNSDVDKLFIQLVQTYNQLFEENPINASGVDAKAILSARLSKSRRLENLIAQLPGEKKNGLFGNLIALSLGLTPNFKSNFDLAEDAKLQLSKDTYDDDLDNLLAQIGDQYADLFLAAKNLSDAILLSDILRVNTEITKAPLSASMIKRYDEHHQDLTLLKALVRQQLPEKYKEIFFDQSKNGYAGYIDGGASQEEFYKFIKPILEKMDGTEELLVKLNREDLLRKQRTFDNGSIPHQIHLGELHAILRRQEDFYPFLKDNREKIEKILTFRIPYYVGPLARGNSRFAWMTRKSEETITPWNFEEVVDKGASAQSFIERMTNFDKNLPNEKVLPKHSLLYEYFTVYNELTKVKYVTEGMRKPAFLSGEQKKAIVDLLFKTNRKVTVKQLKEDYFKKIECFDSVEISGVEDRFNASLGTYHDLLKIIKDKDFLDNEENEDILEDIVLTLTLFEDREMIEERLKTYAHLFDDKVMKQLKRRRYTGWGRLSRKLINGIRDKQSGKTILDFLKSDGFANRNFMQLIHDDSLTFKEDIQKAQVSGQGDSLHEHIANLAGSPAIKKGILQTVKVVDELVKVMGRHKPENIVIEMARENQTTQKGQKNSRERMKRIEEGIKELGSQILKEHPVENTQLQNEKLYLYYLQNGRDMYVDQELDINRLSDYDVDHIVPQSFLKDDSIDNKVLTRSDKARGKSDNVPSEEVVKKMKNYWRQLLNAKLITQRKFDNLTKAERGGLSELDKAGFIKRQLVETRQITKHVAQILDSRMNTKYDENDKLIREVKVITLKSKLVSDFRKDFQFYKVREINNYHHAHDAYLNAVVGTALIKKYPKLESEFVYGDYKVYDVRKMIAKSEQEIGKATAKYFFYSNIMNFFKTEITLANGEIRKRPLIETNGETGEIVWDKGRDFATVRKVLSMPQVNIVKKTEVQTGGFSKESILPKRNSDKLIARKKDWDPKKYGGFDSPTVAYSVLVVAKVEKGKSKKLKSVKELLGITIMERSSFEKNPIDFLEAKGYKEVKKDLIIKLPKYSLFELENGRKRMLASAGELQKGNELALPSKYVNFLYLASHYEKLKGSPEDNEQKQLFVEQHKHYLDEIIEQISEFSKRVILADANLDKVLSAYNKHRDKPIREQAENIIHLFTLTNLGAPAAFKYFDTTIDRKRYTSTKEVLDATLIHQSITGLYETRIDLSQLGGDGGGSSEAAAKPAPGGTLNIEDEYRLHETSKEPDVSLGSTWLSDFPQAWAETGGMGLAVRQAPLIIPLKATSTPVSIKQYPMSQEARLGIKPHIQRLLDQGILVPCQSPWNTPLLPVKKPGTNDYRPVQDLREVNKRVEDIHPTVPNPYNLLSGLPPSHQWYTVLDLKDAFFCLRLHPTSQPLFAFEWRDPEMGISGQLTWTRLPQGFKNSPTLFNEALHRDLADFRIQHPDLILLQYVDDLLLAATSELDCQQGTRALLQTLGNLGYRASAKKAQICQKQVKYLGYLLKEGQRWLTEARKETVMGQPTPKTPRQLREFLGKAGFCRLFIPGFAEMAAPLYPLTKPGTLFNWGPDQQKAYQEIKQALLTAPALGLPDLTKPFELFVDEKQGYAKGVLTQKLGPWRRPVAYLSKKLDPVAAGWPPCLRMVAAIAVLTKDAGKLTMGQPLVILAPHAVEALVKQPPDRWLSNARMTHYQALLLDTDRVQFGPVVALNPATLLPLPEEGLQHNCLDILAEAHGTRPDLTDQPLPDADHTWYTDGSSLLQEGQRKAGAAVTTETEVIWAKALPAGTSAQRAELIALTQALKMAEGKKLNVYTDSRYAFATAHIHGEIYRRRGWLTSEGKEIKNKDEILALLKALFLPKRLSIIHCPGHQKGHSAEARGNRMADQAARKAAITETPDTSTLLIENSSPSGGSKRTADGSEFEAGKRTADGSEFEKRTADGSEFESPKKKAKVE

SEQ ID NO: 2642 - protein, 2111 aa, synthetic construct
  source 1..2111: note = Description of Artificial Sequence: Synthetic polypeptide
MPAAKRVKLDGGDKKYSIGLDIGTNSVGWAVITDEYKVPSKKFKVLGNTDRHSIKKNLIGALLFDSGETAEATRLKRTARRRYTRRKNRICYLQEIFSNEMAKVDDSFFHRLEESFLVEEDKKHERHPIFGNIVDEVAYHEKYPTIYHLRKKLVDSTDKADLRLIYLALAHMIKFRGHFLIEGDLNPDNSDVDKLFIQLVQTYNQLFEENPINASGVDAKAILSARLSKSRRLENLIAQLPGEKKNGLFGNLIALSLGLTPNFKSNFDLAEDAKLQLSKDTYDDDLDNLLAQIGDQYADLFLAAKNLSDAILLSDILRVNTEITKAPLSASMIKRYDEHHQDLTLLKALVRQQLPEKYKEIFFDQSKNGYAGYIDGGASQEEFYKFIKPILEKMDGTEELLVKLNREDLLRKQRTFDNGSIPHQIHLGELHAILRRQEDFYPFLKDNREKIEKILTFRIPYYVGPLARGNSRFAWMTRKSEETITPWNFEEVVDKGASAQSFIERMTNFDKNLPNEKVLPKHSLLYEYFTVYNELTKVKYVTEGMRKPAFLSGEQKKAIVDLLFKTNRKVTVKQLKEDYFKKIECFDSVEISGVEDRFNASLGTYHDLLKIIKDKDFLDNEENEDILEDIVLTLTLFEDREMIEERLKTYAHLFDDKVMKQLKRRRYTGWGRLSRKLINGIRDKQSGKTILDFLKSDGFANRNFMQLIHDDSLTFKEDIQKAQVSGQGDSLHEHIANLAGSPAIKKGILQTVKVVDELVKVMGRHKPENIVIEMARENQTTQKGQKNSRERMKRIEEGIKELGSQILKEHPVENTQLQNEKLYLYYLQNGRDMYVDQELDINRLSDYDVDHIVPQSFLKDDSIDNKVLTRSDKARGKSDNVPSEEVVKKMKNYWRQLLNAKLITQRKFDNLTKAERGGLSELDKAGFIKRQLVETRQITKHVAQILDSRMNTKYDENDKLIREVKVITLKSKLVSDFRKDFQFYKVREINNYHHAHDAYLNAVVGTALIKKYPKLESEFVYGDYKVYDVRKMIAKSEQEIGKATAKYFFYSNIMNFFKTEITLANGEIRKRPLIETNGETGEIVWDKGRDFATVRKVLSMPQVNIVKKTEVQTGGFSKESILPKRNSDKLIARKKDWDPKKYGGFDSPTVAYSVLVVAKVEKGKSKKLKSVKELLGITIMERSSFEKNPIDFLEAKGYKEVKKDLIIKLPKYSLFELENGRKRMLASAGELQKGNELALPSKYVNFLYLASHYEKLKGSPEDNEQKQLFVEQHKHYLDEIIEQISEFSKRVILADANLDKVLSAYNKHRDKPIREQAENIIHLFTLTNLGAPAAFKYFDTTIDRKRYTSTKEVLDATLIHQSITGLYETRIDLSQLGGDGGGGGGGGGGTLNIEDEYRLHETSKEPDVSLGSTWLSDFPQAWAETGGMGLAVRQAPLIIPLKATSTPVSIKQYPMSQEARLGIKPHIQRLLDQGILVPCQSPWNTPLLPVKKPGTNDYRPVQDLREVNKRVEDIHPTVPNPYNLLSGLPPSHQWYTVLDLKDAFFCLRLHPTSQPLFAFEWRDPEMGISGQLTWTRLPQGFKNSPTLFNEALHRDLADFRIQHPDLILLQYVDDLLLAATSELDCQQGTRALLQTLGNLGYRASAKKAQICQKQVKYLGYLLKEGQRWLTEARKETVMGQPTPKTPRQLREFLGKAGFCRLFIPGFAEMAAPLYPLTKPGTLFNWGPDQQKAYQEIKQALLTAPALGLPDLTKPFELFVDEKQGYAKGVLTQKLGPWRRPVAYLSKKLDPVAAGWPPCLRMVAAIAVLTKDAGKLTMGQPLVILAPHAVEALVKQPPDRWLSNARMTHYQALLLDTDRVQFGPVVALNPATLLPLPEEGLQHNCLDILAEAHGTRPDLTDQPLPDADHTWYTDGSSLLQEGQRKAGAAVTTETEVIWAKALPAGTSAQRAELIALTQALKMAEGKKLNVYTDSRYAFATAHIHGEIYRRRGWLTSEGKEIKNKDEILALLKALFLPKRLSIIHCPGHQKGHSAEARGNRMADQAARKAAITETPDTSTLLIENSSPSGGSKRTADGSEFEAGKRTADGSEFEKRTADGSEFESPKKKAKVE

SEQ ID NO: 2643 - protein, 2111 aa, synthetic construct
  source 1..2111: note = Description of Artificial Sequence: Synthetic polypeptide
MPAAKRVKLDGGDKKYSIGLDIGTNSVGWAVITDEYKVPSKKFKVLGNTDRHSIKKNLIGALLFDSGETAEATRLKRTARRRYTRRKNRICYLQEIFSNEMAKVDDSFFHRLEESFLVEEDKKHERHPIFGNIVDEVAYHEKYPTIYHLRKKLVDSTDKADLRLIYLALAHMIKFRGHFLIEGDLNPDNSDVDKLFIQLVQTYNQLFEENPINASGVDAKAILSARLSKSRRLENLIAQLPGEKKNGLFGNLIALSLGLTPNFKSNFDLAEDAKLQLSKDTYDDDLDNLLAQIGDQYADLFLAAKNLSDAILLSDILRVNTEITKAPLSASMIKRYDEHHQDLTLLKALVRQQLPEKYKEIFFDQSKNGYAGYIDGGASQEEFYKFIKPILEKMDGTEELLVKLNREDLLRKQRTFDNGSIPHQIHLGELHAILRRQEDFYPFLKDNREKIEKILTFRIPYYVGPLARGNSRFAWMTRKSEETITPWNFEEVVDKGASAQSFIERMTNFDKNLPNEKVLPKHSLLYEYFTVYNELTKVKYVTEGMRKPAFLSGEQKKAIVDLLFKTNRKVTVKQLKEDYFKKIECFDSVEISGVEDRFNASLGTYHDLLKIIKDKDFLDNEENEDILEDIVLTLTLFEDREMIEERLKTYAHLFDDKVMKQLKRRRYTGWGRLSRKLINGIRDKQSGKTILDFLKSDGFANRNFMQLIHDDSLTFKEDIQKAQVSGQGDSLHEHIANLAGSPAIKKGILQTVKVVDELVKVMGRHKPENIVIEMARENQTTQKGQKNSRERMKRIEEGIKELGSQILKEHPVENTQLQNEKLYLYYLQNGRDMYVDQELDINRLSDYDVDHIVPQSFLKDDSIDNKVLTRSDKARGKSDNVPSEEVVKKMKNYWRQLLNAKLITQRKFDNLTKAERGGLSELDKAGFIKRQLVETRQITKHVAQILDSRMNTKYDENDKLIREVKVITLKSKLVSDFRKDFQFYKVREINNYHHAHDAYLNAVVGTALIKKYPKLESEFVYGDYKVYDVRKMIAKSEQEIGKATAKYFFYSNIMNFFKTEITLANGEIRKRPLIETNGETGEIVWDKGRDFATVRKVLSMPQVNIVKKTEVQTGGFSKESILPKRNSDKLIARKKDWDPKKYGGFDSPTVAYSVLVVAKVEKGKSKKLKSVKELLGITIMERSSFEKNPIDFLEAKGYKEVKKDLIIKLPKYSLFELENGRKRMLASAGELQKGNELALPSKYVNFLYLASHYEKLKGSPEDNEQKQLFVEQHKHYLDEIIEQISEFSKRVILADANLDKVLSAYNKHRDKPIREQAENIIHLFTLTNLGAPAAFKYFDTTIDRKRYTSTKEVLDATLIHQSITGLYETRIDLSQLGGDGGPAPGGSGGTLNIEDEYRLHETSKEPDVSLGSTWLSDFPQAWAETGGMGLAVRQAPLIIPLKATSTPVSIKQYPMSQEARLGIKPHIQRLLDQGILVPCQSPWNTPLLPVKKPGTNDYRPVQDLREVNKRVEDIHPTVPNPYNLLSGLPPSHQWYTVLDLKDAFFCLRLHPTSQPLFAFEWRDPEMGISGQLTWTRLPQGFKNSPTLFNEALHRDLADFRIQHPDLILLQYVDDLLLAATSELDCQQGTRALLQTLGNLGYRASAKKAQICQKQVKYLGYLLKEGQRWLTEARKETVMGQPTPKTPRQLREFLGKAGFCRLFIPGFAEMAAPLYPLTKPGTLFNWGPDQQKAYQEIKQALLTAPALGLPDLTKPFELFVDEKQGYAKGVLTQKLGPWRRPVAYLSKKLDPVAAGWPPCLRMVAAIAVLTKDAGKLTMGQPLVILAPHAVEALVKQPPDRWLSNARMTHYQALLLDTDRVQFGPVVALNPATLLPLPEEGLQHNCLDILAEAHGTRPDLTDQPLPDADHTWYTDGSSLLQEGQRKAGAAVTTETEVIWAKALPAGTSAQRAELIALTQALKMAEGKKLNVYTDSRYAFATAHIHGEIYRRRGWLTSEGKEIKNKDEILALLKALFLPKRLSIIHCPGHQKGHSAEARGNRMADQAARKAAITETPDTSTLLIENSSPSGGSKRTADGSEFEAGKRTADGSEFEKRTADGSEFESPKKKAKVE

SEQ ID NO: 2644 - protein, 2135 aa, synthetic construct
  source 1..2135: note = Description of Artificial Sequence: Synthetic polypeptide
MPAAKRVKLDGGDKKYSIGLDIGTNSVGWAVITDEYKVPSKKFKVLGNTDRHSIKKNLIGALLFDSGETAEATRLKRTARRRYTRRKNRICYLQEIFSNEMAKVDDSFFHRLEESFLVEEDKKHERHPIFGNIVDEVAYHEKYPTIYHLRKKLVDSTDKADLRLIYLALAHMIKFRGHFLIEGDLNPDNSDVDKLFIQLVQTYNQLFEENPINASGVDAKAILSARLSKSRRLENLIAQLPGEKKNGLFGNLIALSLGLTPNFKSNFDLAEDAKLQLSKDTYDDDLDNLLAQIGDQYADLFLAAKNLSDAILLSDILRVNTEITKAPLSASMIKRYDEHHQDLTLLKALVRQQLPEKYKEIFFDQSKNGYAGYIDGGASQEEFYKFIKPILEKMDGTEELLVKLNREDLLRKQRTFDNGSIPHQIHLGELHAILRRQEDFYPFLKDNREKIEKILTFRIPYYVGPLARGNSRFAWMTRKSEETITPWNFEEVVDKGASAQSFIERMTNFDKNLPNEKVLPKHSLLYEYFTVYNELTKVKYVTEGMRKPAFLSGEQKKAIVDLLFKTNRKVTVKQLKEDYFKKIECFDSVEISGVEDRFNASLGTYHDLLKIIKDKDFLDNEENEDILEDIVLTLTLFEDREMIEERLKTYAHLFDDKVMKQLKRRRYTGWGRLSRKLINGIRDKQSGKTILDFLKSDGFANRNFMQLIHDDSLTFKEDIQKAQVSGQGDSLHEHIANLAGSPAIKKGILQTVKVVDELVKVMGRHKPENIVIEMARENQTTQKGQKNSRERMKRIEEGIKELGSQILKEHPVENTQLQNEKLYLYYLQNGRDMYVDQELDINRLSDYDVDHIVPQSFLKDDSIDNKVLTRSDKARGKSDNVPSEEVVKKMKNYWRQLLNAKLITQRKFDNLTKAERGGLSELDKAGFIKRQLVETRQITKHVAQILDSRMNTKYDENDKLIREVKVITLKSKLVSDFRKDFQFYKVREINNYHHAHDAYLNAVVGTALIKKYPKLESEFVYGDYKVYDVRKMIAKSEQEIGKATAKYFFYSNIMNFFKTEITLANGEIRKRPLIETNGETGEIVWDKGRDFATVRKVLSMPQVNIVKKTEVQTGGFSKESILPKRNSDKLIARKKDWDPKKYGGFDSPTVAYSVLVVAKVEKGKSKKLKSVKELLGITIMERSSFEKNPIDFLEAKGYKEVKKDLIIKLPKYSLFELENGRKRMLASAGELQKGNELALPSKYVNFLYLASHYEKLKGSPEDNEQKQLFVEQHKHYLDEIIEQISEFSKRVILADANLDKVLSAYNKHRDKPIREQAENIIHLFTLTNLGAPAAFKYFDTTIDRKRYTSTKEVLDATLIHQSITGLYETRIDLSQLGGDGGGGGGSGGGGSGGGGSGGGGSGGGGSGGGGSGGTLNIEDEYRLHETSKEPDVSLGSTWLSDFPQAWAETGGMGLAVRQAPLIIPLKATSTPVSIKQYPMSQEARLGIKPHIQRLLDQGILVPCQSPWNTPLLPVKKPGTNDYRPVQDLREVNKRVEDIHPTVPNPYNLLSGLPPSHQWYTVLDLKDAFFCLRLHPTSQPLFAFEWRDPEMGISGQLTWTRLPQGFKNSPTLFNEALHRDLADFRIQHPDLILLQYVDDLLLAATSELDCQQGTRALLQTLGNLGYRASAKKAQICQKQVKYLGYLLKEGQRWLTEARKETVMGQPTPKTPRQLREFLGKAGFCRLFIPGFAEMAAPLYPLTKPGTLFNWGPDQQKAYQEIKQALLTAPALGLPDLTKPFELFVDEKQGYAKGVLTQKLGPWRRPVAYLSKKLDPVAAGWPPCLRMVAAIAVLTKDAGKLTMGQPLVILAPHAVEALVKQPPDRWLSNARMTHYQALLLDTDRVQFGPVVALNPATLLPLPEEGLQHNCLDILAEAHGTRPDLTDQPLPDADHTWYTDGSSLLQEGQRKAGAAVTTETEVIWAKALPAGTSAQRAELIALTQALKMAEGKKLNVYTDSRYAFATAHIHGEIYRRRGWLTSEGKEIKNKDEILALLKALFLPKRLSIIHCPGHQKGHSAEARGNRMADQAARKAAITETPDTSTLLIENSSPSGGSKRTADGSEFEAGKRTADGSEFEKRTADGSEFESPKKKAKVE

SEQ ID NO: 2645 - protein, 2116 aa, synthetic construct
  source 1..2116: note = Description of Artificial Sequence: Synthetic polypeptide
MPAAKRVKLDGGDKKYSIGLDIGTNSVGWAVITDEYKVPSKKFKVLGNTDRHSIKKNLIGALLFDSGETAEATRLKRTARRRYTRRKNRICYLQEIFSNEMAKVDDSFFHRLEESFLVEEDKKHERHPIFGNIVDEVAYHEKYPTIYHLRKKLVDSTDKADLRLIYLALAHMIKFRGHFLIEGDLNPDNSDVDKLFIQLVQTYNQLFEENPINASGVDAKAILSARLSKSRRLENLIAQLPGEKKNGLFGNLIALSLGLTPNFKSNFDLAEDAKLQLSKDTYDDDLDNLLAQIGDQYADLFLAAKNLSDAILLSDILRVNTEITKAPLSASMIKRYDEHHQDLTLLKALVRQQLPEKYKEIFFDQSKNGYAGYIDGGASQEEFYKFIKPILEKMDGTEELLVKLNREDLLRKQRTFDNGSIPHQIHLGELHAILRRQEDFYPFLKDNREKIEKILTFRIPYYVGPLARGNSRFAWMTRKSEETITPWNFEEVVDKGASAQSFIERMTNFDKNLPNEKVLPKHSLLYEYFTVYNELTKVKYVTEGMRKPAFLSGEQKKAIVDLLFKTNRKVTVKQLKEDYFKKIECFDSVEISGVEDRFNASLGTYHDLLKIIKDKDFLDNEENEDILEDIVLTLTLFEDREMIEERLKTYAHLFDDKVMKQLKRRRYTGWGRLSRKLINGIRDKQSGKTILDFLKSDGFANRNFMQLIHDDSLTFKEDIQKAQVSGQGDSLHEHIANLAGSPAIKKGILQTVKVVDELVKVMGRHKPENIVIEMARENQTTQKGQKNSRERMKRIEEGIKELGSQILKEHPVENTQLQNEKLYLYYLQNGRDMYVDQELDINRLSDYDVDHIVPQSFLKDDSIDNKVLTRSDKARGKSDNVPSEEVVKKMKNYWRQLLNAKLITQRKFDNLTKAERGGLSELDKAGFIKRQLVETRQITKHVAQILDSRMNTKYDENDKLIREVKVITLKSKLVSDFRKDFQFYKVREINNYHHAHDAYLNAVVGTALIKKYPKLESEFVYGDYKVYDVRKMIAKSEQEIGKATAKYFFYSNIMNFFKTEITLANGEIRKRPLIETNGETGEIVWDKGRDFATVRKVLSMPQVNIVKKTEVQTGGFSKESILPKRNSDKLIARKKDWDPKKYGGFDSPTVAYSVLVVAKVEKGKSKKLKSVKELLGITIMERSSFEKNPIDFLEAKGYKEVKKDLIIKLPKYSLFELENGRKRMLASAGELQKGNELALPSKYVNFLYLASHYEKLKGSPEDNEQKQLFVEQHKHYLDEIIEQISEFSKRVILADANLDKVLSAYNKHRDKPIREQAENIIHLFTLTNLGAPAAFKYFDTTIDRKRYTSTKEVLDATLIHQSITGLYETRIDLSQLGGDGGPAPEAAAKGSSGGTLNIEDEYRLHETSKEPDVSLGSTWLSDFPQAWAETGGMGLAVRQAPLIIPLKATSTPVSIKQYPMSQEARLGIKPHIQRLLDQGILVPCQSPWNTPLLPVKKPGTNDYRPVQDLREVNKRVEDIHPTVPNPYNLLSGLPPSHQWYTVLDLKDAFFCLRLHPTSQPLFAFEWRDPEMGISGQLTWTRLPQGFKNSPTLFNEALHRDLADFRIQHPDLILLQYVDDLLLAATSELDCQQGTRALLQTLGNLGYRASAKKAQICQKQVKYLGYLLKEGQRWLTEARKETVMGQPTPKTPRQLREFLGKAGFCRLFIPGFAEMAAPLYPLTKPGTLFNWGPDQQKAYQEIKQALLTAPALGLPDLTKPFELFVDEKQGYAKGVLTQKLGPWRRPVAYLSKKLDPVAAGWPPCLRMVAAIAVLTKDAGKLTMGQPLVILAPHAVEALVKQPPDRWLSNARMTHYQALLLDTDRVQFGPVVALNPATLLPLPEEGLQHNCLDILAEAHGTRPDLTDQPLPDADHTWYTDGSSLLQEGQRKAGAAVTTETEVIWAKALPAGTSAQRAELIALTQALKMAEGKKLNVYTDSRYAFATAHIHGEIYRRRGWLTSEGKEIKNKDEILALLKALFLPKRLSIIHCPGHQKGHSAEARGNRMADQAARKAAITETPDTSTLLIENSSPSGGSKRTADGSEFEAGKRTADGSEFEKRTADGSEFESPKKKAKVE

SEQ ID NO: 2646 - protein, 2108 aa, synthetic construct
  source 1..2108: note = Description of Artificial Sequence: Synthetic polypeptide
MPAAKRVKLDGGDKKYSIGLDIGTNSVGWAVITDEYKVPSKKFKVLGNTDRHSIKKNLIGALLFDSGETAEATRLKRTARRRYTRRKNRICYLQEIFSNEMAKVDDSFFHRLEESFLVEEDKKHERHPIFGNIVDEVAYHEKYPTIYHLRKKLVDSTDKADLRLIYLALAHMIKFRGHFLIEGDLNPDNSDVDKLFIQLVQTYNQLFEENPINASGVDAKAILSARLSKSRRLENLIAQLPGEKKNGLFGNLIALSLGLTPNFKSNFDLAEDAKLQLSKDTYDDDLDNLLAQIGDQYADLFLAAKNLSDAILLSDILRVNTEITKAPLSASMIKRYDEHHQDLTLLKALVRQQLPEKYKEIFFDQSKNGYAGYIDGGASQEEFYKFIKPILEKMDGTEELLVKLNREDLLRKQRTFDNGSIPHQIHLGELHAILRRQEDFYPFLKDNREKIEKILTFRIPYYVGPLARGNSRFAWMTRKSEETITPWNFEEVVDKGASAQSFIERMTNFDKNLPNEKVLPKHSLLYEYFTVYNELTKVKYVTEGMRKPAFLSGEQKKAIVDLLFKTNRKVTVKQLKEDYFKKIECFDSVEISGVEDRFNASLGTYHDLLKIIKDKDFLDNEENEDILEDIVLTLTLFEDREMIEERLKTYAHLFDDKVMKQLKRRRYTGWGRLSRKLINGIRDKQSGKTILDFLKSDGFANRNFMQLIHDDSLTFKEDIQKAQVSGQGDSLHEHIANLAGSPAIKKGILQTVKVVDELVKVMGRHKPENIVIEMARENQTTQKGQKNSRERMKRIEEGIKELGSQILKEHPVENTQLQNEKLYLYYLQNGRDMYVDQELDINRLSDYDVDHIVPQSFLKDDSIDNKVLTRSDKARGKSDNVPSEEVVKKMKNYWRQLLNAKLITQRKFDNLTKAERGGLSELDKAGFIKRQLVETRQITKHVAQILDSRMNTKYDENDKLIREVKVITLKSKLVSDFRKDFQFYKVREINNYHHAHDAYLNAVVGTALIKKYPKLESEFVYGDYKVYDVRKMIAKSEQEIGKATAKYFFYSNIMNFFKTEITLANGEIRKRPLIETNGETGEIVWDKGRDFATVRKVLSMPQVNIVKKTEVQTGGFSKESILPKRNSDKLIARKKDWDPKKYGGFDSPTVAYSVLVVAKVEKGKSKKLKSVKELLGITIMERSSFEKNPIDFLEAKGYKEVKKDLIIKLPKYSLFELENGRKRMLASAGELQKGNELALPSKYVNFLYLASHYEKLKGSPEDNEQKQLFVEQHKHYLDEIIEQISEFSKRVILADANLDKVLSAYNKHRDKPIREQAENIIHLFTLTNLGAPAAFKYFDTTIDRKRYTSTKEVLDATLIHQSITGLYETRIDLSQLGGDGGGGGGGTLNIEDEYRLHETSKEPDVSLGSTWLSDFPQAWAETGGMGLAVRQAPLIIPLKATSTPVSIKQYPMSQEARLGIKPHIQRLLDQGILVPCQSPWNTPLLPVKKPGTNDYRPVQDLREVNKRVEDIHPTVPNPYNLLSGLPPSHQWYTVLDLKDAFFCLRLHPTSQPLFAFEWRDPEMGISGQLTWTRLPQGFKNSPTLFNEALHRDLADFRIQHPDLILLQYVDDLLLAATSELDCQQGTRALLQTLGNLGYRASAKKAQICQKQVKYLGYLLKEGQRWLTEARKETVMGQPTPKTPRQLREFLGKAGFCRLFIPGFAEMAAPLYPLTKPGTLFNWGPDQQKAYQEIKQALLTAPALGLPDLTKPFELFVDEKQGYAKGVLTQKLGPWRRPVAYLSKKLDPVAAGWPPCLRMVAAIAVLTKDAGKLTMGQPLVILAPHAVEALVKQPPDRWLSNARMTHYQALLLDTDRVQFGPVVALNPATLLPLPEEGLQHNCLDILAEAHGTRPDLTDQPLPDADHTWYTDGSSLLQEGQRKAGAAVTTETEVIWAKALPAGTSAQRAELIALTQALKMAEGKKLNVYTDSRYAFATAHIHGEIYRRRGWLTSEGKEIKNKDEILALLKALFLPKRLSIIHCPGHQKGHSAEARGNRMADQAARKAAITETPDTSTLLIENSSPSGGSKRTADGSEFEAGKRTADGSEFEKRTADGSEFESPKKKAKVE

SEQ ID NO: 2647 - protein, 2115 aa, synthetic construct
  source 1..2115: note = Description of Artificial Sequence: Synthetic polypeptide
MPAAKRVKLDGGDKKYSIGLDIGTNSVGWAVITDEYKVPSKKFKVLGNTDRHSIKKNLIGALLFDSGETAEATRLKRTARRRYTRRKNRICYLQEIFSNEMAKVDDSFFHRLEESFLVEEDKKHERHPIFGNIVDEVAYHEKYPTIYHLRKKLVDSTDKADLRLIYLALAHMIKFRGHFLIEGDLNPDNSDVDKLFIQLVQTYNQLFEENPINASGVDAKAILSARLSKSRRLENLIAQLPGEKKNGLFGNLIALSLGLTPNFKSNFDLAEDAKLQLSKDTYDDDLDNLLAQIGDQYADLFLAAKNLSDAILLSDILRVNTEITKAPLSASMIKRYDEHHQDLTLLKALVRQQLPEKYKEIFFDQSKNGYAGYIDGGASQEEFYKFIKPILEKMDGTEELLVKLNREDLLRKQRTFDNGSIPHQIHLGELHAILRRQEDFYPFLKDNREKIEKILTFRIPYYVGPLARGNSRFAWMTRKSEETITPWNFEEVVDKGASAQSFIERMTNFDKNLPNEKVLPKHSLLYEYFTVYNELTKVKYVTEGMRKPAFLSGEQKKAIVDLLFKTNRKVTVKQLKEDYFKKIECFDSVEISGVEDRFNASLGTYHDLLKIIKDKDFLDNEENEDILEDIVLTLTLFEDREMIEERLKTYAHLFDDKVMKQLKRRRYTGWGRLSRKLINGIRDKQSGKTILDFLKSDGFANRNFMQLIHDDSLTFKEDIQKAQVSGQGDSLHEHIANLAGSPAIKKGILQTVKVVDELVKVMGRHKPENIVIEMARENQTTQKGQKNSRERMKRIEEGIKELGSQILKEHPVENTQLQNEKLYLYYLQNGRDMYVDQELDINRLSDYDVDHIVPQSFLKDDSIDNKVLTRSDKARGKSDNVPSEEVVKKMKNYWRQLLNAKLITQRKFDNLTKAERGGLSELDKAGFIKRQLVETRQITKHVAQILDSRMNTKYDENDKLIREVKVITLKSKLVSDFRKDFQFYKVREINNYHHAHDAYLNAVVGTALIKKYPKLESEFVYGDYKVYDVRKMIAKSEQEIGKATAKYFFYSNIMNFFKTEITLANGEIRKRPLIETNGETGEIVWDKGRDFATVRKVLSMPQVNIVKKTEVQTGGFSKESILPKRNSDKLIARKKDWDPKKYGGFDSPTVAYSVLVVAKVEKGKSKKLKSVKELLGITIMERSSFEKNPIDFLEAKGYKEVKKDLIIKLPKYSLFELENGRKRMLASAGELQKGNELALPSKYVNFLYLASHYEKLKGSPEDNEQKQLFVEQHKHYLDEIIEQISEFSKRVILADANLDKVLSAYNKHRDKPIREQAENIIHLFTLTNLGAPAAFKYFDTTIDRKRYTSTKEVLDATLIHQSITGLYETRIDLSQLGGDGGEAAAKEAAAKGGTLNIEDEYRLHETSKEPDVSLGSTWLSDFPQAWAETGGMGLAVRQAPLIIPLKATSTPVSIKQYPMSQEARLGIKPHIQRLLDQGILVPCQSPWNTPLLPVKKPGTNDYRPVQDLREVNKRVEDIHPTVPNPYNLLSGLPPSHQWYTVLDLKDAFFCLRLHPTSQPLFAFEWRDPEMGISGQLTWTRLPQGFKNSPTLFNEALHRDLADFRIQHPDLILLQYVDDLLLAATSELDCQQGTRALLQTLGNLGYRASAKKAQICQKQVKYLGYLLKEGQRWLTEARKETVMGQPTPKTPRQLREFLGKAGFCRLFIPGFAEMAAPLYPLTKPGTLFNWGPDQQKAYQEIKQALLTAPALGLPDLTKPFELFVDEKQGYAKGVLTQKLGPWRRPVAYLSKKLDPVAAGWPPCLRMVAAIAVLTKDAGKLTMGQPLVILAPHAVEALVKQPPDRWLSNARMTHYQALLLDTDRVQFGPVVALNPATLLPLPEEGLQHNCLDILAEAHGTRPDLTDQPLPDADHTWYTDGSSLLQEGQRKAGAAVTTETEVIWAKALPAGTSAQRAELIALTQALKMAEGKKLNVYTDSRYAFATAHIHGEIYRRRGWLTSEGKEIKNKDEILALLKALFLPKRLSIIHCPGHQKGHSAEARGNRMADQAARKAAITETPDTSTLLIENSSPSGGSKRTADGSEFEAGKRTADGSEFEKRTADGSEFESPKKKAKVE

SEQ ID NO: 2648 - protein, 2116 aa, synthetic construct
  source 1..2116: note = Description of Artificial Sequence: Synthetic polypeptide
MPAAKRVKLDGGDKKYSIGLDIGTNSVGWAVITDEYKVPSKKFKVLGNTDRHSIKKNLIGALLFDSGETAEATRLKRTARRRYTRRKNRICYLQEIFSNEMAKVDDSFFHRLEESFLVEEDKKHERHPIFGNIVDEVAYHEKYPTIYHLRKKLVDSTDKADLRLIYLALAHMIKFRGHFLIEGDLNPDNSDVDKLFIQLVQTYNQLFEENPINASGVDAKAILSARLSKSRRLENLIAQLPGEKKNGLFGNLIALSLGLTPNFKSNFDLAEDAKLQLSKDTYDDDLDNLLAQIGDQYADLFLAAKNLSDAILLSDILRVNTEITKAPLSASMIKRYDEHHQDLTLLKALVRQQLPEKYKEIFFDQSKNGYAGYIDGGASQEEFYKFIKPILEKMDGTEELLVKLNREDLLRKQRTFDNGSIPHQIHLGELHAILRRQEDFYPFLKDNREKIEKILTFRIPYYVGPLARGNSRFAWMTRKSEETITPWNFEEVVDKGASAQSFIERMTNFDKNLPNEKVLPKHSLLYEYFTVYNELTKVKYVTEGMRKPAFLSGEQKKAIVDLLFKTNRKVTVKQLKEDYFKKIECFDSVEISGVEDRFNASLGTYHDLLKIIKDKDFLDNEENEDILEDIVLTLTLFEDREMIEERLKTYAHLFDDKVMKQLKRRRYTGWGRLSRKLINGIRDKQSGKTILDFLKSDGFANRNFMQLIHDDSLTFKEDIQKAQVSGQGDSLHEHIANLAGSPAIKKGILQTVKVVDELVKVMGRHKPENIVIEMARENQTTQKGQKNSRERMKRIEEGIKELGSQILKEHPVENTQLQNEKLYLYYLQNGRDMYVDQELDINRLSDYDVDHIVPQSFLKDDSIDNKVLTRSDKARGKSDNVPSEEVVKKMKNYWRQLLNAKLITQRKFDNLTKAERGGLSELDKAGFIKRQLVETRQITKHVAQILDSRMNTKYDENDKLIREVKVITLKSKLVSDFRKDFQFYKVREINNYHHAHDAYLNAVVGTALIKKYPKLESEFVYGDYKVYDVRKMIAKSEQEIGKATAKYFFYSNIMNFFKTEITLANGEIRKRPLIETNGETGEIVWDKGRDFATVRKVLSMPQVNIVKKTEVQTGGFSKESILPKRNSDKLIARKKDWDPKKYGGFDSPTVAYSVLVVAKVEKGKSKKLKSVKELLGITIMERSSFEKNPIDFLEAKGYKEVKKDLIIKLPKYSLFELENGRKRMLASAGELQKGNELALPSKYVNFLYLASHYEKLKGSPEDNEQKQLFVEQHKHYLDEIIEQISEFSKRVILADANLDKVLSAYNKHRDKPIREQAENIIHLFTLTNLGAPAAFKYFDTTIDRKRYTSTKEVLDATLIHQSITGLYETRIDLSQLGGDGGGSSPAPEAAAKGGTLNIEDEYRLHETSKEPDVSLGSTWLSDFPQAWAETGGMGLAVRQAPLIIPLKATSTPVSIKQYPMSQEARLGIKPHIQRLLDQGILVPCQSPWNTPLLPVKKPGTNDYRPVQDLREVNKRVEDIHPTVPNPYNLLSGLPPSHQWYTVLDLKDAFFCLRLHPTSQPLFAFEWRDPEMGISGQLTWTRLPQGFKNSPTLFNEALHRDLADFRIQHPDLILLQYVDDLLLAATSELDCQQGTRALLQTLGNLGYRASAKKAQICQKQVKYLGYLLKEGQRWLTEARKETVMGQPTPKTPRQLREFLGKAGFCRLFIPGFAEMAAPLYPLTKPGTLFNWGPDQQKAYQEIKQALLTAPALGLPDLTKPFELFVDEKQGYAKGVLTQKLGPWRRPVAYLSKKLDPVAAGWPPCLRMVAAIAVLTKDAGKLTMGQPLVILAPHAVEALVKQPPDRWLSNARMTHYQALLLDTDRVQFGPVVALNPATLLPLPEEGLQHNCLDILAEAHGTRPDLTDQPLPDADHTWYTDGSSLLQEGQRKAGAAVTTETEVIWAKALPAGTSAQRAELIALTQALKMAEGKKLNVYTDSRYAFATAHIHGEIYRRRGWLTSEGKEIKNKDEILALLKALFLPKRLSIIHCPGHQKGHSAEARGNRMADQAARKAAITETPDTSTLLIENSSPSGGSKRTADGSEFEAGKRTADGSEFEKRTADGSEFESPKKKAKVE

SEQ ID NO: 2649 - protein, 2114 aa, synthetic construct
  source 1..2114: note = Description of Artificial Sequence: Synthetic polypeptide
MPAAKRVKLDGGDKKYSIGLDIGTNSVGWAVITDEYKVPSKKFKVLGNTDRHSIKKNLIGALLFDSGETAEATRLKRTARRRYTRRKNRICYLQEIFSNEMAKVDDSFFHRLEESFLVEEDKKHERHPIFGNIVDEVAYHEKYPTIYHLRKKLVDSTDKADLRLIYLALAHMIKFRGHFLIEGDLNPDNSDVDKLFIQLVQTYNQLFEENPINASGVDAKAILSARLSKSRRLENLIAQLPGEKKNGLFGNLIALSLGLTPNFKSNFDLAEDAKLQLSKDTYDDDLDNLLAQIGDQYADLFLAAKNLSDAILLSDILRVNTEITKAPLSASMIKRYDEHHQDLTLLKALVRQQLPEKYKEIFFDQSKNGYAGYIDGGASQEEFYKFIKPILEKMDGTEELLVKLNREDLLRKQRTFDNGSIPHQIHLGELHAILRRQEDFYPFLKDNREKIEKILTFRIPYYVGPLARGNSRFAWMTRKSEETITPWNFEEVVDKGASAQSFIERMTNFDKNLPNEKVLPKHSLLYEYFTVYNELTKVKYVTEGMRKPAFLSGEQKKAIVDLLFKTNRKVTVKQLKEDYFKKIECFDSVEISGVEDRFNASLGTYHDLLKIIKDKDFLDNEENEDILEDIVLTLTLFEDREMIEERLKTYAHLFDDKVMKQLKRRRYTGWGRLSRKLINGIRDKQSGKTILDFLKSDGFANRNFMQLIHDDSLTFKEDIQKAQVSGQGDSLHEHIANLAGSPAIKKGILQTVKVVDELVKVMGRHKPENIVIEMARENQTTQKGQKNSRERMKRIEEGIKELGSQILKEHPVENTQLQNEKLYLYYLQNGRDMYVDQELDINRLSDYDVDHIVPQSFLKDDSIDNKVLTRSDKARGKSDNVPSEEVVKKMKNYWRQLLNAKLITQRKFDNLTKAERGGLSELDKAGFIKRQLVETRQITKHVAQILDSRMNTKYDENDKLIREVKVITLKSKLVSDFRKDFQFYKVREINNYHHAHDAYLNAVVGTALIKKYPKLESEFVYGDYKVYDVRKMIAKSEQEIGKATAKYFFYSNIMNFFKTEITLANGEIRKRPLIETNGETGEIVWDKGRDFATVRKVLSMPQVNIVKKTEVQTGGFSKESILPKRNSDKLIARKKDWDPKKYGGFDSPTVAYSVLVVAKVEKGKSKKLKSVKELLGITIMERSSFEKNPIDFLEAKGYKEVKKDLIIKLPKYSLFELENGRKRMLASAGELQKGNELALPSKYVNFLYLASHYEKLKGSPEDNEQKQLFVEQHKHYLDEIIEQISEFSKRVILADANLDKVLSAYNKHRDKPIREQAENIIHLFTLTNLGAPAAFKYFDTTIDRKRYTSTKEVLDATLIHQSITGLYETRIDLSQLGGDGGPAPGGSGGGGGTLNIEDEYRLHETSKEPDVSLGSTWLSDFPQAWAETGGMGLAVRQAPLIIPLKATSTPVSIKQYPMSQEARLGIKPHIQRLLDQGILVPCQSPWNTPLLPVKKPGTNDYRPVQDLREVNKRVEDIHPTVPNPYNLLSGLPPSHQWYTVLDLKDAFFCLRLHPTSQPLFAFEWRDPEMGISGQLTWTRLPQGFKNSPTLFNEALHRDLADFRIQHPDLILLQYVDDLLLAATSELDCQQGTRALLQTLGNLGYRASAKKAQICQKQVKYLGYLLKEGQRWLTEARKETVMGQPTPKTPRQLREFLGKAGFCRLFIPGFAEMAAPLYPLTKPGTLFNWGPDQQKAYQEIKQALLTAPALGLPDLTKPFELFVDEKQGYAKGVLTQKLGPWRRPVAYLSKKLDPVAAGWPPCLRMVAAIAVLTKDAGKLTMGQPLVILAPHAVEALVKQPPDRWLSNARMTHYQALLLDTDRVQFGPVVALNPATLLPLPEEGLQHNCLDILAEAHGTRPDLTDQPLPDADHTWYTDGSSLLQEGQRKAGAAVTTETEVIWAKALPAGTSAQRAELIALTQALKMAEGKKLNVYTDSRYAFATAHIHGEIYRRRGWLTSEGKEIKNKDEILALLKALFLPKRLSIIHCPGHQKGHSAEARGNRMADQAARKAAITETPDTSTLLIENSSPSGGSKRTADGSEFEAGKRTADGSEFEKRTADGSEFESPKKKAKVE

SEQ ID NO: 2650 - protein, 2114 aa, synthetic construct
  source 1..2114: note = Description of Artificial Sequence: Synthetic polypeptide
MPAAKRVKLDGGDKKYSIGLDIGTNSVGWAVITDEYKVPSKKFKVLGNTDRHSIKKNLIGALLFDSGETAEATRLKRTARRRYTRRKNRICYLQEIFSNEMAKVDDSFFHRLEESFLVEEDKKHERHPIFGNIVDEVAYHEKYPTIYHLRKKLVDSTDKADLRLIYLALAHMIKFRGHFLIEGDLNPDNSDVDKLFIQLVQTYNQLFEENPINASGVDAKAILSARLSKSRRLENLIAQLPGEKKNGLFGNLIALSLGLTPNFKSNFDLAEDAKLQLSKDTYDDDLDNLLAQIGDQYADLFLAAKNLSDAILLSDILRVNTEITKAPLSASMIKRYDEHHQDLTLLKALVRQQLPEKYKEIFFDQSKNGYAGYIDGGASQEEFYKFIKPILEKMDGTEELLVKLNREDLLRKQRTFDNGSIPHQIHLGELHAILRRQEDFYPFLKDNREKIEKILTFRIPYYVGPLARGNSRFAWMTRKSEETITPWNFEEVVDKGASAQSFIERMTNFDKNLPNEKVLPKHSLLYEYFTVYNELTKVKYVTEGMRKPAFLSGEQKKAIVDLLFKTNRKVTVKQLKEDYFKKIECFDSVEISGVEDRFNASLGTYHDLLKIIKDKDFLDNEENEDILEDIVLTLTLFEDREMIEERLKTYAHLFDDKVMKQLKRRRYTGWGRLSRKLINGIRDKQSGKTILDFLKSDGFANRNFMQLIHDDSLTFKEDIQKAQVSGQGDSLHEHIANLAGSPAIKKGILQTVKVVDELVKVMGRHKPENIVIEMARENQTTQKGQKNSRERMKRIEEGIKELGSQILKEHPVENTQLQNEKLYLYYLQNGRDMYVDQELDINRLSDYDVDHIVPQSFLKDDSIDNKVLTRSDKARGKSDNVPSEEVVKKMKNYWRQLLNAKLITQRKFDNLTKAERGGLSELDKAGFIKRQLVETRQITKHVAQILDSRMNTKYDENDKLIREVKVITLKSKLVSDFRKDFQFYKVREINNYHHAHDAYLNAVVGTALIKKYPKLESEFVYGDYKVYDVRKMIAKSEQEIGKATAKYFFYSNIMNFFKTEITLANGEIRKRPLIETNGETGEIVWDKGRDFATVRKVLSMPQVNIVKKTEVQTGGFSKESILPKRNSDKLIARKKDWDPKKYGGFDSPTVAYSVLVVAKVEKGKSKKLKSVKELLGITIMERSSFEKNPIDFLEAKGYKEVKKDLIIKLPKYSLFELENGRKRMLASAGELQKGNELALPSKYVNFLYLASHYEKLKGSPEDNEQKQLFVEQHKHYLDEIIEQISEFSKRVILADANLDKVLSAYNKHRDKPIREQAENIIHLFTLTNLGAPAAFKYFDTTIDRKRYTSTKEVLDATLIHQSITGLYETRIDLSQLGGDGGPAPGGGGGSGGTLNIEDEYRLHETSKEPDVSLGSTWLSDFPQAWAETGGMGLAVRQAPLIIPLKATSTPVSIKQYPMSQEARLGIKPHIQRLLDQGILVPCQSPWNTPLLPVKKPGTNDYRPVQDLREVNKRVEDIHPTVPNPYNLLSGLPPSHQWYTVLDLKDAFFCLRLHPTSQPLFAFEWRDPEMGISGQLTWTRLPQGFKNSPTLFNEALHRDLADFRIQHPDLILLQYVDDLLLAATSELDCQQGTRALLQTLGNLGYRASAKKAQICQKQVKYLGYLLKEGQRWLTEARKETVMGQPTPKTPRQLREFLGKAGFCRLFIPGFAEMAAPLYPLTKPGTLFNWGPDQQKAYQEIKQALLTAPALGLPDLTKPFELFVDEKQGYAKGVLTQKLGPWRRPVAYLSKKLDPVAAGWPPCLRMVAAIAVLTKDAGKLTMGQPLVILAPHAVEALVKQPPDRWLSNARMTHYQALLLDTDRVQFGPVVALNPATLLPLPEEGLQHNCLDILAEAHGTRPDLTDQPLPDADHTWYTDGSSLLQEGQRKAGAAVTTETEVIWAKALPAGTSAQRAELIALTQALKMAEGKKLNVYTDSRYAFATAHIHGEIYRRRGWLTSEGKEIKNKDEILALLKALFLPKRLSIIHCPGHQKGHSAEARGNRMADQAARKAAITETPDTSTLLIENSSPSGGSKRTADGSEFEAGKRTADGSEFEKRTADGSEFESPKKKAKVE

SEQ ID NO: 2651 - protein, 2116 aa, synthetic construct
  source 1..2116: note = Description of Artificial Sequence: Synthetic polypeptide
MPAAKRVKLDGGDKKYSIGLDIGTNSVGWAVITDEYKVPSKKFKVLGNTDRHSIKKNLIGALLFDSGETAEATRLKRTARRRYTRRKNRICYLQEIFSNEMAKVDDSFFHRLEESFLVEEDKKHERHPIFGNIVDEVAYHEKYPTIYHLRKKLVDSTDKADLRLIYLALAHMIKFRGHFLIEGDLNPDNSDVDKLFIQLVQTYNQLFEENPINASGVDAKAILSARLSKSRRLENLIAQLPGEKKNGLFGNLIALSLGLTPNFKSNFDLAEDAKLQLSKDTYDDDLDNLLAQIGDQYADLFLAAKNLSDAILLSDILRVNTEITKAPLSASMIKRYDEHHQDLTLLKALVRQQLPEKYKEIFFDQSKNGYAGYIDGGASQEEFYKFIKPILEKMDGTEELLVKLNREDLLRKQRTFDNGSIPHQIHLGELHAILRRQEDFYPFLKDNREKIEKILTFRIPYYVGPLARGNSRFAWMTRKSEETITPWNFEEVVDKGASAQSFIERMTNFDKNLPNEKVLPKHSLLYEYFTVYNELTKVKYVTEGMRKPAFLSGEQKKAIVDLLFKTNRKVTVKQLKEDYFKKIECFDSVEISGVEDRFNASLGTYHDLLKIIKDKDFLDNEENEDILEDIVLTLTLFEDREMIEERLKTYAHLFDDKVMKQLKRRRYTGWGRLSRKLINGIRDKQSGKTILDFLKSDGFANRNFMQLIHDDSLTFKEDIQKAQVSGQGDSLHEHIANLAGSPAIKKGILQTVKVVDELVKVMGRHKPENIVIEMARENQTTQKGQKNSRERMKRIEEGIKELGSQILKEHPVENTQLQNEKLYLYYLQNGRDMYVDQELDINRLSDYDVDHIVPQSFLKDDSIDNKVLTRSDKARGKSDNVPSEEVVKKMKNYWRQLLNAKLITQRKFDNLTKAERGGLSELDKAGFIKRQLVETRQITKHVAQILDSRMNTKYDENDKLIREVKVITLKSKLVSDFRKDFQFYKVREINNYHHAHDAYLNAVVGTALIKKYPKLESEFVYGDYKVYDVRKMIAKSEQEIGKATAKYFFYSNIMNFFKTEITLANGEIRKRPLIETNGETGEIVWDKGRDFATVRKVLSMPQVNIVKKTEVQTGGFSKESILPKRNSDKLIARKKDWDPKKYGGFDSPTVAYSVLVVAKVEKGKSKKLKSVKELLGITIMERSSFEKNPIDFLEAKGYKEVKKDLIIKLPKYSLFELENGRKRMLASAGELQKGNELALPSKYVNFLYLASHYEKLKGSPEDNEQKQLFVEQHKHYLDEIIEQISEFSKRVILADANLDKVLSAYNKHRDKPIREQAENIIHLFTLTNLGAPAAFKYFDTTIDRKRYTSTKEVLDATLIHQSITGLYETRIDLSQLGGDGGPAPGSSEAAAKGGTLNIEDEYRLHETSKEPDVSLGSTWLSDFPQAWAETGGMGLAVRQAPLIIPLKATSTPVSIKQYPMSQEARLGIKPHIQRLLDQGILVPCQSPWNTPLLPVKKPGTNDYRPVQDLREVNKRVEDIHPTVPNPYNLLSGLPPSHQWYTVLDLKDAFFCLRLHPTSQPLFAFEWRDPEMGISGQLTWTRLPQGFKNSPTLFNEALHRDLADFRIQHPDLILLQYVDDLLLAATSELDCQQGTRALLQTLGNLGYRASAKKAQICQKQVKYLGYLLKEGQRWLTEARKETVMGQPTPKTPRQLREFLGKAGFCRLFIPGFAEMAAPLYPLTKPGTLFNWGPDQQKAYQEIKQALLTAPALGLPDLTKPFELFVDEKQGYAKGVLTQKLGPWRRPVAYLSKKLDPVAAGWPPCLRMVAAIAVLTKDAGKLTMGQPLVILAPHAVEALVKQPPDRWLSNARMTHYQALLLDTDRVQFGPVVALNPATLLPLPEEGLQHNCLDILAEAHGTRPDLTDQPLPDADHTWYTDGSSLLQEGQRKAGAAVTTETEVIWAKALPAGTSAQRAELIALTQALKMAEGKKLNVYTDSRYAFATAHIHGEIYRRRGWLTSEGKEIKNKDEILALLKALFLPKRLSIIHCPGHQKGHSAEARGNRMADQAARKAAITETPDTSTLLIENSSPSGGSKRTADGSEFEAGKRTADGSEFEKRTADGSEFESPKKKAKVE

SEQ ID NO: 2652 - protein, 2116 aa, synthetic construct
  source 1..2116: note = Description of Artificial Sequence: Synthetic polypeptide
MPAAKRVKLDGGDKKYSIGLDIGTNSVGWAVITDEYKVPSKKFKVLGNTDRHSIKKNLIGALLFDSGETAEATRLKRTARRRYTRRKNRICYLQEIFSNEMAKVDDSFFHRLEESFLVEEDKKHERHPIFGNIVDEVAYHEKYPTIYHLRKKLVDSTDKADLRLIYLALAHMIKFRGHFLIEGDLNPDNSDVDKLFIQLVQTYNQLFEENPINASGVDAKAILSARLSKSRRLENLIAQLPGEKKNGLFGNLIALSLGLTPNFKSNFDLAEDAKLQLSKDTYDDDLDNLLAQIGDQYADLFLAAKNLSDAILLSDILRVNTEITKAPLSASMIKRYDEHHQDLTLLKALVRQQLPEKYKEIFFDQSKNGYAGYIDGGASQEEFYKFIKPILEKMDGTEELLVKLNREDLLRKQRTFDNGSIPHQIHLGELHAILRRQEDFYPFLKDNREKIEKILTFRIPYYVGPLARGNSRFAWMTRKSEETITPWNFEEVVDKGASAQSFIERMTNFDKNLPNEKVLPKHSLLYEYFTVYNELTKVKYVTEGMRKPAFLSGEQKKAIVDLLFKTNRKVTVKQLKEDYFKKIECFDSVEISGVEDRFNASLGTYHDLLKIIKDKDFLDNEENEDILEDIVLTLTLFEDREMIEERLKTYAHLFDDKVMKQLKRRRYTGWGRLSRKLINGIRDKQSGKTILDFLKSDGFANRNFMQLIHDDSLTFKEDIQKAQVSGQGDSLHEHIANLAGSPAIKKGILQTVKVVDELVKVMGRHKPENIVIEMARENQTTQKGQKNSRERMKRIEEGIKELGSQILKEHPVENTQLQNEKLYLYYLQNGRDMYVDQELDINRLSDYDVDHIVPQSFLKDDSIDNKVLTRSDKARGKSDNVPSEEVVKKMKNYWRQLLNAKLITQRKFDNLTKAERGGLSELDKAGFIKRQLVETRQITKHVAQILDSRMNTKYDENDKLIREVKVITLKSKLVSDFRKDFQFYKVREINNYHHAHDAYLNAVVGTALIKKYPKLESEFVYGDYKVYDVRKMIAKSEQEIGKATAKYFFYSNIMNFFKTEITLANGEIRKRPLIETNGETGEIVWDKGRDFATVRKVLSMPQVNIVKKTEVQTGGFSKESILPKRNSDKLIARKKDWDPKKYGGFDSPTVAYSVLVVAKVEKGKSKKLKSVKELLGITIMERSSFEKNPIDFLEAKGYKEVKKDLIIKLPKYSLFELENGRKRMLASAGELQKGNELALPSKYVNFLYLASHYEKLKGSPEDNEQKQLFVEQHKHYLDEIIEQISEFSKRVILADANLDKVLSAYNKHRDKPIREQAENIIHLFTLTNLGAPAAFKYFDTTIDRKRYTSTKEVLDATLIHQSITGLYETRIDLSQLGGDGGGSSGGGEAAAKGGTLNIEDEYRLHETSKEPDVSLGSTWLSDFPQAWAETGGMGLAVRQAPLIIPLKATSTPVSIKQYPMSQEARLGIKPHIQRLLDQGILVPCQSPWNTPLLPVKKPGTNDYRPVQDLREVNKRVEDIHPTVPNPYNLLSGLPPSHQWYTVLDLKDAFFCLRLHPTSQPLFAFEWRDPEMGISGQLTWTRLPQGFKNSPTLFNEALHRDLADFRIQHPDLILLQYVDDLLLAATSELDCQQGTRALLQTLGNLGYRASAKKAQICQKQVKYLGYLLKEGQRWLTEARKETVMGQPTPKTPRQLREFLGKAGFCRLFIPGFAEMAAPLYPLTKPGTLFNWGPDQQKAYQEIKQALLTAPALGLPDLTKPFELFVDEKQGYAKGVLTQKLGPWRRPVAYLSKKLDPVAAGWPPCLRMVAAIAVLTKDAGKLTMGQPLVILAPHAVEALVKQPPDRWLSNARMTHYQALLLDTDRVQFGPVVALNPATLLPLPEEGLQHNCLDILAEAHGTRPDLTDQPLPDADHTWYTDGSSLLQEGQRKAGAAVTTETEVIWAKALPAGTSAQRAELIALTQALKMAEGKKLNVYTDSRYAFATAHIHGEIYRRRGWLTSEGKEIKNKDEILALLKALFLPKRLSIIHCPGHQKGHSAEARGNRMADQAARKAAITETPDTSTLLIENSSPSGGSKRTADGSEFEAGKRTADGSEFEKRTADGSEFESPKKKAKVE

SEQ ID NO: 2653 - protein, 2111 aa, synthetic construct
  source 1..2111: note = Description of Artificial Sequence: Synthetic polypeptide
MPAAKRVKLDGGDKKYSIGLDIGTNSVGWAVITDEYKVPSKKFKVLGNTDRHSIKKNLIGALLFDSGETAEATRLKRTARRRYTRRKNRICYLQEIFSNEMAKVDDSFFHRLEESFLVEEDKKHERHPIFGNIVDEVAYHEKYPTIYHLRKKLVDSTDKADLRLIYLALAHMIKFRGHFLIEGDLNPDNSDVDKLFIQLVQTYNQLFEENPINASGVDAKAILSARLSKSRRLENLIAQLPGEKKNGLFGNLIALSLGLTPNFKSNFDLAEDAKLQLSKDTYDDDLDNLLAQIGDQYADLFLAAKNLSDAILLSDILRVNTEITKAPLSASMIKRYDEHHQDLTLLKALVRQQLPEKYKEIFFDQSKNGYAGYIDGGASQEEFYKFIKPILEKMDGTEELLVKLNREDLLRKQRTFDNGSIPHQIHLGELHAILRRQEDFYPFLKDNREKIEKILTFRIPYYVGPLARGNSRFAWMTRKSEETITPWNFEEVVDKGASAQSFIERMTNFDKNLPNEKVLPKHSLLYEYFTVYNELTKVKYVTEGMRKPAFLSGEQKKAIVDLLFKTNRKVTVKQLKEDYFKKIECFDSVEISGVEDRFNASLGTYHDLLKIIKDKDFLDNEENEDILEDIVLTLTLFEDREMIEERLKTYAHLFDDKVMKQLKRRRYTGWGRLSRKLINGIRDKQSGKTILDFLKSDGFANRNFMQLIHDDSLTFKEDIQKAQVSGQGDSLHEHIANLAGSPAIKKGILQTVKVVDELVKVMGRHKPENIVIEMARENQTTQKGQKNSRERMKRIEEGIKELGSQILKEHPVENTQLQNEKLYLYYLQNGRDMYVDQELDINRLSDYDVDHIVPQSFLKDDSIDNKVLTRSDKARGKSDNVPSEEVVKKMKNYWRQLLNAKLITQRKFDNLTKAERGGLSELDKAGFIKRQLVETRQITKHVAQILDSRMNTKYDENDKLIREVKVITLKSKLVSDFRKDFQFYKVREINNYHHAHDAYLNAVVGTALIKKYPKLESEFVYGDYKVYDVRKMIAKSEQEIGKATAKYFFYSNIMNFFKTEITLANGEIRKRPLIETNGETGEIVWDKGRDFATVRKVLSMPQVNIVKKTEVQTGGFSKESILPKRNSDKLIARKKDWDPKKYGGFDSPTVAYSVLVVAKVEKGKSKKLKSVKELLGITIMERSSFEKNPIDFLEAKGYKEVKKDLIIKLPKYSLFELENGRKRMLASAGELQKGNELALPSKYVNFLYLASHYEKLKGSPEDNEQKQLFVEQHKHYLDEIIEQISEFSKRVILADANLDKVLSAYNKHRDKPIREQAENIIHLFTLTNLGAPAAFKYFDTTIDRKRYTSTKEVLDATLIHQSITGLYETRIDLSQLGGDGGGGSGGGGGTLNIEDEYRLHETSKEPDVSLGSTWLSDFPQAWAETGGMGLAVRQAPLIIPLKATSTPVSIKQYPMSQEARLGIKPHIQRLLDQGILVPCQSPWNTPLLPVKKPGTNDYRPVQDLREVNKRVEDIHPTVPNPYNLLSGLPPSHQWYTVLDLKDAFFCLRLHPTSQPLFAFEWRDPEMGISGQLTWTRLPQGFKNSPTLFNEALHRDLADFRIQHPDLILLQYVDDLLLAATSELDCQQGTRALLQTLGNLGYRASAKKAQICQKQVKYLGYLLKEGQRWLTEARKETVMGQPTPKTPRQLREFLGKAGFCRLFIPGFAEMAAPLYPLTKPGTLFNWGPDQQKAYQEIKQALLTAPALGLPDLTKPFELFVDEKQGYAKGVLTQKLGPWRRPVAYLSKKLDPVAAGWPPCLRMVAAIAVLTKDAGKLTMGQPLVILAPHAVEALVKQPPDRWLSNARMTHYQALLLDTDRVQFGPVVALNPATLLPLPEEGLQHNCLDILAEAHGTRPDLTDQPLPDADHTWYTDGSSLLQEGQRKAGAAVTTETEVIWAKALPAGTSAQRAELIALTQALKMAEGKKLNVYTDSRYAFATAHIHGEIYRRRGWLTSEGKEIKNKDEILALLKALFLPKRLSIIHCPGHQKGHSAEARGNRMADQAARKAAITETPDTSTLLIENSSPSGGSKRTADGSEFEAGKRTADGSEFEKRTADGSEFESPKKKAKVE

SEQ ID NO: 2654 - protein, 2116 aa, synthetic construct
  source 1..2116: note = Description of Artificial Sequence: Synthetic polypeptide
MPAAKRVKLDGGDKKYSIGLDIGTNSVGWAVITDEYKVPSKKFKVLGNTDRHSIKKNLIGALLFDSGETAEATRLKRTARRRYTRRKNRICYLQEIFSNEMAKVDDSFFHRLEESFLVEEDKKHERHPIFGNIVDEVAYHEKYPTIYHLRKKLVDSTDKADLRLIYLALAHMIKFRGHFLIEGDLNPDNSDVDKLFIQLVQTYNQLFEENPINASGVDAKAILSARLSKSRRLENLIAQLPGEKKNGLFGNLIALSLGLTPNFKSNFDLAEDAKLQLSKDTYDDDLDNLLAQIGDQYADLFLAAKNLSDAILLSDILRVNTEITKAPLSASMIKRYDEHHQDLTLLKALVRQQLPEKYKEIFFDQSKNGYAGYIDGGASQEEFYKFIKPILEKMDGTEELLVKLNREDLLRKQRTFDNGSIPHQIHLGELHAILRRQEDFYPFLKDNREKIEKILTFRIPYYVGPLARGNSRFAWMTRKSEETITPWNFEEVVDKGASAQSFIERMTNFDKNLPNEKVLPKHSLLYEYFTVYNELTKVKYVTEGMRKPAFLSGEQKKAIVDLLFKTNRKVTVKQLKEDYFKKIECFDSVEISGVEDRFNASLGTYHDLLKIIKDKDFLDNEENEDILEDIVLTLTLFEDREMIEERLKTYAHLFDDKVMKQLKRRRYTGWGRLSRKLINGIRDKQSGKTILDFLKSDGFANRNFMQLIHDDSLTFKEDIQKAQVSGQGDSLHEHIANLAGSPAIKKGILQTVKVVDELVKVMGRHKPENIVIEMARENQTTQKGQKNSRERMKRIEEGIKELGSQILKEHPVENTQLQNEKLYLYYLQNGRDMYVDQELDINRLSDYDVDHIVPQSFLKDDSIDNKVLTRSDKARGKSDNVPSEEVVKKMKNYWRQLLNAKLITQRKFDNLTKAERGGLSELDKAGFIKRQLVETRQITKHVAQILDSRMNTKYDENDKLIREVKVITLKSKLVSDFRKDFQFYKVREINNYHHAHDAYLNAVVGTALIKKYPKLESEFVYGDYKVYDVRKMIAKSEQEIGKATAKYFFYSNIMNFFKTEITLANGEIRKRPLIETNGETGEIVWDKGRDFATVRKVLSMPQVNIVKKTEVQTGGFSKESILPKRNSDKLIARKKDWDPKKYGGFDSPTVAYSVLVVAKVEKGKSKKLKSVKELLGITIMERSSFEKNPIDFLEAKGYKEVKKDLIIKLPKYSLFELENGRKRMLASAGELQKGNELALPSKYVNFLYLASHYEKLKGSPEDNEQKQLFVEQHKHYLDEIIEQISEFSKRVILADANLDKVLSAYNKHRDKPIREQAENIIHLFTLTNLGAPAAFKYFDTTIDRKRYTSTKEVLDATLIHQSITGLYETRIDLSQLGGDGGEAAAKGGSPAPGGTLNIEDEYRLHETSKEPDVSLGSTWLSDFPQAWAETGGMGLAVRQAPLIIPLKATSTPVSIKQYPMSQEARLGIKPHIQRLLDQGILVPCQSPWNTPLLPVKKPGTNDYRPVQDLREVNKRVEDIHPTVPNPYNLLSGLPPSHQWYTVLDLKDAFFCLRLHPTSQPLFAFEWRDPEMGISGQLTWTRLPQGFKNSPTLFNEALHRDLADFRIQHPDLILLQYVDDLLLAATSELDCQQGTRALLQTLGNLGYRASAKKAQICQKQVKYLGYLLKEGQRWLTEARKETVMGQPTPKTPRQLREFLGKAGFCRLFIPGFAEMAAPLYPLTKPGTLFNWGPDQQKAYQEIKQALLTAPALGLPDLTKPFELFVDEKQGYAKGVLTQKLGPWRRPVAYLSKKLDPVAAGWPPCLRMVAAIAVLTKDAGKLTMGQPLVILAPHAVEALVKQPPDRWLSNARMTHYQALLLDTDRVQFGPVVALNPATLLPLPEEGLQHNCLDILAEAHGTRPDLTDQPLPDADHTWYTDGSSLLQEGQRKAGAAVTTETEVIWAKALPAGTSAQRAELIALTQALKMAEGKKLNVYTDSRYAFATAHIHGEIYRRRGWLTSEGKEIKNKDEILALLKALFLPKRLSIIHCPGHQKGHSAEARGNRMADQAARKAAITETPDTSTLLIENSSPSGGSKRTADGSEFEAGKRTADGSEFEKRTADGSEFESPKKKAKVE

SEQ ID NO: 2655 - protein, 2108 aa, synthetic construct
  source 1..2108: note = Description of Artificial Sequence: Synthetic polypeptide
MPAAKRVKLDGGDKKYSIGLDIGTNSVGWAVITDEYKVPSKKFKVLGNTDRHSIKKNLIGALLFDSGETAEATRLKRTARRRYTRRKNRICYLQEIFSNEMAKVDDSFFHRLEESFLVEEDKKHERHPIFGNIVDEVAYHEKYPTIYHLRKKLVDSTDKADLRLIYLALAHMIKFRGHFLIEGDLNPDNSDVDKLFIQLVQTYNQLFEENPINASGVDAKAILSARLSKSRRLENLIAQLPGEKKNGLFGNLIALSLGLTPNFKSNFDLAEDAKLQLSKDTYDDDLDNLLAQIGDQYADLFLAAKNLSDAILLSDILRVNTEITKAPLSASMIKRYDEHHQDLTLLKALVRQQLPEKYKEIFFDQSKNGYAGYIDGGASQEEFYKFIKPILEKMDGTEELLVKLNREDLLRKQRTFDNGSIPHQIHLGELHAILRRQEDFYPFLKDNREKIEKILTFRIPYYVGPLARGNSRFAWMTRKSEETITPWNFEEVVDKGASAQSFIERMTNFDKNLPNEKVLPKHSLLYEYFTVYNELTKVKYVTEGMRKPAFLSGEQKKAIVDLLFKTNRKVTVKQLKEDYFKKIECFDSVEISGVEDRFNASLGTYHDLLKIIKDKDFLDNEENEDILEDIVLTLTLFEDREMIEERLKTYAHLFDDKVMKQLKRRRYTGWGRLSRKLINGIRDKQSGKTILDFLKSDGFANRNFMQLIHDDSLTFKEDIQKAQVSGQGDSLHEHIANLAGSPAIKKGILQTVKVVDELVKVMGRHKPENIVIEMARENQTTQKGQKNSRERMKRIEEGIKELGSQILKEHPVENTQLQNEKLYLYYLQNGRDMYVDQELDINRLSDYDVDHIVPQSFLKDDSIDNKVLTRSDKARGKSDNVPSEEVVKKMKNYWRQLLNAKLITQRKFDNLTKAERGGLSELDKAGFIKRQLVETRQITKHVAQILDSRMNTKYDENDKLIREVKVITLKSKLVSDFRKDFQFYKVREINNYHHAHDAYLNAVVGTALIKKYPKLESEFVYGDYKVYDVRKMIAKSEQEIGKATAKYFFYSNIMNFFKTEITLANGEIRKRPLIETNGETGEIVWDKGRDFATVRKVLSMPQVNIVKKTEVQTGGFSKESILPKRNSDKLIARKKDWDPKKYGGFDSPTVAYSVLVVAKVEKGKSKKLKSVKELLGITIMERSSFEKNPIDFLEAKGYKEVKKDLIIKLPKYSLFELENGRKRMLASAGELQKGNELALPSKYVNFLYLASHYEKLKGSPEDNEQKQLFVEQHKHYLDEIIEQISEFSKRVILADANLDKVLSAYNKHRDKPIREQAENIIHLFTLTNLGAPAAFKYFDTTIDRKRYTSTKEVLDATLIHQSITGLYETRIDLSQLGGDGGGSSGGTLNIEDEYRLHETSKEPDVSLGSTWLSDFPQAWAETGGMGLAVRQAPLIIPLKATSTPVSIKQYPMSQEARLGIKPHIQRLLDQGILVPCQSPWNTPLLPVKKPGTNDYRPVQDLREVNKRVEDIHPTVPNPYNLLSGLPPSHQWYTVLDLKDAFFCLRLHPTSQPLFAFEWRDPEMGISGQLTWTRLPQGFKNSPTLFNEALHRDLADFRIQHPDLILLQYVDDLLLAATSELDCQQGTRALLQTLGNLGYRASAKKAQICQKQVKYLGYLLKEGQRWLTEARKETVMGQPTPKTPRQLREFLGKAGFCRLFIPGFAEMAAPLYPLTKPGTLFNWGPDQQKAYQEIKQALLTAPALGLPDLTKPFELFVDEKQGYAKGVLTQKLGPWRRPVAYLSKKLDPVAAGWPPCLRMVAAIAVLTKDAGKLTMGQPLVILAPHAVEALVKQPPDRWLSNARMTHYQALLLDTDRVQFGPVVALNPATLLPLPEEGLQHNCLDILAEAHGTRPDLTDQPLPDADHTWYTDGSSLLQEGQRKAGAAVTTETEVIWAKALPAGTSAQRAELIALTQALKMAEGKKLNVYTDSRYAFATAHIHGEIYRRRGWLTSEGKEIKNKDEILALLKALFLPKRLSIIHCPGHQKGHSAEARGNRMADQAARKAAITETPDTSTLLIENSSPSGGSKRTADGSEFEAGKRTADGSEFEKRTADGSEFESPKKKAKVE

SEQ ID NO: 2656 - protein, 2114 aa, synthetic construct
  source 1..2114: note = Description of Artificial Sequence: Synthetic polypeptide
MPAAKRVKLDGGDKKYSIGLDIGTNSVGWAVITDEYKVPSKKFKVLGNTDRHSIKKNLIGALLFDSGETAEATRLKRTARRRYTRRKNRICYLQEIFSNEMAKVDDSFFHRLEESFLVEEDKKHERHPIFGNIVDEVAYHEKYPTIYHLRKKLVDSTDKADLRLIYLALAHMIKFRGHFLIEGDLNPDNSDVDKLFIQLVQTYNQLFEENPINASGVDAKAILSARLSKSRRLENLIAQLPGEKKNGLFGNLIALSLGLTPNFKSNFDLAEDAKLQLSKDTYDDDLDNLLAQIGDQYADLFLAAKNLSDAILLSDILRVNTEITKAPLSASMIKRYDEHHQDLTLLKALVRQQLPEKYKEIFFDQSKNGYAGYIDGGASQEEFYKFIKPILEKMDGTEELLVKLNREDLLRKQRTFDNGSIPHQIHLGELHAILRRQEDFYPFLKDNREKIEKILTFRIPYYVGPLARGNSRFAWMTRKSEETITPWNFEEVVDKGASAQSFIERMTNFDKNLPNEKVLPKHSLLYEYFTVYNELTKVKYVTEGMRKPAFLSGEQKKAIVDLLFKTNRKVTVKQLKEDYFKKIECFDSVEISGVEDRFNASLGTYHDLLKIIKDKDFLDNEENEDILEDIVLTLTLFEDREMIEERLKTYAHLFDDKVMKQLKRRRYTGWGRLSRKLINGIRDKQSGKTILDFLKSDGFANRNFMQLIHDDSLTFKEDIQKAQVSGQGDSLHEHIANLAGSPAIKKGILQTVKVVDELVKVMGRHKPENIVIEMARENQTTQKGQKNSRERMKRIEEGIKELGSQILKEHPVENTQLQNEKLYLYYLQNGRDMYVDQELDINRLSDYDVDHIVPQSFLKDDSIDNKVLTRSDKARGKSDNVPSEEVVKKMKNYWRQLLNAKLITQRKFDNLTKAERGGLSELDKAGFIKRQLVETRQITKHVAQILDSRMNTKYDENDKLIREVKVITLKSKLVSDFRKDFQFYKVREINNYHHAHDAYLNAVVGTALIKKYPKLESEFVYGDYKVYDVRKMIAKSEQEIGKATAKYFFYSNIMNFFKTEITLANGEIRKRPLIETNGETGEIVWDKGRDFATVRKVLSMPQVNIVKKTEVQTGGFSKESILPKRNSDKLIARKKDWDPKKYGGFDSPTVAYSVLVVAKVEKGKSKKLKSVKELLGITIMERSSFEKNPIDFLEAKGYKEVKKDLIIKLPKYSLFELENGRKRMLASAGELQKGNELALPSKYVNFLYLASHYEKLKGSPEDNEQKQLFVEQHKHYLDEIIEQISEFSKRVILADANLDKVLSAYNKHRDKPIREQAENIIHLFTLTNLGAPAAFKYFDTTIDRKRYTSTKEVLDATLIHQSITGLYETRIDLSQLGGDGGPAPAPAPAPGGTLNIEDEYRLHETSKEPDVSLGSTWLSDFPQAWAETGGMGLAVRQAPLIIPLKATSTPVSIKQYPMSQEARLGIKPHIQRLLDQGILVPCQSPWNTPLLPVKKPGTNDYRPVQDLREVNKRVEDIHPTVPNPYNLLSGLPPSHQWYTVLDLKDAFFCLRLHPTSQPLFAFEWRDPEMGISGQLTWTRLPQGFKNSPTLFNEALHRDLADFRIQHPDLILLQYVDDLLLAATSELDCQQGTRALLQTLGNLGYRASAKKAQICQKQVKYLGYLLKEGQRWLTEARKETVMGQPTPKTPRQLREFLGKAGFCRLFIPGFAEMAAPLYPLTKPGTLFNWGPDQQKAYQEIKQALLTAPALGLPDLTKPFELFVDEKQGYAKGVLTQKLGPWRRPVAYLSKKLDPVAAGWPPCLRMVAAIAVLTKDAGKLTMGQPLVILAPHAVEALVKQPPDRWLSNARMTHYQALLLDTDRVQFGPVVALNPATLLPLPEEGLQHNCLDILAEAHGTRPDLTDQPLPDADHTWYTDGSSLLQEGQRKAGAAVTTETEVIWAKALPAGTSAQRAELIALTQALKMAEGKKLNVYTDSRYAFATAHIHGEIYRRRGWLTSEGKEIKNKDEILALLKALFLPKRLSIIHCPGHQKGHSAEARGNRMADQAARKAAITETPDTSTLLIENSSPSGGSKRTADGSEFEAGKRTADGSEFEKRTADGSEFESPKKKAKVE

SEQ ID NO: 2657 - protein, 2113 aa, synthetic construct
  source 1..2113: note = Description of Artificial Sequence: Synthetic polypeptide
MPAAKRVKLDGGDKKYSIGLDIGTNSVGWAVITDEYKVPSKKFKVLGNTDRHSIKKNLIGALLFDSGETAEATRLKRTARRRYTRRKNRICYLQEIFSNEMAKVDDSFFHRLEESFLVEEDKKHERHPIFGNIVDEVAYHEKYPTIYHLRKKLVDSTDKADLRLIYLALAHMIKFRGHFLIEGDLNPDNSDVDKLFIQLVQTYNQLFEENPINASGVDAKAILSARLSKSRRLENLIAQLPGEKKNGLFGNLIALSLGLTPNFKSNFDLAEDAKLQLSKDTYDDDLDNLLAQIGDQYADLFLAAKNLSDAILLSDILRVNTEITKAPLSASMIKRYDEHHQDLTLLKALVRQQLPEKYKEIFFDQSKNGYAGYIDGGASQEEFYKFIKPILEKMDGTEELLVKLNREDLLRKQRTFDNGSIPHQIHLGELHAILRRQEDFYPFLKDNREKIEKILTFRIPYYVGPLARGNSRFAWMTRKSEETITPWNFEEVVDKGASAQSFIERMTNFDKNLPNEKVLPKHSLLYEYFTVYNELTKVKYVTEGMRKPAFLSGEQKKAIVDLLFKTNRKVTVKQLKEDYFKKIECFDSVEISGVEDRFNASLGTYHDLLKIIKDKDFLDNEENEDILEDIVLTLTLFEDREMIEERLKTYAHLFDDKVMKQLKRRRYTGWGRLSRKLINGIRDKQSGKTILDFLKSDGFANRNFMQLIHDDSLTFKEDIQKAQVSGQGDSLHEHIANLAGSPAIKKGILQTVKVVDELVKVMGRHKPENIVIEMARENQTTQKGQKNSRERMKRIEEGIKELGSQILKEHPVENTQLQNEKLYLYYLQNGRDMYVDQELDINRLSDYDVDHIVPQSFLKDDSIDNKVLTRSDKARGKSDNVPSEEVVKKMKNYWRQLLNAKLITQRKFDNLTKAERGGLSELDKAGFIKRQLVETRQITKHVAQILDSRMNTKYDENDKLIREVKVITLKSKLVSDFRKDFQFYKVREINNYHHAHDAYLNAVVGTALIKKYPKLESEFVYGDYKVYDVRKMIAKSEQEIGKATAKYFFYSNIMNFFKTEITLANGEIRKRPLIETNGETGEIVWDKGRDFATVRKVLSMPQVNIVKKTEVQTGGFSKESILPKRNSDKLIARKKDWDPKKYGGFDSPTVAYSVLVVAKVEKGKSKKLKSVKELLGITIMERSSFEKNPIDFLEAKGYKEVKKDLIIKLPKYSLFELENGRKRMLASAGELQKGNELALPSKYVNFLYLASHYEKLKGSPEDNEQKQLFVEQHKHYLDEIIEQISEFSKRVILADANLDKVLSAYNKHRDKPIREQAENIIHLFTLTNLGAPAAFKYFDTTIDRKRYTSTKEVLDATLIHQSITGLYETRIDLSQLGGDGGEAAAKGGSGGTLNIEDEYRLHETSKEPDVSLGSTWLSDFPQAWAETGGMGLAVRQAPLIIPLKATSTPVSIKQYPMSQEARLGIKPHIQRLLDQGILVPCQSPWNTPLLPVKKPGTNDYRPVQDLREVNKRVEDIHPTVPNPYNLLSGLPPSHQWYTVLDLKDAFFCLRLHPTSQPLFAFEWRDPEMGISGQLTWTRLPQGFKNSPTLFNEALHRDLADFRIQHPDLILLQYVDDLLLAATSELDCQQGTRALLQTLGNLGYRASAKKAQICQKQVKYLGYLLKEGQRWLTEARKETVMGQPTPKTPRQLREFLGKAGFCRLFIPGFAEMAAPLYPLTKPGTLFNWGPDQQKAYQEIKQALLTAPALGLPDLTKPFELFVDEKQGYAKGVLTQKLGPWRRPVAYLSKKLDPVAAGWPPCLRMVAAIAVLTKDAGKLTMGQPLVILAPHAVEALVKQPPDRWLSNARMTHYQALLLDTDRVQFGPVVALNPATLLPLPEEGLQHNCLDILAEAHGTRPDLTDQPLPDADHTWYTDGSSLLQEGQRKAGAAVTTETEVIWAKALPAGTSAQRAELIALTQALKMAEGKKLNVYTDSRYAFATAHIHGEIYRRRGWLTSEGKEIKNKDEILALLKALFLPKRLSIIHCPGHQKGHSAEARGNRMADQAARKAAITETPDTSTLLIENSSPSGGSKRTADGSEFEAGKRTADGSEFEKRTADGSEFESPKKKAKVE

SEQ ID NO: 2658 - protein, 2116 aa, synthetic construct
  source 1..2116: note = Description of Artificial Sequence: Synthetic polypeptide
MPAAKRVKLDGGDKKYSIGLDIGTNSVGWAVITDEYKVPSKKFKVLGNTDRHSIKKNLIGALLFDSGETAEATRLKRTARRRYTRRKNRICYLQEIFSNEMAKVDDSFFHRLEESFLVEEDKKHERHPIFGNIVDEVAYHEKYPTIYHLRKKLVDSTDKADLRLIYLALAHMIKFRGHFLIEGDLNPDNSDVDKLFIQLVQTYNQLFEENPINASGVDAKAILSARLSKSRRLENLIAQLPGEKKNGLFGNLIALSLGLTPNFKSNFDLAEDAKLQLSKDTYDDDLDNLLAQIGDQYADLFLAAKNLSDAILLSDILRVNTEITKAPLSASMIKRYDEHHQDLTLLKALVRQQLPEKYKEIFFDQSKNGYAGYIDGGASQEEFYKFIKPILEKMDGTEELLVKLNREDLLRKQRTFDNGSIPHQIHLGELHAILRRQEDFYPFLKDNREKIEKILTFRIPYYVGPLARGNSRFAWMTRKSEETITPWNFEEVVDKGASAQSFIERMTNFDKNLPNEKVLPKHSLLYEYFTVYNELTKVKYVTEGMRKPAFLSGEQKKAIVDLLFKTNRKVTVKQLKEDYFKKIECFDSVEISGVEDRFNASLGTYHDLLKIIKDKDFLDNEENEDILEDIVLTLTLFEDREMIEERLKTYAHLFDDKVMKQLKRRRYTGWGRLSRKLINGIRDKQSGKTILDFLKSDGFANRNFMQLIHDDSLTFKEDIQKAQVSGQGDSLHEHIANLAGSPAIKKGILQTVKVVDELVKVMGRHKPENIVIEMARENQTTQKGQKNSRERMKRIEEGIKELGSQILKEHPVENTQLQNEKLYLYYLQNGRDMYVDQELDINRLSDYDVDHIVPQSFLKDDSIDNKVLTRSDKARGKSDNVPSEEVVKKMKNYWRQLLNAKLITQRKFDNLTKAERGGLSELDKAGFIKRQLVETRQITKHVAQILDSRMNTKYDENDKLIREVKVITLKSKLVSDFRKDFQFYKVREINNYHHAHDAYLNAVVGTALIKKYPKLESEFVYGDYKVYDVRKMIAKSEQEIGKATAKYFFYSNIMNFFKTEITLANGEIRKRPLIETNGETGEIVWDKGRDFATVRKVLSMPQVNIVKKTEVQTGGFSKESILPKRNSDKLIARKKDWDPKKYGGFDSPTVAYSVLVVAKVEKGKSKKLKSVKELLGITIMERSSFEKNPIDFLEAKGYKEVKKDLIIKLPKYSLFELENGRKRMLASAGELQKGNELALPSKYVNFLYLASHYEKLKGSPEDNEQKQLFVEQHKHYLDEIIEQISEFSKRVILADANLDKVLSAYNKHRDKPIREQAENIIHLFTLTNLGAPAAFKYFDTTIDRKRYTSTKEVLDATLIHQSITGLYETRIDLSQLGGDGGEAAAKGSSPAPGGTLNIEDEYRLHETSKEPDVSLGSTWLSDFPQAWAETGGMGLAVRQAPLIIPLKATSTPVSIKQYPMSQEARLGIKPHIQRLLDQGILVPCQSPWNTPLLPVKKPGTNDYRPVQDLREVNKRVEDIHPTVPNPYNLLSGLPPSHQWYTVLDLKDAFFCLRLHPTSQPLFAFEWRDPEMGISGQLTWTRLPQGFKNSPTLFNEALHRDLADFRIQHPDLILLQYVDDLLLAATSELDCQQGTRALLQTLGNLGYRASAKKAQICQKQVKYLGYLLKEGQRWLTEARKETVMGQPTPKTPRQLREFLGKAGFCRLFIPGFAEMAAPLYPLTKPGTLFNWGPDQQKAYQEIKQALLTAPALGLPDLTKPFELFVDEKQGYAKGVLTQKLGPWRRPVAYLSKKLDPVAAGWPPCLRMVAAIAVLTKDAGKLTMGQPLVILAPHAVEALVKQPPDRWLSNARMTHYQALLLDTDRVQFGPVVALNPATLLPLPEEGLQHNCLDILAEAHGTRPDLTDQPLPDADHTWYTDGSSLLQEGQRKAGAAVTTETEVIWAKALPAGTSAQRAELIALTQALKMAEGKKLNVYTDSRYAFATAHIHGEIYRRRGWLTSEGKEIKNKDEILALLKALFLPKRLSIIHCPGHQKGHSAEARGNRMADQAARKAAITETPDTSTLLIENSSPSGGSKRTADGSEFEAGKRTADGSEFEKRTADGSEFESPKKKAKVE

SEQ ID NO: 2659 - protein, 2113 aa, synthetic construct
  source 1..2113: note = Description of Artificial Sequence: Synthetic polypeptide
MPAAKRVKLDGGDKKYSIGLDIGTNSVGWAVITDEYKVPSKKFKVLGNTDRHSIKKNLIGALLFDSGETAEATRLKRTARRRYTRRKNRICYLQEIFSNEMAKVDDSFFHRLEESFLVEEDKKHERHPIFGNIVDEVAYHEKYPTIYHLRKKLVDSTDKADLRLIYLALAHMIKFRGHFLIEGDLNPDNSDVDKLFIQLVQTYNQLFEENPINASGVDAKAILSARLSKSRRLENLIAQLPGEKKNGLFGNLIALSLGLTPNFKSNFDLAEDAKLQLSKDTYDDDLDNLLAQIGDQYADLFLAAKNLSDAILLSDILRVNTEITKAPLSASMIKRYDEHHQDLTLLKALVRQQLPEKYKEIFFDQSKNGYAGYIDGGASQEEFYKFIKPILEKMDGTEELLVKLNREDLLRKQRTFDNGSIPHQIHLGELHAILRRQEDFYPFLKDNREKIEKILTFRIPYYVGPLARGNSRFAWMTRKSEETITPWNFEEVVDKGASAQSFIERMTNFDKNLPNEKVLPKHSLLYEYFTVYNELTKVKYVTEGMRKPAFLSGEQKKAIVDLLFKTNRKVTVKQLKEDYFKKIECFDSVEISGVEDRFNASLGTYHDLLKIIKDKDFLDNEENEDILEDIVLTLTLFEDREMIEERLKTYAHLFDDKVMKQLKRRRYTGWGRLSRKLINGIRDKQSGKTILDFLKSDGFANRNFMQLIHDDSLTFKEDIQKAQVSGQGDSLHEHIANLAGSPAIKKGILQTVKVVDELVKVMGRHKPENIVIEMARENQTTQKGQKNSRERMKRIEEGIKELGSQILKEHPVENTQLQNEKLYLYYLQNGRDMYVDQELDINRLSDYDVDHIVPQSFLKDDSIDNKVLTRSDKARGKSDNVPSEEVVKKMKNYWRQLLNAKLITQRKFDNLTKAERGGLSELDKAGFIKRQLVETRQITKHVAQILDSRMNTKYDENDKLIREVKVITLKSKLVSDFRKDFQFYKVREINNYHHAHDAYLNAVVGTALIKKYPKLESEFVYGDYKVYDVRKMIAKSEQEIGKATAKYFFYSNIMNFFKTEITLANGEIRKRPLIETNGETGEIVWDKGRDFATVRKVLSMPQVNIVKKTEVQTGGFSKESILPKRNSDKLIARKKDWDPKKYGGFDSPTVAYSVLVVAKVEKGKSKKLKSVKELLGITIMERSSFEKNPIDFLEAKGYKEVKKDLIIKLPKYSLFELENGRKRMLASAGELQKGNELALPSKYVNFLYLASHYEKLKGSPEDNEQKQLFVEQHKHYLDEIIEQISEFSKRVILADANLDKVLSAYNKHRDKPIREQAENIIHLFTLTNLGAPAAFKYFDTTIDRKRYTSTKEVLDATLIHQSITGLYETRIDLSQLGGDGGEAAAKGGGGGTLNIEDEYRLHETSKEPDVSLGSTWLSDFPQAWAETGGMGLAVRQAPLIIPLKATSTPVSIKQYPMSQEARLGIKPHIQRLLDQGILVPCQSPWNTPLLPVKKPGTNDYRPVQDLREVNKRVEDIHPTVPNPYNLLSGLPPSHQWYTVLDLKDAFFCLRLHPTSQPLFAFEWRDPEMGISGQLTWTRLPQGFKNSPTLFNEALHRDLADFRIQHPDLILLQYVDDLLLAATSELDCQQGTRALLQTLGNLGYRASAKKAQICQKQVKYLGYLLKEGQRWLTEARKETVMGQPTPKTPRQLREFLGKAGFCRLFIPGFAEMAAPLYPLTKPGTLFNWGPDQQKAYQEIKQALLTAPALGLPDLTKPFELFVDEKQGYAKGVLTQKLGPWRRPVAYLSKKLDPVAAGWPPCLRMVAAIAVLTKDAGKLTMGQPLVILAPHAVEALVKQPPDRWLSNARMTHYQALLLDTDRVQFGPVVALNPATLLPLPEEGLQHNCLDILAEAHGTRPDLTDQPLPDADHTWYTDGSSLLQEGQRKAGAAVTTETEVIWAKALPAGTSAQRAELIALTQALKMAEGKKLNVYTDSRYAFATAHIHGEIYRRRGWLTSEGKEIKNKDEILALLKALFLPKRLSIIHCPGHQKGHSAEARGNRMADQAARKAAITETPDTSTLLIENSSPSGGSKRTADGSEFEAGKRTADGSEFEKRTADGSEFESPKKKAKVE

SEQ ID NO: 2660 - protein, 2116 aa, synthetic construct
  source 1..2116: note = Description of Artificial Sequence: Synthetic polypeptide
MPAAKRVKLDGGDKKYSIGLDIGTNSVGWAVITDEYKVPSKKFKVLGNTDRHSIKKNLIGALLFDSGETAEATRLKRTARRRYTRRKNRICYLQEIFSNEMAKVDDSFFHRLEESFLVEEDKKHERHPIFGNIVDEVAYHEKYPTIYHLRKKLVDSTDKADLRLIYLALAHMIKFRGHFLIEGDLNPDNSDVDKLFIQLVQTYNQLFEENPINASGVDAKAILSARLSKSRRLENLIAQLPGEKKNGLFGNLIALSLGLTPNFKSNFDLAEDAKLQLSKDTYDDDLDNLLAQIGDQYADLFLAAKNLSDAILLSDILRVNTEITKAPLSASMIKRYDEHHQDLTLLKALVRQQLPEKYKEIFFDQSKNGYAGYIDGGASQEEFYKFIKPILEKMDGTEELLVKLNREDLLRKQRTFDNGSIPHQIHLGELHAILRRQEDFYPFLKDNREKIEKILTFRIPYYVGPLARGNSRFAWMTRKSEETITPWNFEEVVDKGASAQSFIERMTNFDKNLPNEKVLPKHSLLYEYFTVYNELTKVKYVTEGMRKPAFLSGEQKKAIVDLLFKTNRKVTVKQLKEDYFKKIECFDSVEISGVEDRFNASLGTYHDLLKIIKDKDFLDNEENEDILEDIVLTLTLFEDREMIEERLKTYAHLFDDKVMKQLKRRRYTGWGRLSRKLINGIRDKQSGKTILDFLKSDGFANRNFMQLIHDDSLTFKEDIQKAQVSGQGDSLHEHIANLAGSPAIKKGILQTVKVVDELVKVMGRHKPENIVIEMARENQTTQKGQKNSRERMKRIEEGIKELGSQILKEHPVENTQLQNEKLYLYYLQNGRDMYVDQELDINRLSDYDVDHIVPQSFLKDDSIDNKVLTRSDKARGKSDNVPSEEVVKKMKNYWRQLLNAKLITQRKFDNLTKAERGGLSELDKAGFIKRQLVETRQITKHVAQILDSRMNTKYDENDKLIREVKVITLKSKLVSDFRKDFQFYKVREINNYHHAHDAYLNAVVGTALIKKYPKLESEFVYGDYKVYDVRKMIAKSEQEIGKATAKYFFYSNIMNFFKTEITLANGEIRKRPLIETNGETGEIVWDKGRDFATVRKVLSMPQVNIVKKTEVQTGGFSKESILPKRNSDKLIARKKDWDPKKYGGFDSPTVAYSVLVVAKVEKGKSKKLKSVKELLGITIMERSSFEKNPIDFLEAKGYKEVKKDLIIKLPKYSLFELENGRKRMLASAGELQKGNELALPSKYVNFLYLASHYEKLKGSPEDNEQKQLFVEQHKHYLDEIIEQISEFSKRVILADANLDKVLSAYNKHRDKPIREQAENIIHLFTLTNLGAPAAFKYFDTTIDRKRYTSTKEVLDATLIHQSITGLYETRIDLSQLGGDGGGGSGSSEAAAKGGTLNIEDEYRLHETSKEPDVSLGSTWLSDFPQAWAETGGMGLAVRQAPLIIPLKATSTPVSIKQYPMSQEARLGIKPHIQRLLDQGILVPCQSPWNTPLLPVKKPGTNDYRPVQDLREVNKRVEDIHPTVPNPYNLLSGLPPSHQWYTVLDLKDAFFCLRLHPTSQPLFAFEWRDPEMGISGQLTWTRLPQGFKNSPTLFNEALHRDLADFRIQHPDLILLQYVDDLLLAATSELDCQQGTRALLQTLGNLGYRASAKKAQICQKQVKYLGYLLKEGQRWLTEARKETVMGQPTPKTPRQLREFLGKAGFCRLFIPGFAEMAAPLYPLTKPGTLFNWGPDQQKAYQEIKQALLTAPALGLPDLTKPFELFVDEKQGYAKGVLTQKLGPWRRPVAYLSKKLDPVAAGWPPCLRMVAAIAVLTKDAGKLTMGQPLVILAPHAVEALVKQPPDRWLSNARMTHYQALLLDTDRVQFGPVVALNPATLLPLPEEGLQHNCLDILAEAHGTRPDLTDQPLPDADHTWYTDGSSLLQEGQRKAGAAVTTETEVIWAKALPAGTSAQRAELIALTQALKMAEGKKLNVYTDSRYAFATAHIHGEIYRRRGWLTSEGKEIKNKDEILALLKALFLPKRLSIIHCPGHQKGHSAEARGNRMADQAARKAAITETPDTSTLLIENSSPSGGSKRTADGSEFEAGKRTADGSEFEKRTADGSEFESPKKKAKVE

SEQ ID NO: 2661 - protein, 2116 aa, synthetic construct
  source 1..2116: note = Description of Artificial Sequence: Synthetic polypeptide
MPAAKRVKLDGGDKKYSIGLDIGTNSVGWAVITDEYKVPSKKFKVLGNTDRHSIKKNLIGALLFDSGETAEATRLKRTARRRYTRRKNRICYLQEIFSNEMAKVDDSFFHRLEESFLVEEDKKHERHPIFGNIVDEVAYHEKYPTIYHLRKKLVDSTDKADLRLIYLALAHMIKFRGHFLIEGDLNPDNSDVDKLFIQLVQTYNQLFEENPINASGVDAKAILSARLSKSRRLENLIAQLPGEKKNGLFGNLIALSLGLTPNFKSNFDLAEDAKLQLSKDTYDDDLDNLLAQIGDQYADLFLAAKNLSDAILLSDILRVNTEITKAPLSASMIKRYDEHHQDLTLLKALVRQQLPEKYKEIFFDQSKNGYAGYIDGGASQEEFYKFIKPILEKMDGTEELLVKLNREDLLRKQRTFDNGSIPHQIHLGELHAILRRQEDFYPFLKDNREKIEKILTFRIPYYVGPLARGNSRFAWMTRKSEETITPWNFEEVVDKGASAQSFIERMTNFDKNLPNEKVLPKHSLLYEYFTVYNELTKVKYVTEGMRKPAFLSGEQKKAIVDLLFKTNRKVTVKQLKEDYFKKIECFDSVEISGVEDRFNASLGTYHDLLKIIKDKDFLDNEENEDILEDIVLTLTLFEDREMIEERLKTYAHLFDDKVMKQLKRRRYTGWGRLSRKLINGIRDKQSGKTILDFLKSDGFANRNFMQLIHDDSLTFKEDIQKAQVSGQGDSLHEHIANLAGSPAIKKGILQTVKVVDELVKVMGRHKPENIVIEMARENQTTQKGQKNSRERMKRIEEGIKELGSQILKEHPVENTQLQNEKLYLYYLQNGRDMYVDQELDINRLSDYDVDHIVPQSFLKDDSIDNKVLTRSDKARGKSDNVPSEEVVKKMKNYWRQLLNAKLITQRKFDNLTKAERGGLSELDKAGFIKRQLVETRQITKHVAQILDSRMNTKYDENDKLIREVKVITLKSKLVSDFRKDFQFYKVREINNYHHAHDAYLNAVVGTALIKKYPKLESEFVYGDYKVYDVRKMIAKSEQEIGKATAKYFFYSNIMNFFKTEITLANGEIRKRPLIETNGETGEIVWDKGRDFATVRKVLSMPQVNIVKKTEVQTGGFSKESILPKRNSDKLIARKKDWDPKKYGGFDSPTVAYSVLVVAKVEKGKSKKLKSVKELLGITIMERSSFEKNPIDFLEAKGYKEVKKDLIIKLPKYSLFELENGRKRMLASAGELQKGNELALPSKYVNFLYLASHYEKLKGSPEDNEQKQLFVEQHKHYLDEIIEQISEFSKRVILADANLDKVLSAYNKHRDKPIREQAENIIHLFTLTNLGAPAAFKYFDTTIDRKRYTSTKEVLDATLIHQSITGLYETRIDLSQLGGDGGGSSGGSEAAAKGGTLNIEDEYRLHETSKEPDVSLGSTWLSDFPQAWAETGGMGLAVRQAPLIIPLKATSTPVSIKQYPMSQEARLGIKPHIQRLLDQGILVPCQSPWNTPLLPVKKPGTNDYRPVQDLREVNKRVEDIHPTVPNPYNLLSGLPPSHQWYTVLDLKDAFFCLRLHPTSQPLFAFEWRDPEMGISGQLTWTRLPQGFKNSPTLFNEALHRDLADFRIQHPDLILLQYVDDLLLAATSELDCQQGTRALLQTLGNLGYRASAKKAQICQKQVKYLGYLLKEGQRWLTEARKETVMGQPTPKTPRQLREFLGKAGFCRLFIPGFAEMAAPLYPLTKPGTLFNWGPDQQKAYQEIKQALLTAPALGLPDLTKPFELFVDEKQGYAKGVLTQKLGPWRRPVAYLSKKLDPVAAGWPPCLRMVAAIAVLTKDAGKLTMGQPLVILAPHAVEALVKQPPDRWLSNARMTHYQALLLDTDRVQFGPVVALNPATLLPLPEEGLQHNCLDILAEAHGTRPDLTDQPLPDADHTWYTDGSSLLQEGQRKAGAAVTTETEVIWAKALPAGTSAQRAELIALTQALKMAEGKKLNVYTDSRYAFATAHIHGEIYRRRGWLTSEGKEIKNKDEILALLKALFLPKRLSIIHCPGHQKGHSAEARGNRMADQAARKAAITETPDTSTLLIENSSPSGGSKRTADGSEFEAGKRTADGSEFEKRTADGSEFESPKKKAKVE

SEQ ID NO: 2662 - protein, 2120 aa, synthetic construct
  source 1..2120: note = Description of Artificial Sequence: Synthetic polypeptide
MPAAKRVKLDGGDKKYSIGLDIGTNSVGWAVITDEYKVPSKKFKVLGNTDRHSIKKNLIGALLFDSGETAEATRLKRTARRRYTRRKNRICYLQEIFSNEMAKVDDSFFHRLEESFLVEEDKKHERHPIFGNIVDEVAYHEKYPTIYHLRKKLVDSTDKADLRLIYLALAHMIKFRGHFLIEGDLNPDNSDVDKLFIQLVQTYNQLFEENPINASGVDAKAILSARLSKSRRLENLIAQLPGEKKNGLFGNLIALSLGLTPNFKSNFDLAEDAKLQLSKDTYDDDLDNLLAQIGDQYADLFLAAKNLSDAILLSDILRVNTEITKAPLSASMIKRYDEHHQDLTLLKALVRQQLPEKYKEIFFDQSKNGYAGYIDGGASQEEFYKFIKPILEKMDGTEELLVKLNREDLLRKQRTFDNGSIPHQIHLGELHAILRRQEDFYPFLKDNREKIEKILTFRIPYYVGPLARGNSRFAWMTRKSEETITPWNFEEVVDKGASAQSFIERMTNFDKNLPNEKVLPKHSLLYEYFTVYNELTKVKYVTEGMRKPAFLSGEQKKAIVDLLFKTNRKVTVKQLKEDYFKKIECFDSVEISGVEDRFNASLGTYHDLLKIIKDKDFLDNEENEDILEDIVLTLTLFEDREMIEERLKTYAHLFDDKVMKQLKRRRYTGWGRLSRKLINGIRDKQSGKTILDFLKSDGFANRNFMQLIHDDSLTFKEDIQKAQVSGQGDSLHEHIANLAGSPAIKKGILQTVKVVDELVKVMGRHKPENIVIEMARENQTTQKGQKNSRERMKRIEEGIKELGSQILKEHPVENTQLQNEKLYLYYLQNGRDMYVDQELDINRLSDYDVDHIVPQSFLKDDSIDNKVLTRSDKARGKSDNVPSEEVVKKMKNYWRQLLNAKLITQRKFDNLTKAERGGLSELDKAGFIKRQLVETRQITKHVAQILDSRMNTKYDENDKLIREVKVITLKSKLVSDFRKDFQFYKVREINNYHHAHDAYLNAVVGTALIKKYPKLESEFVYGDYKVYDVRKMIAKSEQEIGKATAKYFFYSNIMNFFKTEITLANGEIRKRPLIETNGETGEIVWDKGRDFATVRKVLSMPQVNIVKKTEVQTGGFSKESILPKRNSDKLIARKKDWDPKKYGGFDSPTVAYSVLVVAKVEKGKSKKLKSVKELLGITIMERSSFEKNPIDFLEAKGYKEVKKDLIIKLPKYSLFELENGRKRMLASAGELQKGNELALPSKYVNFLYLASHYEKLKGSPEDNEQKQLFVEQHKHYLDEIIEQISEFSKRVILADANLDKVLSAYNKHRDKPIREQAENIIHLFTLTNLGAPAAFKYFDTTIDRKRYTSTKEVLDATLIHQSITGLYETRIDLSQLGGDGGGGGGSGGGGSGGGGSGGTLNIEDEYRLHETSKEPDVSLGSTWLSDFPQAWAETGGMGLAVRQAPLIIPLKATSTPVSIKQYPMSQEARLGIKPHIQRLLDQGILVPCQSPWNTPLLPVKKPGTNDYRPVQDLREVNKRVEDIHPTVPNPYNLLSGLPPSHQWYTVLDLKDAFFCLRLHPTSQPLFAFEWRDPEMGISGQLTWTRLPQGFKNSPTLFNEALHRDLADFRIQHPDLILLQYVDDLLLAATSELDCQQGTRALLQTLGNLGYRASAKKAQICQKQVKYLGYLLKEGQRWLTEARKETVMGQPTPKTPRQLREFLGKAGFCRLFIPGFAEMAAPLYPLTKPGTLFNWGPDQQKAYQEIKQALLTAPALGLPDLTKPFELFVDEKQGYAKGVLTQKLGPWRRPVAYLSKKLDPVAAGWPPCLRMVAAIAVLTKDAGKLTMGQPLVILAPHAVEALVKQPPDRWLSNARMTHYQALLLDTDRVQFGPVVALNPATLLPLPEEGLQHNCLDILAEAHGTRPDLTDQPLPDADHTWYTDGSSLLQEGQRKAGAAVTTETEVIWAKALPAGTSAQRAELIALTQALKMAEGKKLNVYTDSRYAFATAHIHGEIYRRRGWLTSEGKEIKNKDEILALLKALFLPKRLSIIHCPGHQKGHSAEARGNRMADQAARKAAITETPDTSTLLIENSSPSGGSKRTADGSEFEAGKRTADGSEFEKRTADGSEFESPKKKAKVE

SEQ ID NO: 2663 - protein, 2121 aa, synthetic construct
  source 1..2121: note = Description of Artificial Sequence: Synthetic polypeptide
MPAAKRVKLDGGDKKYSIGLDIGTNSVGWAVITDEYKVPSKKFKVLGNTDRHSIKKNLIGALLFDSGETAEATRLKRTARRRYTRRKNRICYLQEIFSNEMAKVDDSFFHRLEESFLVEEDKKHERHPIFGNIVDEVAYHEKYPTIYHLRKKLVDSTDKADLRLIYLALAHMIKFRGHFLIEGDLNPDNSDVDKLFIQLVQTYNQLFEENPINASGVDAKAILSARLSKSRRLENLIAQLPGEKKNGLFGNLIALSLGLTPNFKSNFDLAEDAKLQLSKDTYDDDLDNLLAQIGDQYADLFLAAKNLSDAILLSDILRVNTEITKAPLSASMIKRYDEHHQDLTLLKALVRQQLPEKYKEIFFDQSKNGYAGYIDGGASQEEFYKFIKPILEKMDGTEELLVKLNREDLLRKQRTFDNGSIPHQIHLGELHAILRRQEDFYPFLKDNREKIEKILTFRIPYYVGPLARGNSRFAWMTRKSEETITPWNFEEVVDKGASAQSFIERMTNFDKNLPNEKVLPKHSLLYEYFTVYNELTKVKYVTEGMRKPAFLSGEQKKAIVDLLFKTNRKVTVKQLKEDYFKKIECFDSVEISGVEDRFNASLGTYHDLLKIIKDKDFLDNEENEDILEDIVLTLTLFEDREMIEERLKTYAHLFDDKVMKQLKRRRYTGWGRLSRKLINGIRDKQSGKTILDFLKSDGFANRNFMQLIHDDSLTFKEDIQKAQVSGQGDSLHEHIANLAGSPAIKKGILQTVKVVDELVKVMGRHKPENIVIEMARENQTTQKGQKNSRERMKRIEEGIKELGSQILKEHPVENTQLQNEKLYLYYLQNGRDMYVDQELDINRLSDYDVDHIVPQSFLKDDSIDNKVLTRSDKARGKSDNVPSEEVVKKMKNYWRQLLNAKLITQRKFDNLTKAERGGLSELDKAGFIKRQLVETRQITKHVAQILDSRMNTKYDENDKLIREVKVITLKSKLVSDFRKDFQFYKVREINNYHHAHDAYLNAVVGTALIKKYPKLESEFVYGDYKVYDVRKMIAKSEQEIGKATAKYFFYSNIMNFFKTEITLANGEIRKRPLIETNGETGEIVWDKGRDFATVRKVLSMPQVNIVKKTEVQTGGFSKESILPKRNSDKLIARKKDWDPKKYGGFDSPTVAYSVLVVAKVEKGKSKKLKSVKELLGITIMERSSFEKNPIDFLEAKGYKEVKKDLIIKLPKYSLFELENGRKRMLASAGELQKGNELALPSKYVNFLYLASHYEKLKGSPEDNEQKQLFVEQHKHYLDEIIEQISEFSKRVILADANLDKVLSAYNKHRDKPIREQAENIIHLFTLTNLGAPAAFKYFDTTIDRKRYTSTKEVLDATLIHQSITGLYETRIDLSQLGGDGGSGSETPGTSESATPESGGTLNIEDEYRLHETSKEPDVSLGSTWLSDFPQAWAETGGMGLAVRQAPLIIPLKATSTPVSIKQYPMSQEARLGIKPHIQRLLDQGILVPCQSPWNTPLLPVKKPGTNDYRPVQDLREVNKRVEDIHPTVPNPYNLLSGLPPSHQWYTVLDLKDAFFCLRLHPTSQPLFAFEWRDPEMGISGQLTWTRLPQGFKNSPTLFNEALHRDLADFRIQHPDLILLQYVDDLLLAATSELDCQQGTRALLQTLGNLGYRASAKKAQICQKQVKYLGYLLKEGQRWLTEARKETVMGQPTPKTPRQLREFLGKAGFCRLFIPGFAEMAAPLYPLTKPGTLFNWGPDQQKAYQEIKQALLTAPALGLPDLTKPFELFVDEKQGYAKGVLTQKLGPWRRPVAYLSKKLDPVAAGWPPCLRMVAAIAVLTKDAGKLTMGQPLVILAPHAVEALVKQPPDRWLSNARMTHYQALLLDTDRVQFGPVVALNPATLLPLPEEGLQHNCLDILAEAHGTRPDLTDQPLPDADHTWYTDGSSLLQEGQRKAGAAVTTETEVIWAKALPAGTSAQRAELIALTQALKMAEGKKLNVYTDSRYAFATAHIHGEIYRRRGWLTSEGKEIKNKDEILALLKALFLPKRLSIIHCPGHQKGHSAEARGNRMADQAARKAAITETPDTSTLLIENSSPSGGSKRTADGSEFEAGKRTADGSEFEKRTADGSEFESPKKKAKVE

SEQ ID NO: 2664 - protein, 2114 aa, synthetic construct
  source 1..2114: note = Description of Artificial Sequence: Synthetic polypeptide
MPAAKRVKLDGGDKKYSIGLDIGTNSVGWAVITDEYKVPSKKFKVLGNTDRHSIKKNLIGALLFDSGETAEATRLKRTARRRYTRRKNRICYLQEIFSNEMAKVDDSFFHRLEESFLVEEDKKHERHPIFGNIVDEVAYHEKYPTIYHLRKKLVDSTDKADLRLIYLALAHMIKFRGHFLIEGDLNPDNSDVDKLFIQLVQTYNQLFEENPINASGVDAKAILSARLSKSRRLENLIAQLPGEKKNGLFGNLIALSLGLTPNFKSNFDLAEDAKLQLSKDTYDDDLDNLLAQIGDQYADLFLAAKNLSDAILLSDILRVNTEITKAPLSASMIKRYDEHHQDLTLLKALVRQQLPEKYKEIFFDQSKNGYAGYIDGGASQEEFYKFIKPILEKMDGTEELLVKLNREDLLRKQRTFDNGSIPHQIHLGELHAILRRQEDFYPFLKDNREKIEKILTFRIPYYVGPLARGNSRFAWMTRKSEETITPWNFEEVVDKGASAQSFIERMTNFDKNLPNEKVLPKHSLLYEYFTVYNELTKVKYVTEGMRKPAFLSGEQKKAIVDLLFKTNRKVTVKQLKEDYFKKIECFDSVEISGVEDRFNASLGTYHDLLKIIKDKDFLDNEENEDILEDIVLTLTLFEDREMIEERLKTYAHLFDDKVMKQLKRRRYTGWGRLSRKLINGIRDKQSGKTILDFLKSDGFANRNFMQLIHDDSLTFKEDIQKAQVSGQGDSLHEHIANLAGSPAIKKGILQTVKVVDELVKVMGRHKPENIVIEMARENQTTQKGQKNSRERMKRIEEGIKELGSQILKEHPVENTQLQNEKLYLYYLQNGRDMYVDQELDINRLSDYDVDHIVPQSFLKDDSIDNKVLTRSDKARGKSDNVPSEEVVKKMKNYWRQLLNAKLITQRKFDNLTKAERGGLSELDKAGFIKRQLVETRQITKHVAQILDSRMNTKYDENDKLIREVKVITLKSKLVSDFRKDFQFYKVREINNYHHAHDAYLNAVVGTALIKKYPKLESEFVYGDYKVYDVRKMIAKSEQEIGKATAKYFFYSNIMNFFKTEITLANGEIRKRPLIETNGETGEIVWDKGRDFATVRKVLSMPQVNIVKKTEVQTGGFSKESILPKRNSDKLIARKKDWDPKKYGGFDSPTVAYSVLVVAKVEKGKSKKLKSVKELLGITIMERSSFEKNPIDFLEAKGYKEVKKDLIIKLPKYSLFELENGRKRMLASAGELQKGNELALPSKYVNFLYLASHYEKLKGSPEDNEQKQLFVEQHKHYLDEIIEQISEFSKRVILADANLDKVLSAYNKHRDKPIREQAENIIHLFTLTNLGAPAAFKYFDTTIDRKRYTSTKEVLDATLIHQSITGLYETRIDLSQLGGDGGGGGGSSPAPGGTLNIEDEYRLHETSKEPDVSLGSTWLSDFPQAWAETGGMGLAVRQAPLIIPLKATSTPVSIKQYPMSQEARLGIKPHIQRLLDQGILVPCQSPWNTPLLPVKKPGTNDYRPVQDLREVNKRVEDIHPTVPNPYNLLSGLPPSHQWYTVLDLKDAFFCLRLHPTSQPLFAFEWRDPEMGISGQLTWTRLPQGFKNSPTLFNEALHRDLADFRIQHPDLILLQYVDDLLLAATSELDCQQGTRALLQTLGNLGYRASAKKAQICQKQVKYLGYLLKEGQRWLTEARKETVMGQPTPKTPRQLREFLGKAGFCRLFIPGFAEMAAPLYPLTKPGTLFNWGPDQQKAYQEIKQALLTAPALGLPDLTKPFELFVDEKQGYAKGVLTQKLGPWRRPVAYLSKKLDPVAAGWPPCLRMVAAIAVLTKDAGKLTMGQPLVILAPHAVEALVKQPPDRWLSNARMTHYQALLLDTDRVQFGPVVALNPATLLPLPEEGLQHNCLDILAEAHGTRPDLTDQPLPDADHTWYTDGSSLLQEGQRKAGAAVTTETEVIWAKALPAGTSAQRAELIALTQALKMAEGKKLNVYTDSRYAFATAHIHGEIYRRRGWLTSEGKEIKNKDEILALLKALFLPKRLSIIHCPGHQKGHSAEARGNRMADQAARKAAITETPDTSTLLIENSSPSGGSKRTADGSEFEAGKRTADGSEFEKRTADGSEFESPKKKAKVE

SEQ ID NO: 2665 - protein, 2117 aa, synthetic construct
  source 1..2117: note = Description of Artificial Sequence: Synthetic polypeptide
MPAAKRVKLDGGDKKYSIGLDIGTNSVGWAVITDEYKVPSKKFKVLGNTDRHSIKKNLIGALLFDSGETAEATRLKRTARRRYTRRKNRICYLQEIFSNEMAKVDDSFFHRLEESFLVEEDKKHERHPIFGNIVDEVAYHEKYPTIYHLRKKLVDSTDKADLRLIYLALAHMIKFRGHFLIEGDLNPDNSDVDKLFIQLVQTYNQLFEENPINASGVDAKAILSARLSKSRRLENLIAQLPGEKKNGLFGNLIALSLGLTPNFKSNFDLAEDAKLQLSKDTYDDDLDNLLAQIGDQYADLFLAAKNLSDAILLSDILRVNTEITKAPLSASMIKRYDEHHQDLTLLKALVRQQLPEKYKEIFFDQSKNGYAGYIDGGASQEEFYKFIKPILEKMDGTEELLVKLNREDLLRKQRTFDNGSIPHQIHLGELHAILRRQEDFYPFLKDNREKIEKILTFRIPYYVGPLARGNSRFAWMTRKSEETITPWNFEEVVDKGASAQSFIERMTNFDKNLPNEKVLPKHSLLYEYFTVYNELTKVKYVTEGMRKPAFLSGEQKKAIVDLLFKTNRKVTVKQLKEDYFKKIECFDSVEISGVEDRFNASLGTYHDLLKIIKDKDFLDNEENEDILEDIVLTLTLFEDREMIEERLKTYAHLFDDKVMKQLKRRRYTGWGRLSRKLINGIRDKQSGKTILDFLKSDGFANRNFMQLIHDDSLTFKEDIQKAQVSGQGDSLHEHIANLAGSPAIKKGILQTVKVVDELVKVMGRHKPENIVIEMARENQTTQKGQKNSRERMKRIEEGIKELGSQILKEHPVENTQLQNEKLYLYYLQNGRDMYVDQELDINRLSDYDVDHIVPQSFLKDDSIDNKVLTRSDKARGKSDNVPSEEVVKKMKNYWRQLLNAKLITQRKFDNLTKAERGGLSELDKAGFIKRQLVETRQITKHVAQILDSRMNTKYDENDKLIREVKVITLKSKLVSDFRKDFQFYKVREINNYHHAHDAYLNAVVGTALIKKYPKLESEFVYGDYKVYDVRKMIAKSEQEIGKATAKYFFYSNIMNFFKTEITLANGEIRKRPLIETNGETGEIVWDKGRDFATVRKVLSMPQVNIVKKTEVQTGGFSKESILPKRNSDKLIARKKDWDPKKYGGFDSPTVAYSVLVVAKVEKGKSKKLKSVKELLGITIMERSSFEKNPIDFLEAKGYKEVKKDLIIKLPKYSLFELENGRKRMLASAGELQKGNELALPSKYVNFLYLASHYEKLKGSPEDNEQKQLFVEQHKHYLDEIIEQISEFSKRVILADANLDKVLSAYNKHRDKPIREQAENIIHLFTLTNLGAPAAFKYFDTTIDRKRYTSTKEVLDATLIHQSITGLYETRIDLSQLGGDGGGSSGSSGSSGSSGGTLNIEDEYRLHETSKEPDVSLGSTWLSDFPQAWAETGGMGLAVRQAPLIIPLKATSTPVSIKQYPMSQEARLGIKPHIQRLLDQGILVPCQSPWNTPLLPVKKPGTNDYRPVQDLREVNKRVEDIHPTVPNPYNLLSGLPPSHQWYTVLDLKDAFFCLRLHPTSQPLFAFEWRDPEMGISGQLTWTRLPQGFKNSPTLFNEALHRDLADFRIQHPDLILLQYVDDLLLAATSELDCQQGTRALLQTLGNLGYRASAKKAQICQKQVKYLGYLLKEGQRWLTEARKETVMGQPTPKTPRQLREFLGKAGFCRLFIPGFAEMAAPLYPLTKPGTLFNWGPDQQKAYQEIKQALLTAPALGLPDLTKPFELFVDEKQGYAKGVLTQKLGPWRRPVAYLSKKLDPVAAGWPPCLRMVAAIAVLTKDAGKLTMGQPLVILAPHAVEALVKQPPDRWLSNARMTHYQALLLDTDRVQFGPVVALNPATLLPLPEEGLQHNCLDILAEAHGTRPDLTDQPLPDADHTWYTDGSSLLQEGQRKAGAAVTTETEVIWAKALPAGTSAQRAELIALTQALKMAEGKKLNVYTDSRYAFATAHIHGEIYRRRGWLTSEGKEIKNKDEILALLKALFLPKRLSIIHCPGHQKGHSAEARGNRMADQAARKAAITETPDTSTLLIENSSPSGGSKRTADGSEFEAGKRTADGSEFEKRTADGSEFESPKKKAKVE

SEQ ID NO: 2666 - protein, 2116 aa, synthetic construct
  source 1..2116: note = Description of Artificial Sequence: Synthetic polypeptide
MPAAKRVKLDGGDKKYSIGLDIGTNSVGWAVITDEYKVPSKKFKVLGNTDRHSIKKNLIGALLFDSGETAEATRLKRTARRRYTRRKNRICYLQEIFSNEMAKVDDSFFHRLEESFLVEEDKKHERHPIFGNIVDEVAYHEKYPTIYHLRKKLVDSTDKADLRLIYLALAHMIKFRGHFLIEGDLNPDNSDVDKLFIQLVQTYNQLFEENPINASGVDAKAILSARLSKSRRLENLIAQLPGEKKNGLFGNLIALSLGLTPNFKSNFDLAEDAKLQLSKDTYDDDLDNLLAQIGDQYADLFLAAKNLSDAILLSDILRVNTEITKAPLSASMIKRYDEHHQDLTLLKALVRQQLPEKYKEIFFDQSKNGYAGYIDGGASQEEFYKFIKPILEKMDGTEELLVKLNREDLLRKQRTFDNGSIPHQIHLGELHAILRRQEDFYPFLKDNREKIEKILTFRIPYYVGPLARGNSRFAWMTRKSEETITPWNFEEVVDKGASAQSFIERMTNFDKNLPNEKVLPKHSLLYEYFTVYNELTKVKYVTEGMRKPAFLSGEQKKAIVDLLFKTNRKVTVKQLKEDYFKKIECFDSVEISGVEDRFNASLGTYHDLLKIIKDKDFLDNEENEDILEDIVLTLTLFEDREMIEERLKTYAHLFDDKVMKQLKRRRYTGWGRLSRKLINGIRDKQSGKTILDFLKSDGFANRNFMQLIHDDSLTFKEDIQKAQVSGQGDSLHEHIANLAGSPAIKKGILQTVKVVDELVKVMGRHKPENIVIEMARENQTTQKGQKNSRERMKRIEEGIKELGSQILKEHPVENTQLQNEKLYLYYLQNGRDMYVDQELDINRLSDYDVDHIVPQSFLKDDSIDNKVLTRSDKARGKSDNVPSEEVVKKMKNYWRQLLNAKLITQRKFDNLTKAERGGLSELDKAGFIKRQLVETRQITKHVAQILDSRMNTKYDENDKLIREVKVITLKSKLVSDFRKDFQFYKVREINNYHHAHDAYLNAVVGTALIKKYPKLESEFVYGDYKVYDVRKMIAKSEQEIGKATAKYFFYSNIMNFFKTEITLANGEIRKRPLIETNGETGEIVWDKGRDFATVRKVLSMPQVNIVKKTEVQTGGFSKESILPKRNSDKLIARKKDWDPKKYGGFDSPTVAYSVLVVAKVEKGKSKKLKSVKELLGITIMERSSFEKNPIDFLEAKGYKEVKKDLIIKLPKYSLFELENGRKRMLASAGELQKGNELALPSKYVNFLYLASHYEKLKGSPEDNEQKQLFVEQHKHYLDEIIEQISEFSKRVILADANLDKVLSAYNKHRDKPIREQAENIIHLFTLTNLGAPAAFKYFDTTIDRKRYTSTKEVLDATLIHQSITGLYETRIDLSQLGGDGGEAAAKGGSGSSGGTLNIEDEYRLHETSKEPDVSLGSTWLSDFPQAWAETGGMGLAVRQAPLIIPLKATSTPVSIKQYPMSQEARLGIKPHIQRLLDQGILVPCQSPWNTPLLPVKKPGTNDYRPVQDLREVNKRVEDIHPTVPNPYNLLSGLPPSHQWYTVLDLKDAFFCLRLHPTSQPLFAFEWRDPEMGISGQLTWTRLPQGFKNSPTLFNEALHRDLADFRIQHPDLILLQYVDDLLLAATSELDCQQGTRALLQTLGNLGYRASAKKAQICQKQVKYLGYLLKEGQRWLTEARKETVMGQPTPKTPRQLREFLGKAGFCRLFIPGFAEMAAPLYPLTKPGTLFNWGPDQQKAYQEIKQALLTAPALGLPDLTKPFELFVDEKQGYAKGVLTQKLGPWRRPVAYLSKKLDPVAAGWPPCLRMVAAIAVLTKDAGKLTMGQPLVILAPHAVEALVKQPPDRWLSNARMTHYQALLLDTDRVQFGPVVALNPATLLPLPEEGLQHNCLDILAEAHGTRPDLTDQPLPDADHTWYTDGSSLLQEGQRKAGAAVTTETEVIWAKALPAGTSAQRAELIALTQALKMAEGKKLNVYTDSRYAFATAHIHGEIYRRRGWLTSEGKEIKNKDEILALLKALFLPKRLSIIHCPGHQKGHSAEARGNRMADQAARKAAITETPDTSTLLIENSSPSGGSKRTADGSEFEAGKRTADGSEFEKRTADGSEFESPKKKAKVE

SEQ ID NO: 2667 - protein, 2114 aa, synthetic construct
  source 1..2114: note = Description of Artificial Sequence: Synthetic polypeptide
MPAAKRVKLDGGDKKYSIGLDIGTNSVGWAVITDEYKVPSKKFKVLGNTDRHSIKKNLIGALLFDSGETAEATRLKRTARRRYTRRKNRICYLQEIFSNEMAKVDDSFFHRLEESFLVEEDKKHERHPIFGNIVDEVAYHEKYPTIYHLRKKLVDSTDKADLRLIYLALAHMIKFRGHFLIEGDLNPDNSDVDKLFIQLVQTYNQLFEENPINASGVDAKAILSARLSKSRRLENLIAQLPGEKKNGLFGNLIALSLGLTPNFKSNFDLAEDAKLQLSKDTYDDDLDNLLAQIGDQYADLFLAAKNLSDAILLSDILRVNTEITKAPLSASMIKRYDEHHQDLTLLKALVRQQLPEKYKEIFFDQSKNGYAGYIDGGASQEEFYKFIKPILEKMDGTEELLVKLNREDLLRKQRTFDNGSIPHQIHLGELHAILRRQEDFYPFLKDNREKIEKILTFRIPYYVGPLARGNSRFAWMTRKSEETITPWNFEEVVDKGASAQSFIERMTNFDKNLPNEKVLPKHSLLYEYFTVYNELTKVKYVTEGMRKPAFLSGEQKKAIVDLLFKTNRKVTVKQLKEDYFKKIECFDSVEISGVEDRFNASLGTYHDLLKIIKDKDFLDNEENEDILEDIVLTLTLFEDREMIEERLKTYAHLFDDKVMKQLKRRRYTGWGRLSRKLINGIRDKQSGKTILDFLKSDGFANRNFMQLIHDDSLTFKEDIQKAQVSGQGDSLHEHIANLAGSPAIKKGILQTVKVVDELVKVMGRHKPENIVIEMARENQTTQKGQKNSRERMKRIEEGIKELGSQILKEHPVENTQLQNEKLYLYYLQNGRDMYVDQELDINRLSDYDVDHIVPQSFLKDDSIDNKVLTRSDKARGKSDNVPSEEVVKKMKNYWRQLLNAKLITQRKFDNLTKAERGGLSELDKAGFIKRQLVETRQITKHVAQILDSRMNTKYDENDKLIREVKVITLKSKLVSDFRKDFQFYKVREINNYHHAHDAYLNAVVGTALIKKYPKLESEFVYGDYKVYDVRKMIAKSEQEIGKATAKYFFYSNIMNFFKTEITLANGEIRKRPLIETNGETGEIVWDKGRDFATVRKVLSMPQVNIVKKTEVQTGGFSKESILPKRNSDKLIARKKDWDPKKYGGFDSPTVAYSVLVVAKVEKGKSKKLKSVKELLGITIMERSSFEKNPIDFLEAKGYKEVKKDLIIKLPKYSLFELENGRKRMLASAGELQKGNELALPSKYVNFLYLASHYEKLKGSPEDNEQKQLFVEQHKHYLDEIIEQISEFSKRVILADANLDKVLSAYNKHRDKPIREQAENIIHLFTLTNLGAPAAFKYFDTTIDRKRYTSTKEVLDATLIHQSITGLYETRIDLSQLGGDGGGGSPAPGGGGGTLNIEDEYRLHETSKEPDVSLGSTWLSDFPQAWAETGGMGLAVRQAPLIIPLKATSTPVSIKQYPMSQEARLGIKPHIQRLLDQGILVPCQSPWNTPLLPVKKPGTNDYRPVQDLREVNKRVEDIHPTVPNPYNLLSGLPPSHQWYTVLDLKDAFFCLRLHPTSQPLFAFEWRDPEMGISGQLTWTRLPQGFKNSPTLFNEALHRDLADFRIQHPDLILLQYVDDLLLAATSELDCQQGTRALLQTLGNLGYRASAKKAQICQKQVKYLGYLLKEGQRWLTEARKETVMGQPTPKTPRQLREFLGKAGFCRLFIPGFAEMAAPLYPLTKPGTLFNWGPDQQKAYQEIKQALLTAPALGLPDLTKPFELFVDEKQGYAKGVLTQKLGPWRRPVAYLSKKLDPVAAGWPPCLRMVAAIAVLTKDAGKLTMGQPLVILAPHAVEALVKQPPDRWLSNARMTHYQALLLDTDRVQFGPVVALNPATLLPLPEEGLQHNCLDILAEAHGTRPDLTDQPLPDADHTWYTDGSSLLQEGQRKAGAAVTTETEVIWAKALPAGTSAQRAELIALTQALKMAEGKKLNVYTDSRYAFATAHIHGEIYRRRGWLTSEGKEIKNKDEILALLKALFLPKRLSIIHCPGHQKGHSAEARGNRMADQAARKAAITETPDTSTLLIENSSPSGGSKRTADGSEFEAGKRTADGSEFEKRTADGSEFESPKKKAKVE

SEQ ID NO: 2668 - protein, 2116 aa, synthetic construct
  source 1..2116: note = Description of Artificial Sequence: Synthetic polypeptide
MPAAKRVKLDGGDKKYSIGLDIGTNSVGWAVITDEYKVPSKKFKVLGNTDRHSIKKNLIGALLFDSGETAEATRLKRTARRRYTRRKNRICYLQEIFSNEMAKVDDSFFHRLEESFLVEEDKKHERHPIFGNIVDEVAYHEKYPTIYHLRKKLVDSTDKADLRLIYLALAHMIKFRGHFLIEGDLNPDNSDVDKLFIQLVQTYNQLFEENPINASGVDAKAILSARLSKSRRLENLIAQLPGEKKNGLFGNLIALSLGLTPNFKSNFDLAEDAKLQLSKDTYDDDLDNLLAQIGDQYADLFLAAKNLSDAILLSDILRVNTEITKAPLSASMIKRYDEHHQDLTLLKALVRQQLPEKYKEIFFDQSKNGYAGYIDGGASQEEFYKFIKPILEKMDGTEELLVKLNREDLLRKQRTFDNGSIPHQIHLGELHAILRRQEDFYPFLKDNREKIEKILTFRIPYYVGPLARGNSRFAWMTRKSEETITPWNFEEVVDKGASAQSFIERMTNFDKNLPNEKVLPKHSLLYEYFTVYNELTKVKYVTEGMRKPAFLSGEQKKAIVDLLFKTNRKVTVKQLKEDYFKKIECFDSVEISGVEDRFNASLGTYHDLLKIIKDKDFLDNEENEDILEDIVLTLTLFEDREMIEERLKTYAHLFDDKVMKQLKRRRYTGWGRLSRKLINGIRDKQSGKTILDFLKSDGFANRNFMQLIHDDSLTFKEDIQKAQVSGQGDSLHEHIANLAGSPAIKKGILQTVKVVDELVKVMGRHKPENIVIEMARENQTTQKGQKNSRERMKRIEEGIKELGSQILKEHPVENTQLQNEKLYLYYLQNGRDMYVDQELDINRLSDYDVDHIVPQSFLKDDSIDNKVLTRSDKARGKSDNVPSEEVVKKMKNYWRQLLNAKLITQRKFDNLTKAERGGLSELDKAGFIKRQLVETRQITKHVAQILDSRMNTKYDENDKLIREVKVITLKSKLVSDFRKDFQFYKVREINNYHHAHDAYLNAVVGTALIKKYPKLESEFVYGDYKVYDVRKMIAKSEQEIGKATAKYFFYSNIMNFFKTEITLANGEIRKRPLIETNGETGEIVWDKGRDFATVRKVLSMPQVNIVKKTEVQTGGFSKESILPKRNSDKLIARKKDWDPKKYGGFDSPTVAYSVLVVAKVEKGKSKKLKSVKELLGITIMERSSFEKNPIDFLEAKGYKEVKKDLIIKLPKYSLFELENGRKRMLASAGELQKGNELALPSKYVNFLYLASHYEKLKGSPEDNEQKQLFVEQHKHYLDEIIEQISEFSKRVILADANLDKVLSAYNKHRDKPIREQAENIIHLFTLTNLGAPAAFKYFDTTIDRKRYTSTKEVLDATLIHQSITGLYETRIDLSQLGGDGGPAPEAAAKGGGGGTLNIEDEYRLHETSKEPDVSLGSTWLSDFPQAWAETGGMGLAVRQAPLIIPLKATSTPVSIKQYPMSQEARLGIKPHIQRLLDQGILVPCQSPWNTPLLPVKKPGTNDYRPVQDLREVNKRVEDIHPTVPNPYNLLSGLPPSHQWYTVLDLKDAFFCLRLHPTSQPLFAFEWRDPEMGISGQLTWTRLPQGFKNSPTLFNEALHRDLADFRIQHPDLILLQYVDDLLLAATSELDCQQGTRALLQTLGNLGYRASAKKAQICQKQVKYLGYLLKEGQRWLTEARKETVMGQPTPKTPRQLREFLGKAGFCRLFIPGFAEMAAPLYPLTKPGTLFNWGPDQQKAYQEIKQALLTAPALGLPDLTKPFELFVDEKQGYAKGVLTQKLGPWRRPVAYLSKKLDPVAAGWPPCLRMVAAIAVLTKDAGKLTMGQPLVILAPHAVEALVKQPPDRWLSNARMTHYQALLLDTDRVQFGPVVALNPATLLPLPEEGLQHNCLDILAEAHGTRPDLTDQPLPDADHTWYTDGSSLLQEGQRKAGAAVTTETEVIWAKALPAGTSAQRAELIALTQALKMAEGKKLNVYTDSRYAFATAHIHGEIYRRRGWLTSEGKEIKNKDEILALLKALFLPKRLSIIHCPGHQKGHSAEARGNRMADQAARKAAITETPDTSTLLIENSSPSGGSKRTADGSEFEAGKRTADGSEFEKRTADGSEFESPKKKAKVE

SEQ ID NO: 2669 - protein, 2120 aa, synthetic construct
  source 1..2120: note = Description of Artificial Sequence: Synthetic polypeptide
MPAAKRVKLDGGDKKYSIGLDIGTNSVGWAVITDEYKVPSKKFKVLGNTDRHSIKKNLIGALLFDSGETAEATRLKRTARRRYTRRKNRICYLQEIFSNEMAKVDDSFFHRLEESFLVEEDKKHERHPIFGNIVDEVAYHEKYPTIYHLRKKLVDSTDKADLRLIYLALAHMIKFRGHFLIEGDLNPDNSDVDKLFIQLVQTYNQLFEENPINASGVDAKAILSARLSKSRRLENLIAQLPGEKKNGLFGNLIALSLGLTPNFKSNFDLAEDAKLQLSKDTYDDDLDNLLAQIGDQYADLFLAAKNLSDAILLSDILRVNTEITKAPLSASMIKRYDEHHQDLTLLKALVRQQLPEKYKEIFFDQSKNGYAGYIDGGASQEEFYKFIKPILEKMDGTEELLVKLNREDLLRKQRTFDNGSIPHQIHLGELHAILRRQEDFYPFLKDNREKIEKILTFRIPYYVGPLARGNSRFAWMTRKSEETITPWNFEEVVDKGASAQSFIERMTNFDKNLPNEKVLPKHSLLYEYFTVYNELTKVKYVTEGMRKPAFLSGEQKKAIVDLLFKTNRKVTVKQLKEDYFKKIECFDSVEISGVEDRFNASLGTYHDLLKIIKDKDFLDNEENEDILEDIVLTLTLFEDREMIEERLKTYAHLFDDKVMKQLKRRRYTGWGRLSRKLINGIRDKQSGKTILDFLKSDGFANRNFMQLIHDDSLTFKEDIQKAQVSGQGDSLHEHIANLAGSPAIKKGILQTVKVVDELVKVMGRHKPENIVIEMARENQTTQKGQKNSRERMKRIEEGIKELGSQILKEHPVENTQLQNEKLYLYYLQNGRDMYVDQELDINRLSDYDVDHIVPQSFLKDDSIDNKVLTRSDKARGKSDNVPSEEVVKKMKNYWRQLLNAKLITQRKFDNLTKAERGGLSELDKAGFIKRQLVETRQITKHVAQILDSRMNTKYDENDKLIREVKVITLKSKLVSDFRKDFQFYKVREINNYHHAHDAYLNAVVGTALIKKYPKLESEFVYGDYKVYDVRKMIAKSEQEIGKATAKYFFYSNIMNFFKTEITLANGEIRKRPLIETNGETGEIVWDKGRDFATVRKVLSMPQVNIVKKTEVQTGGFSKESILPKRNSDKLIARKKDWDPKKYGGFDSPTVAYSVLVVAKVEKGKSKKLKSVKELLGITIMERSSFEKNPIDFLEAKGYKEVKKDLIIKLPKYSLFELENGRKRMLASAGELQKGNELALPSKYVNFLYLASHYEKLKGSPEDNEQKQLFVEQHKHYLDEIIEQISEFSKRVILADANLDKVLSAYNKHRDKPIREQAENIIHLFTLTNLGAPAAFKYFDTTIDRKRYTSTKEVLDATLIHQSITGLYETRIDLSQLGGDGGGSSGSSGSSGSSGSSGGTLNIEDEYRLHETSKEPDVSLGSTWLSDFPQAWAETGGMGLAVRQAPLIIPLKATSTPVSIKQYPMSQEARLGIKPHIQRLLDQGILVPCQSPWNTPLLPVKKPGTNDYRPVQDLREVNKRVEDIHPTVPNPYNLLSGLPPSHQWYTVLDLKDAFFCLRLHPTSQPLFAFEWRDPEMGISGQLTWTRLPQGFKNSPTLFNEALHRDLADFRIQHPDLILLQYVDDLLLAATSELDCQQGTRALLQTLGNLGYRASAKKAQICQKQVKYLGYLLKEGQRWLTEARKETVMGQPTPKTPRQLREFLGKAGFCRLFIPGFAEMAAPLYPLTKPGTLFNWGPDQQKAYQEIKQALLTAPALGLPDLTKPFELFVDEKQGYAKGVLTQKLGPWRRPVAYLSKKLDPVAAGWPPCLRMVAAIAVLTKDAGKLTMGQPLVILAPHAVEALVKQPPDRWLSNARMTHYQALLLDTDRVQFGPVVALNPATLLPLPEEGLQHNCLDILAEAHGTRPDLTDQPLPDADHTWYTDGSSLLQEGQRKAGAAVTTETEVIWAKALPAGTSAQRAELIALTQALKMAEGKKLNVYTDSRYAFATAHIHGEIYRRRGWLTSEGKEIKNKDEILALLKALFLPKRLSIIHCPGHQKGHSAEARGNRMADQAARKAAITETPDTSTLLIENSSPSGGSKRTADGSEFEAGKRTADGSEFEKRTADGSEFESPKKKAKVE

SEQ ID NO: 2670 - protein, 2114 aa, synthetic construct
  source 1..2114: note = Description of Artificial Sequence: Synthetic polypeptide
MPAAKRVKLDGGDKKYSIGLDIGTNSVGWAVITDEYKVPSKKFKVLGNTDRHSIKKNLIGALLFDSGETAEATRLKRTARRRYTRRKNRICYLQEIFSNEMAKVDDSFFHRLEESFLVEEDKKHERHPIFGNIVDEVAYHEKYPTIYHLRKKLVDSTDKADLRLIYLALAHMIKFRGHFLIEGDLNPDNSDVDKLFIQLVQTYNQLFEENPINASGVDAKAILSARLSKSRRLENLIAQLPGEKKNGLFGNLIALSLGLTPNFKSNFDLAEDAKLQLSKDTYDDDLDNLLAQIGDQYADLFLAAKNLSDAILLSDILRVNTEITKAPLSASMIKRYDEHHQDLTLLKALVRQQLPEKYKEIFFDQSKNGYAGYIDGGASQEEFYKFIKPILEKMDGTEELLVKLNREDLLRKQRTFDNGSIPHQIHLGELHAILRRQEDFYPFLKDNREKIEKILTFRIPYYVGPLARGNSRFAWMTRKSEETITPWNFEEVVDKGASAQSFIERMTNFDKNLPNEKVLPKHSLLYEYFTVYNELTKVKYVTEGMRKPAFLSGEQKKAIVDLLFKTNRKVTVKQLKEDYFKKIECFDSVEISGVEDRFNASLGTYHDLLKIIKDKDFLDNEENEDILEDIVLTLTLFEDREMIEERLKTYAHLFDDKVMKQLKRRRYTGWGRLSRKLINGIRDKQSGKTILDFLKSDGFANRNFMQLIHDDSLTFKEDIQKAQVSGQGDSLHEHIANLAGSPAIKKGILQTVKVVDELVKVMGRHKPENIVIEMARENQTTQKGQKNSRERMKRIEEGIKELGSQILKEHPVENTQLQNEKLYLYYLQNGRDMYVDQELDINRLSDYDVDHIVPQSFLKDDSIDNKVLTRSDKARGKSDNVPSEEVVKKMKNYWRQLLNAKLITQRKFDNLTKAERGGLSELDKAGFIKRQLVETRQITKHVAQILDSRMNTKYDENDKLIREVKVITLKSKLVSDFRKDFQFYKVREINNYHHAHDAYLNAVVGTALIKKYPKLESEFVYGDYKVYDVRKMIAKSEQEIGKATAKYFFYSNIMNFFKTEITLANGEIRKRPLIETNGETGEIVWDKGRDFATVRKVLSMPQVNIVKKTEVQTGGFSKESILPKRNSDKLIARKKDWDPKKYGGFDSPTVAYSVLVVAKVEKGKSKKLKSVKELLGITIMERSSFEKNPIDFLEAKGYKEVKKDLIIKLPKYSLFELENGRKRMLASAGELQKGNELALPSKYVNFLYLASHYEKLKGSPEDNEQKQLFVEQHKHYLDEIIEQISEFSKRVILADANLDKVLSAYNKHRDKPIREQAENIIHLFTLTNLGAPAAFKYFDTTIDRKRYTSTKEVLDATLIHQSITGLYETRIDLSQLGGDGGGGGGGSGSSGGTLNIEDEYRLHETSKEPDVSLGSTWLSDFPQAWAETGGMGLAVRQAPLIIPLKATSTPVSIKQYPMSQEARLGIKPHIQRLLDQGILVPCQSPWNTPLLPVKKPGTNDYRPVQDLREVNKRVEDIHPTVPNPYNLLSGLPPSHQWYTVLDLKDAFFCLRLHPTSQPLFAFEWRDPEMGISGQLTWTRLPQGFKNSPTLFNEALHRDLADFRIQHPDLILLQYVDDLLLAATSELDCQQGTRALLQTLGNLGYRASAKKAQICQKQVKYLGYLLKEGQRWLTEARKETVMGQPTPKTPRQLREFLGKAGFCRLFIPGFAEMAAPLYPLTKPGTLFNWGPDQQKAYQEIKQALLTAPALGLPDLTKPFELFVDEKQGYAKGVLTQKLGPWRRPVAYLSKKLDPVAAGWPPCLRMVAAIAVLTKDAGKLTMGQPLVILAPHAVEALVKQPPDRWLSNARMTHYQALLLDTDRVQFGPVVALNPATLLPLPEEGLQHNCLDILAEAHGTRPDLTDQPLPDADHTWYTDGSSLLQEGQRKAGAAVTTETEVIWAKALPAGTSAQRAELIALTQALKMAEGKKLNVYTDSRYAFATAHIHGEIYRRRGWLTSEGKEIKNKDEILALLKALFLPKRLSIIHCPGHQKGHSAEARGNRMADQAARKAAITETPDTSTLLIENSSPSGGSKRTADGSEFEAGKRTADGSEFEKRTADGSEFESPKKKAKVE

SEQ ID NO: 2671 - protein, 2111 aa, synthetic construct
  source 1..2111: note = Description of Artificial Sequence: Synthetic polypeptide
MPAAKRVKLDGGDKKYSIGLDIGTNSVGWAVITDEYKVPSKKFKVLGNTDRHSIKKNLIGALLFDSGETAEATRLKRTARRRYTRRKNRICYLQEIFSNEMAKVDDSFFHRLEESFLVEEDKKHERHPIFGNIVDEVAYHEKYPTIYHLRKKLVDSTDKADLRLIYLALAHMIKFRGHFLIEGDLNPDNSDVDKLFIQLVQTYNQLFEENPINASGVDAKAILSARLSKSRRLENLIAQLPGEKKNGLFGNLIALSLGLTPNFKSNFDLAEDAKLQLSKDTYDDDLDNLLAQIGDQYADLFLAAKNLSDAILLSDILRVNTEITKAPLSASMIKRYDEHHQDLTLLKALVRQQLPEKYKEIFFDQSKNGYAGYIDGGASQEEFYKFIKPILEKMDGTEELLVKLNREDLLRKQRTFDNGSIPHQIHLGELHAILRRQEDFYPFLKDNREKIEKILTFRIPYYVGPLARGNSRFAWMTRKSEETITPWNFEEVVDKGASAQSFIERMTNFDKNLPNEKVLPKHSLLYEYFTVYNELTKVKYVTEGMRKPAFLSGEQKKAIVDLLFKTNRKVTVKQLKEDYFKKIECFDSVEISGVEDRFNASLGTYHDLLKIIKDKDFLDNEENEDILEDIVLTLTLFEDREMIEERLKTYAHLFDDKVMKQLKRRRYTGWGRLSRKLINGIRDKQSGKTILDFLKSDGFANRNFMQLIHDDSLTFKEDIQKAQVSGQGDSLHEHIANLAGSPAIKKGILQTVKVVDELVKVMGRHKPENIVIEMARENQTTQKGQKNSRERMKRIEEGIKELGSQILKEHPVENTQLQNEKLYLYYLQNGRDMYVDQELDINRLSDYDVDHIVPQSFLKDDSIDNKVLTRSDKARGKSDNVPSEEVVKKMKNYWRQLLNAKLITQRKFDNLTKAERGGLSELDKAGFIKRQLVETRQITKHVAQILDSRMNTKYDENDKLIREVKVITLKSKLVSDFRKDFQFYKVREINNYHHAHDAYLNAVVGTALIKKYPKLESEFVYGDYKVYDVRKMIAKSEQEIGKATAKYFFYSNIMNFFKTEITLANGEIRKRPLIETNGETGEIVWDKGRDFATVRKVLSMPQVNIVKKTEVQTGGFSKESILPKRNSDKLIARKKDWDPKKYGGFDSPTVAYSVLVVAKVEKGKSKKLKSVKELLGITIMERSSFEKNPIDFLEAKGYKEVKKDLIIKLPKYSLFELENGRKRMLASAGELQKGNELALPSKYVNFLYLASHYEKLKGSPEDNEQKQLFVEQHKHYLDEIIEQISEFSKRVILADANLDKVLSAYNKHRDKPIREQAENIIHLFTLTNLGAPAAFKYFDTTIDRKRYTSTKEVLDATLIHQSITGLYETRIDLSQLGGDGGGGSPAPGGTLNIEDEYRLHETSKEPDVSLGSTWLSDFPQAWAETGGMGLAVRQAPLIIPLKATSTPVSIKQYPMSQEARLGIKPHIQRLLDQGILVPCQSPWNTPLLPVKKPGTNDYRPVQDLREVNKRVEDIHPTVPNPYNLLSGLPPSHQWYTVLDLKDAFFCLRLHPTSQPLFAFEWRDPEMGISGQLTWTRLPQGFKNSPTLFNEALHRDLADFRIQHPDLILLQYVDDLLLAATSELDCQQGTRALLQTLGNLGYRASAKKAQICQKQVKYLGYLLKEGQRWLTEARKETVMGQPTPKTPRQLREFLGKAGFCRLFIPGFAEMAAPLYPLTKPGTLFNWGPDQQKAYQEIKQALLTAPALGLPDLTKPFELFVDEKQGYAKGVLTQKLGPWRRPVAYLSKKLDPVAAGWPPCLRMVAAIAVLTKDAGKLTMGQPLVILAPHAVEALVKQPPDRWLSNARMTHYQALLLDTDRVQFGPVVALNPATLLPLPEEGLQHNCLDILAEAHGTRPDLTDQPLPDADHTWYTDGSSLLQEGQRKAGAAVTTETEVIWAKALPAGTSAQRAELIALTQALKMAEGKKLNVYTDSRYAFATAHIHGEIYRRRGWLTSEGKEIKNKDEILALLKALFLPKRLSIIHCPGHQKGHSAEARGNRMADQAARKAAITETPDTSTLLIENSSPSGGSKRTADGSEFEAGKRTADGSEFEKRTADGSEFESPKKKAKVE

SEQ ID NO: 2672 - protein, 2111 aa, synthetic construct
  source 1..2111: note = Description of Artificial Sequence: Synthetic polypeptide
MPAAKRVKLDGGDKKYSIGLDIGTNSVGWAVITDEYKVPSKKFKVLGNTDRHSIKKNLIGALLFDSGETAEATRLKRTARRRYTRRKNRICYLQEIFSNEMAKVDDSFFHRLEESFLVEEDKKHERHPIFGNIVDEVAYHEKYPTIYHLRKKLVDSTDKADLRLIYLALAHMIKFRGHFLIEGDLNPDNSDVDKLFIQLVQTYNQLFEENPINASGVDAKAILSARLSKSRRLENLIAQLPGEKKNGLFGNLIALSLGLTPNFKSNFDLAEDAKLQLSKDTYDDDLDNLLAQIGDQYADLFLAAKNLSDAILLSDILRVNTEITKAPLSASMIKRYDEHHQDLTLLKALVRQQLPEKYKEIFFDQSKNGYAGYIDGGASQEEFYKFIKPILEKMDGTEELLVKLNREDLLRKQRTFDNGSIPHQIHLGELHAILRRQEDFYPFLKDNREKIEKILTFRIPYYVGPLARGNSRFAWMTRKSEETITPWNFEEVVDKGASAQSFIERMTNFDKNLPNEKVLPKHSLLYEYFTVYNELTKVKYVTEGMRKPAFLSGEQKKAIVDLLFKTNRKVTVKQLKEDYFKKIECFDSVEISGVEDRFNASLGTYHDLLKIIKDKDFLDNEENEDILEDIVLTLTLFEDREMIEERLKTYAHLFDDKVMKQLKRRRYTGWGRLSRKLINGIRDKQSGKTILDFLKSDGFANRNFMQLIHDDSLTFKEDIQKAQVSGQGDSLHEHIANLAGSPAIKKGILQTVKVVDELVKVMGRHKPENIVIEMARENQTTQKGQKNSRERMKRIEEGIKELGSQILKEHPVENTQLQNEKLYLYYLQNGRDMYVDQELDINRLSDYDVDHIVPQSFLKDDSIDNKVLTRSDKARGKSDNVPSEEVVKKMKNYWRQLLNAKLITQRKFDNLTKAERGGLSELDKAGFIKRQLVETRQITKHVAQILDSRMNTKYDENDKLIREVKVITLKSKLVSDFRKDFQFYKVREINNYHHAHDAYLNAVVGTALIKKYPKLESEFVYGDYKVYDVRKMIAKSEQEIGKATAKYFFYSNIMNFFKTEITLANGEIRKRPLIETNGETGEIVWDKGRDFATVRKVLSMPQVNIVKKTEVQTGGFSKESILPKRNSDKLIARKKDWDPKKYGGFDSPTVAYSVLVVAKVEKGKSKKLKSVKELLGITIMERSSFEKNPIDFLEAKGYKEVKKDLIIKLPKYSLFELENGRKRMLASAGELQKGNELALPSKYVNFLYLASHYEKLKGSPEDNEQKQLFVEQHKHYLDEIIEQISEFSKRVILADANLDKVLSAYNKHRDKPIREQAENIIHLFTLTNLGAPAAFKYFDTTIDRKRYTSTKEVLDATLIHQSITGLYETRIDLSQLGGDGGGGGPAPGGTLNIEDEYRLHETSKEPDVSLGSTWLSDFPQAWAETGGMGLAVRQAPLIIPLKATSTPVSIKQYPMSQEARLGIKPHIQRLLDQGILVPCQSPWNTPLLPVKKPGTNDYRPVQDLREVNKRVEDIHPTVPNPYNLLSGLPPSHQWYTVLDLKDAFFCLRLHPTSQPLFAFEWRDPEMGISGQLTWTRLPQGFKNSPTLFNEALHRDLADFRIQHPDLILLQYVDDLLLAATSELDCQQGTRALLQTLGNLGYRASAKKAQICQKQVKYLGYLLKEGQRWLTEARKETVMGQPTPKTPRQLREFLGKAGFCRLFIPGFAEMAAPLYPLTKPGTLFNWGPDQQKAYQEIKQALLTAPALGLPDLTKPFELFVDEKQGYAKGVLTQKLGPWRRPVAYLSKKLDPVAAGWPPCLRMVAAIAVLTKDAGKLTMGQPLVILAPHAVEALVKQPPDRWLSNARMTHYQALLLDTDRVQFGPVVALNPATLLPLPEEGLQHNCLDILAEAHGTRPDLTDQPLPDADHTWYTDGSSLLQEGQRKAGAAVTTETEVIWAKALPAGTSAQRAELIALTQALKMAEGKKLNVYTDSRYAFATAHIHGEIYRRRGWLTSEGKEIKNKDEILALLKALFLPKRLSIIHCPGHQKGHSAEARGNRMADQAARKAAITETPDTSTLLIENSSPSGGSKRTADGSEFEAGKRTADGSEFEKRTADGSEFESPKKKAKVE

SEQ ID NO: 2673 - protein, 2116 aa, synthetic construct
  source 1..2116: note = Description of Artificial Sequence: Synthetic polypeptide
MPAAKRVKLDGGDKKYSIGLDIGTNSVGWAVITDEYKVPSKKFKVLGNTDRHSIKKNLIGALLFDSGETAEATRLKRTARRRYTRRKNRICYLQEIFSNEMAKVDDSFFHRLEESFLVEEDKKHERHPIFGNIVDEVAYHEKYPTIYHLRKKLVDSTDKADLRLIYLALAHMIKFRGHFLIEGDLNPDNSDVDKLFIQLVQTYNQLFEENPINASGVDAKAILSARLSKSRRLENLIAQLPGEKKNGLFGNLIALSLGLTPNFKSNFDLAEDAKLQLSKDTYDDDLDNLLAQIGDQYADLFLAAKNLSDAILLSDILRVNTEITKAPLSASMIKRYDEHHQDLTLLKALVRQQLPEKYKEIFFDQSKNGYAGYIDGGASQEEFYKFIKPILEKMDGTEELLVKLNREDLLRKQRTFDNGSIPHQIHLGELHAILRRQEDFYPFLKDNREKIEKILTFRIPYYVGPLARGNSRFAWMTRKSEETITPWNFEEVVDKGASAQSFIERMTNFDKNLPNEKVLPKHSLLYEYFTVYNELTKVKYVTEGMRKPAFLSGEQKKAIVDLLFKTNRKVTVKQLKEDYFKKIECFDSVEISGVEDRFNASLGTYHDLLKIIKDKDFLDNEENEDILEDIVLTLTLFEDREMIEERLKTYAHLFDDKVMKQLKRRRYTGWGRLSRKLINGIRDKQSGKTILDFLKSDGFANRNFMQLIHDDSLTFKEDIQKAQVSGQGDSLHEHIANLAGSPAIKKGILQTVKVVDELVKVMGRHKPENIVIEMARENQTTQKGQKNSRERMKRIEEGIKELGSQILKEHPVENTQLQNEKLYLYYLQNGRDMYVDQELDINRLSDYDVDHIVPQSFLKDDSIDNKVLTRSDKARGKSDNVPSEEVVKKMKNYWRQLLNAKLITQRKFDNLTKAERGGLSELDKAGFIKRQLVETRQITKHVAQILDSRMNTKYDENDKLIREVKVITLKSKLVSDFRKDFQFYKVREINNYHHAHDAYLNAVVGTALIKKYPKLESEFVYGDYKVYDVRKMIAKSEQEIGKATAKYFFYSNIMNFFKTEITLANGEIRKRPLIETNGETGEIVWDKGRDFATVRKVLSMPQVNIVKKTEVQTGGFSKESILPKRNSDKLIARKKDWDPKKYGGFDSPTVAYSVLVVAKVEKGKSKKLKSVKELLGITIMERSSFEKNPIDFLEAKGYKEVKKDLIIKLPKYSLFELENGRKRMLASAGELQKGNELALPSKYVNFLYLASHYEKLKGSPEDNEQKQLFVEQHKHYLDEIIEQISEFSKRVILADANLDKVLSAYNKHRDKPIREQAENIIHLFTLTNLGAPAAFKYFDTTIDRKRYTSTKEVLDATLIHQSITGLYETRIDLSQLGGDGGGGSEAAAKGSSGGTLNIEDEYRLHETSKEPDVSLGSTWLSDFPQAWAETGGMGLAVRQAPLIIPLKATSTPVSIKQYPMSQEARLGIKPHIQRLLDQGILVPCQSPWNTPLLPVKKPGTNDYRPVQDLREVNKRVEDIHPTVPNPYNLLSGLPPSHQWYTVLDLKDAFFCLRLHPTSQPLFAFEWRDPEMGISGQLTWTRLPQGFKNSPTLFNEALHRDLADFRIQHPDLILLQYVDDLLLAATSELDCQQGTRALLQTLGNLGYRASAKKAQICQKQVKYLGYLLKEGQRWLTEARKETVMGQPTPKTPRQLREFLGKAGFCRLFIPGFAEMAAPLYPLTKPGTLFNWGPDQQKAYQEIKQALLTAPALGLPDLTKPFELFVDEKQGYAKGVLTQKLGPWRRPVAYLSKKLDPVAAGWPPCLRMVAAIAVLTKDAGKLTMGQPLVILAPHAVEALVKQPPDRWLSNARMTHYQALLLDTDRVQFGPVVALNPATLLPLPEEGLQHNCLDILAEAHGTRPDLTDQPLPDADHTWYTDGSSLLQEGQRKAGAAVTTETEVIWAKALPAGTSAQRAELIALTQALKMAEGKKLNVYTDSRYAFATAHIHGEIYRRRGWLTSEGKEIKNKDEILALLKALFLPKRLSIIHCPGHQKGHSAEARGNRMADQAARKAAITETPDTSTLLIENSSPSGGSKRTADGSEFEAGKRTADGSEFEKRTADGSEFESPKKKAKVE

SEQ ID NO: 2674 - protein, 2116 aa, synthetic construct
  source 1..2116: note = Description of Artificial Sequence: Synthetic polypeptide
MPAAKRVKLDGGDKKYSIGLDIGTNSVGWAVITDEYKVPSKKFKVLGNTDRHSIKKNLIGALLFDSGETAEATRLKRTARRRYTRRKNRICYLQEIFSNEMAKVDDSFFHRLEESFLVEEDKKHERHPIFGNIVDEVAYHEKYPTIYHLRKKLVDSTDKADLRLIYLALAHMIKFRGHFLIEGDLNPDNSDVDKLFIQLVQTYNQLFEENPINASGVDAKAILSARLSKSRRLENLIAQLPGEKKNGLFGNLIALSLGLTPNFKSNFDLAEDAKLQLSKDTYDDDLDNLLAQIGDQYADLFLAAKNLSDAILLSDILRVNTEITKAPLSASMIKRYDEHHQDLTLLKALVRQQLPEKYKEIFFDQSKNGYAGYIDGGASQEEFYKFIKPILEKMDGTEELLVKLNREDLLRKQRTFDNGSIPHQIHLGELHAILRRQEDFYPFLKDNREKIEKILTFRIPYYVGPLARGNSRFAWMTRKSEETITPWNFEEVVDKGASAQSFIERMTNFDKNLPNEKVLPKHSLLYEYFTVYNELTKVKYVTEGMRKPAFLSGEQKKAIVDLLFKTNRKVTVKQLKEDYFKKIECFDSVEISGVEDRFNASLGTYHDLLKIIKDKDFLDNEENEDILEDIVLTLTLFEDREMIEERLKTYAHLFDDKVMKQLKRRRYTGWGRLSRKLINGIRDKQSGKTILDFLKSDGFANRNFMQLIHDDSLTFKEDIQKAQVSGQGDSLHEHIANLAGSPAIKKGILQTVKVVDELVKVMGRHKPENIVIEMARENQTTQKGQKNSRERMKRIEEGIKELGSQILKEHPVENTQLQNEKLYLYYLQNGRDMYVDQELDINRLSDYDVDHIVPQSFLKDDSIDNKVLTRSDKARGKSDNVPSEEVVKKMKNYWRQLLNAKLITQRKFDNLTKAERGGLSELDKAGFIKRQLVETRQITKHVAQILDSRMNTKYDENDKLIREVKVITLKSKLVSDFRKDFQFYKVREINNYHHAHDAYLNAVVGTALIKKYPKLESEFVYGDYKVYDVRKMIAKSEQEIGKATAKYFFYSNIMNFFKTEITLANGEIRKRPLIETNGETGEIVWDKGRDFATVRKVLSMPQVNIVKKTEVQTGGFSKESILPKRNSDKLIARKKDWDPKKYGGFDSPTVAYSVLVVAKVEKGKSKKLKSVKELLGITIMERSSFEKNPIDFLEAKGYKEVKKDLIIKLPKYSLFELENGRKRMLASAGELQKGNELALPSKYVNFLYLASHYEKLKGSPEDNEQKQLFVEQHKHYLDEIIEQISEFSKRVILADANLDKVLSAYNKHRDKPIREQAENIIHLFTLTNLGAPAAFKYFDTTIDRKRYTSTKEVLDATLIHQSITGLYETRIDLSQLGGDGGEAAAKPAPGGSGGTLNIEDEYRLHETSKEPDVSLGSTWLSDFPQAWAETGGMGLAVRQAPLIIPLKATSTPVSIKQYPMSQEARLGIKPHIQRLLDQGILVPCQSPWNTPLLPVKKPGTNDYRPVQDLREVNKRVEDIHPTVPNPYNLLSGLPPSHQWYTVLDLKDAFFCLRLHPTSQPLFAFEWRDPEMGISGQLTWTRLPQGFKNSPTLFNEALHRDLADFRIQHPDLILLQYVDDLLLAATSELDCQQGTRALLQTLGNLGYRASAKKAQICQKQVKYLGYLLKEGQRWLTEARKETVMGQPTPKTPRQLREFLGKAGFCRLFIPGFAEMAAPLYPLTKPGTLFNWGPDQQKAYQEIKQALLTAPALGLPDLTKPFELFVDEKQGYAKGVLTQKLGPWRRPVAYLSKKLDPVAAGWPPCLRMVAAIAVLTKDAGKLTMGQPLVILAPHAVEALVKQPPDRWLSNARMTHYQALLLDTDRVQFGPVVALNPATLLPLPEEGLQHNCLDILAEAHGTRPDLTDQPLPDADHTWYTDGSSLLQEGQRKAGAAVTTETEVIWAKALPAGTSAQRAELIALTQALKMAEGKKLNVYTDSRYAFATAHIHGEIYRRRGWLTSEGKEIKNKDEILALLKALFLPKRLSIIHCPGHQKGHSAEARGNRMADQAARKAAITETPDTSTLLIENSSPSGGSKRTADGSEFEAGKRTADGSEFEKRTADGSEFESPKKKAKVE

SEQ ID NO: 2675 - protein, 2114 aa, synthetic construct
  source 1..2114: note = Description of Artificial Sequence: Synthetic polypeptide
MPAAKRVKLDGGDKKYSIGLDIGTNSVGWAVITDEYKVPSKKFKVLGNTDRHSIKKNLIGALLFDSGETAEATRLKRTARRRYTRRKNRICYLQEIFSNEMAKVDDSFFHRLEESFLVEEDKKHERHPIFGNIVDEVAYHEKYPTIYHLRKKLVDSTDKADLRLIYLALAHMIKFRGHFLIEGDLNPDNSDVDKLFIQLVQTYNQLFEENPINASGVDAKAILSARLSKSRRLENLIAQLPGEKKNGLFGNLIALSLGLTPNFKSNFDLAEDAKLQLSKDTYDDDLDNLLAQIGDQYADLFLAAKNLSDAILLSDILRVNTEITKAPLSASMIKRYDEHHQDLTLLKALVRQQLPEKYKEIFFDQSKNGYAGYIDGGASQEEFYKFIKPILEKMDGTEELLVKLNREDLLRKQRTFDNGSIPHQIHLGELHAILRRQEDFYPFLKDNREKIEKILTFRIPYYVGPLARGNSRFAWMTRKSEETITPWNFEEVVDKGASAQSFIERMTNFDKNLPNEKVLPKHSLLYEYFTVYNELTKVKYVTEGMRKPAFLSGEQKKAIVDLLFKTNRKVTVKQLKEDYFKKIECFDSVEISGVEDRFNASLGTYHDLLKIIKDKDFLDNEENEDILEDIVLTLTLFEDREMIEERLKTYAHLFDDKVMKQLKRRRYTGWGRLSRKLINGIRDKQSGKTILDFLKSDGFANRNFMQLIHDDSLTFKEDIQKAQVSGQGDSLHEHIANLAGSPAIKKGILQTVKVVDELVKVMGRHKPENIVIEMARENQTTQKGQKNSRERMKRIEEGIKELGSQILKEHPVENTQLQNEKLYLYYLQNGRDMYVDQELDINRLSDYDVDHIVPQSFLKDDSIDNKVLTRSDKARGKSDNVPSEEVVKKMKNYWRQLLNAKLITQRKFDNLTKAERGGLSELDKAGFIKRQLVETRQITKHVAQILDSRMNTKYDENDKLIREVKVITLKSKLVSDFRKDFQFYKVREINNYHHAHDAYLNAVVGTALIKKYPKLESEFVYGDYKVYDVRKMIAKSEQEIGKATAKYFFYSNIMNFFKTEITLANGEIRKRPLIETNGETGEIVWDKGRDFATVRKVLSMPQVNIVKKTEVQTGGFSKESILPKRNSDKLIARKKDWDPKKYGGFDSPTVAYSVLVVAKVEKGKSKKLKSVKELLGITIMERSSFEKNPIDFLEAKGYKEVKKDLIIKLPKYSLFELENGRKRMLASAGELQKGNELALPSKYVNFLYLASHYEKLKGSPEDNEQKQLFVEQHKHYLDEIIEQISEFSKRVILADANLDKVLSAYNKHRDKPIREQAENIIHLFTLTNLGAPAAFKYFDTTIDRKRYTSTKEVLDATLIHQSITGLYETRIDLSQLGGDGGGGSGSSGGGGGTLNIEDEYRLHETSKEPDVSLGSTWLSDFPQAWAETGGMGLAVRQAPLIIPLKATSTPVSIKQYPMSQEARLGIKPHIQRLLDQGILVPCQSPWNTPLLPVKKPGTNDYRPVQDLREVNKRVEDIHPTVPNPYNLLSGLPPSHQWYTVLDLKDAFFCLRLHPTSQPLFAFEWRDPEMGISGQLTWTRLPQGFKNSPTLFNEALHRDLADFRIQHPDLILLQYVDDLLLAATSELDCQQGTRALLQTLGNLGYRASAKKAQICQKQVKYLGYLLKEGQRWLTEARKETVMGQPTPKTPRQLREFLGKAGFCRLFIPGFAEMAAPLYPLTKPGTLFNWGPDQQKAYQEIKQALLTAPALGLPDLTKPFELFVDEKQGYAKGVLTQKLGPWRRPVAYLSKKLDPVAAGWPPCLRMVAAIAVLTKDAGKLTMGQPLVILAPHAVEALVKQPPDRWLSNARMTHYQALLLDTDRVQFGPVVALNPATLLPLPEEGLQHNCLDILAEAHGTRPDLTDQPLPDADHTWYTDGSSLLQEGQRKAGAAVTTETEVIWAKALPAGTSAQRAELIALTQALKMAEGKKLNVYTDSRYAFATAHIHGEIYRRRGWLTSEGKEIKNKDEILALLKALFLPKRLSIIHCPGHQKGHSAEARGNRMADQAARKAAITETPDTSTLLIENSSPSGGSKRTADGSEFEAGKRTADGSEFEKRTADGSEFESPKKKAKVE

SEQ ID NO: 2676 - protein, 2111 aa, synthetic construct
  source 1..2111: note = Description of Artificial Sequence: Synthetic polypeptide
MPAAKRVKLDGGDKKYSIGLDIGTNSVGWAVITDEYKVPSKKFKVLGNTDRHSIKKNLIGALLFDSGETAEATRLKRTARRRYTRRKNRICYLQEIFSNEMAKVDDSFFHRLEESFLVEEDKKHERHPIFGNIVDEVAYHEKYPTIYHLRKKLVDSTDKADLRLIYLALAHMIKFRGHFLIEGDLNPDNSDVDKLFIQLVQTYNQLFEENPINASGVDAKAILSARLSKSRRLENLIAQLPGEKKNGLFGNLIALSLGLTPNFKSNFDLAEDAKLQLSKDTYDDDLDNLLAQIGDQYADLFLAAKNLSDAILLSDILRVNTEITKAPLSASMIKRYDEHHQDLTLLKALVRQQLPEKYKEIFFDQSKNGYAGYIDGGASQEEFYKFIKPILEKMDGTEELLVKLNREDLLRKQRTFDNGSIPHQIHLGELHAILRRQEDFYPFLKDNREKIEKILTFRIPYYVGPLARGNSRFAWMTRKSEETITPWNFEEVVDKGASAQSFIERMTNFDKNLPNEKVLPKHSLLYEYFTVYNELTKVKYVTEGMRKPAFLSGEQKKAIVDLLFKTNRKVTVKQLKEDYFKKIECFDSVEISGVEDRFNASLGTYHDLLKIIKDKDFLDNEENEDILEDIVLTLTLFEDREMIEERLKTYAHLFDDKVMKQLKRRRYTGWGRLSRKLINGIRDKQSGKTILDFLKSDGFANRNFMQLIHDDSLTFKEDIQKAQVSGQGDSLHEHIANLAGSPAIKKGILQTVKVVDELVKVMGRHKPENIVIEMARENQTTQKGQKNSRERMKRIEEGIKELGSQILKEHPVENTQLQNEKLYLYYLQNGRDMYVDQELDINRLSDYDVDHIVPQSFLKDDSIDNKVLTRSDKARGKSDNVPSEEVVKKMKNYWRQLLNAKLITQRKFDNLTKAERGGLSELDKAGFIKRQLVETRQITKHVAQILDSRMNTKYDENDKLIREVKVITLKSKLVSDFRKDFQFYKVREINNYHHAHDAYLNAVVGTALIKKYPKLESEFVYGDYKVYDVRKMIAKSEQEIGKATAKYFFYSNIMNFFKTEITLANGEIRKRPLIETNGETGEIVWDKGRDFATVRKVLSMPQVNIVKKTEVQTGGFSKESILPKRNSDKLIARKKDWDPKKYGGFDSPTVAYSVLVVAKVEKGKSKKLKSVKELLGITIMERSSFEKNPIDFLEAKGYKEVKKDLIIKLPKYSLFELENGRKRMLASAGELQKGNELALPSKYVNFLYLASHYEKLKGSPEDNEQKQLFVEQHKHYLDEIIEQISEFSKRVILADANLDKVLSAYNKHRDKPIREQAENIIHLFTLTNLGAPAAFKYFDTTIDRKRYTSTKEVLDATLIHQSITGLYETRIDLSQLGGDGGGSSGGGGGTLNIEDEYRLHETSKEPDVSLGSTWLSDFPQAWAETGGMGLAVRQAPLIIPLKATSTPVSIKQYPMSQEARLGIKPHIQRLLDQGILVPCQSPWNTPLLPVKKPGTNDYRPVQDLREVNKRVEDIHPTVPNPYNLLSGLPPSHQWYTVLDLKDAFFCLRLHPTSQPLFAFEWRDPEMGISGQLTWTRLPQGFKNSPTLFNEALHRDLADFRIQHPDLILLQYVDDLLLAATSELDCQQGTRALLQTLGNLGYRASAKKAQICQKQVKYLGYLLKEGQRWLTEARKETVMGQPTPKTPRQLREFLGKAGFCRLFIPGFAEMAAPLYPLTKPGTLFNWGPDQQKAYQEIKQALLTAPALGLPDLTKPFELFVDEKQGYAKGVLTQKLGPWRRPVAYLSKKLDPVAAGWPPCLRMVAAIAVLTKDAGKLTMGQPLVILAPHAVEALVKQPPDRWLSNARMTHYQALLLDTDRVQFGPVVALNPATLLPLPEEGLQHNCLDILAEAHGTRPDLTDQPLPDADHTWYTDGSSLLQEGQRKAGAAVTTETEVIWAKALPAGTSAQRAELIALTQALKMAEGKKLNVYTDSRYAFATAHIHGEIYRRRGWLTSEGKEIKNKDEILALLKALFLPKRLSIIHCPGHQKGHSAEARGNRMADQAARKAAITETPDTSTLLIENSSPSGGSKRTADGSEFEAGKRTADGSEFEKRTADGSEFESPKKKAKVE

SEQ ID NO: 2677 - protein, 2116 aa, synthetic construct
  source 1..2116: note = Description of Artificial Sequence: Synthetic polypeptide
MPAAKRVKLDGGDKKYSIGLDIGTNSVGWAVITDEYKVPSKKFKVLGNTDRHSIKKNLIGALLFDSGETAEATRLKRTARRRYTRRKNRICYLQEIFSNEMAKVDDSFFHRLEESFLVEEDKKHERHPIFGNIVDEVAYHEKYPTIYHLRKKLVDSTDKADLRLIYLALAHMIKFRGHFLIEGDLNPDNSDVDKLFIQLVQTYNQLFEENPINASGVDAKAILSARLSKSRRLENLIAQLPGEKKNGLFGNLIALSLGLTPNFKSNFDLAEDAKLQLSKDTYDDDLDNLLAQIGDQYADLFLAAKNLSDAILLSDILRVNTEITKAPLSASMIKRYDEHHQDLTLLKALVRQQLPEKYKEIFFDQSKNGYAGYIDGGASQEEFYKFIKPILEKMDGTEELLVKLNREDLLRKQRTFDNGSIPHQIHLGELHAILRRQEDFYPFLKDNREKIEKILTFRIPYYVGPLARGNSRFAWMTRKSEETITPWNFEEVVDKGASAQSFIERMTNFDKNLPNEKVLPKHSLLYEYFTVYNELTKVKYVTEGMRKPAFLSGEQKKAIVDLLFKTNRKVTVKQLKEDYFKKIECFDSVEISGVEDRFNASLGTYHDLLKIIKDKDFLDNEENEDILEDIVLTLTLFEDREMIEERLKTYAHLFDDKVMKQLKRRRYTGWGRLSRKLINGIRDKQSGKTILDFLKSDGFANRNFMQLIHDDSLTFKEDIQKAQVSGQGDSLHEHIANLAGSPAIKKGILQTVKVVDELVKVMGRHKPENIVIEMARENQTTQKGQKNSRERMKRIEEGIKELGSQILKEHPVENTQLQNEKLYLYYLQNGRDMYVDQELDINRLSDYDVDHIVPQSFLKDDSIDNKVLTRSDKARGKSDNVPSEEVVKKMKNYWRQLLNAKLITQRKFDNLTKAERGGLSELDKAGFIKRQLVETRQITKHVAQILDSRMNTKYDENDKLIREVKVITLKSKLVSDFRKDFQFYKVREINNYHHAHDAYLNAVVGTALIKKYPKLESEFVYGDYKVYDVRKMIAKSEQEIGKATAKYFFYSNIMNFFKTEITLANGEIRKRPLIETNGETGEIVWDKGRDFATVRKVLSMPQVNIVKKTEVQTGGFSKESILPKRNSDKLIARKKDWDPKKYGGFDSPTVAYSVLVVAKVEKGKSKKLKSVKELLGITIMERSSFEKNPIDFLEAKGYKEVKKDLIIKLPKYSLFELENGRKRMLASAGELQKGNELALPSKYVNFLYLASHYEKLKGSPEDNEQKQLFVEQHKHYLDEIIEQISEFSKRVILADANLDKVLSAYNKHRDKPIREQAENIIHLFTLTNLGAPAAFKYFDTTIDRKRYTSTKEVLDATLIHQSITGLYETRIDLSQLGGDGGGGGEAAAKGSSGGTLNIEDEYRLHETSKEPDVSLGSTWLSDFPQAWAETGGMGLAVRQAPLIIPLKATSTPVSIKQYPMSQEARLGIKPHIQRLLDQGILVPCQSPWNTPLLPVKKPGTNDYRPVQDLREVNKRVEDIHPTVPNPYNLLSGLPPSHQWYTVLDLKDAFFCLRLHPTSQPLFAFEWRDPEMGISGQLTWTRLPQGFKNSPTLFNEALHRDLADFRIQHPDLILLQYVDDLLLAATSELDCQQGTRALLQTLGNLGYRASAKKAQICQKQVKYLGYLLKEGQRWLTEARKETVMGQPTPKTPRQLREFLGKAGFCRLFIPGFAEMAAPLYPLTKPGTLFNWGPDQQKAYQEIKQALLTAPALGLPDLTKPFELFVDEKQGYAKGVLTQKLGPWRRPVAYLSKKLDPVAAGWPPCLRMVAAIAVLTKDAGKLTMGQPLVILAPHAVEALVKQPPDRWLSNARMTHYQALLLDTDRVQFGPVVALNPATLLPLPEEGLQHNCLDILAEAHGTRPDLTDQPLPDADHTWYTDGSSLLQEGQRKAGAAVTTETEVIWAKALPAGTSAQRAELIALTQALKMAEGKKLNVYTDSRYAFATAHIHGEIYRRRGWLTSEGKEIKNKDEILALLKALFLPKRLSIIHCPGHQKGHSAEARGNRMADQAARKAAITETPDTSTLLIENSSPSGGSKRTADGSEFEAGKRTADGSEFEKRTADGSEFESPKKKAKVE

SEQ ID NO: 2678 - protein, 2130 aa, synthetic construct
  source 1..2130: note = Description of Artificial Sequence: Synthetic polypeptide
MPAAKRVKLDGGDKKYSIGLDIGTNSVGWAVITDEYKVPSKKFKVLGNTDRHSIKKNLIGALLFDSGETAEATRLKRTARRRYTRRKNRICYLQEIFSNEMAKVDDSFFHRLEESFLVEEDKKHERHPIFGNIVDEVAYHEKYPTIYHLRKKLVDSTDKADLRLIYLALAHMIKFRGHFLIEGDLNPDNSDVDKLFIQLVQTYNQLFEENPINASGVDAKAILSARLSKSRRLENLIAQLPGEKKNGLFGNLIALSLGLTPNFKSNFDLAEDAKLQLSKDTYDDDLDNLLAQIGDQYADLFLAAKNLSDAILLSDILRVNTEITKAPLSASMIKRYDEHHQDLTLLKALVRQQLPEKYKEIFFDQSKNGYAGYIDGGASQEEFYKFIKPILEKMDGTEELLVKLNREDLLRKQRTFDNGSIPHQIHLGELHAILRRQEDFYPFLKDNREKIEKILTFRIPYYVGPLARGNSRFAWMTRKSEETITPWNFEEVVDKGASAQSFIERMTNFDKNLPNEKVLPKHSLLYEYFTVYNELTKVKYVTEGMRKPAFLSGEQKKAIVDLLFKTNRKVTVKQLKEDYFKKIECFDSVEISGVEDRFNASLGTYHDLLKIIKDKDFLDNEENEDILEDIVLTLTLFEDREMIEERLKTYAHLFDDKVMKQLKRRRYTGWGRLSRKLINGIRDKQSGKTILDFLKSDGFANRNFMQLIHDDSLTFKEDIQKAQVSGQGDSLHEHIANLAGSPAIKKGILQTVKVVDELVKVMGRHKPENIVIEMARENQTTQKGQKNSRERMKRIEEGIKELGSQILKEHPVENTQLQNEKLYLYYLQNGRDMYVDQELDINRLSDYDVDHIVPQSFLKDDSIDNKVLTRSDKARGKSDNVPSEEVVKKMKNYWRQLLNAKLITQRKFDNLTKAERGGLSELDKAGFIKRQLVETRQITKHVAQILDSRMNTKYDENDKLIREVKVITLKSKLVSDFRKDFQFYKVREINNYHHAHDAYLNAVVGTALIKKYPKLESEFVYGDYKVYDVRKMIAKSEQEIGKATAKYFFYSNIMNFFKTEITLANGEIRKRPLIETNGETGEIVWDKGRDFATVRKVLSMPQVNIVKKTEVQTGGFSKESILPKRNSDKLIARKKDWDPKKYGGFDSPTVAYSVLVVAKVEKGKSKKLKSVKELLGITIMERSSFEKNPIDFLEAKGYKEVKKDLIIKLPKYSLFELENGRKRMLASAGELQKGNELALPSKYVNFLYLASHYEKLKGSPEDNEQKQLFVEQHKHYLDEIIEQISEFSKRVILADANLDKVLSAYNKHRDKPIREQAENIIHLFTLTNLGAPAAFKYFDTTIDRKRYTSTKEVLDATLIHQSITGLYETRIDLSQLGGDGGEAAAKEAAAKEAAAKEAAAKEAAAKGGTLNIEDEYRLHETSKEPDVSLGSTWLSDFPQAWAETGGMGLAVRQAPLIIPLKATSTPVSIKQYPMSQEARLGIKPHIQRLLDQGILVPCQSPWNTPLLPVKKPGTNDYRPVQDLREVNKRVEDIHPTVPNPYNLLSGLPPSHQWYTVLDLKDAFFCLRLHPTSQPLFAFEWRDPEMGISGQLTWTRLPQGFKNSPTLFNEALHRDLADFRIQHPDLILLQYVDDLLLAATSELDCQQGTRALLQTLGNLGYRASAKKAQICQKQVKYLGYLLKEGQRWLTEARKETVMGQPTPKTPRQLREFLGKAGFCRLFIPGFAEMAAPLYPLTKPGTLFNWGPDQQKAYQEIKQALLTAPALGLPDLTKPFELFVDEKQGYAKGVLTQKLGPWRRPVAYLSKKLDPVAAGWPPCLRMVAAIAVLTKDAGKLTMGQPLVILAPHAVEALVKQPPDRWLSNARMTHYQALLLDTDRVQFGPVVALNPATLLPLPEEGLQHNCLDILAEAHGTRPDLTDQPLPDADHTWYTDGSSLLQEGQRKAGAAVTTETEVIWAKALPAGTSAQRAELIALTQALKMAEGKKLNVYTDSRYAFATAHIHGEIYRRRGWLTSEGKEIKNKDEILALLKALFLPKRLSIIHCPGHQKGHSAEARGNRMADQAARKAAITETPDTSTLLIENSSPSGGSKRTADGSEFEAGKRTADGSEFEKRTADGSEFESPKKKAKVE

SEQ ID NO: 2679 - protein, 2114 aa, synthetic construct
  source 1..2114: note = Description of Artificial Sequence: Synthetic polypeptide
MPAAKRVKLDGGDKKYSIGLDIGTNSVGWAVITDEYKVPSKKFKVLGNTDRHSIKKNLIGALLFDSGETAEATRLKRTARRRYTRRKNRICYLQEIFSNEMAKVDDSFFHRLEESFLVEEDKKHERHPIFGNIVDEVAYHEKYPTIYHLRKKLVDSTDKADLRLIYLALAHMIKFRGHFLIEGDLNPDNSDVDKLFIQLVQTYNQLFEENPINASGVDAKAILSARLSKSRRLENLIAQLPGEKKNGLFGNLIALSLGLTPNFKSNFDLAEDAKLQLSKDTYDDDLDNLLAQIGDQYADLFLAAKNLSDAILLSDILRVNTEITKAPLSASMIKRYDEHHQDLTLLKALVRQQLPEKYKEIFFDQSKNGYAGYIDGGASQEEFYKFIKPILEKMDGTEELLVKLNREDLLRKQRTFDNGSIPHQIHLGELHAILRRQEDFYPFLKDNREKIEKILTFRIPYYVGPLARGNSRFAWMTRKSEETITPWNFEEVVDKGASAQSFIERMTNFDKNLPNEKVLPKHSLLYEYFTVYNELTKVKYVTEGMRKPAFLSGEQKKAIVDLLFKTNRKVTVKQLKEDYFKKIECFDSVEISGVEDRFNASLGTYHDLLKIIKDKDFLDNEENEDILEDIVLTLTLFEDREMIEERLKTYAHLFDDKVMKQLKRRRYTGWGRLSRKLINGIRDKQSGKTILDFLKSDGFANRNFMQLIHDDSLTFKEDIQKAQVSGQGDSLHEHIANLAGSPAIKKGILQTVKVVDELVKVMGRHKPENIVIEMARENQTTQKGQKNSRERMKRIEEGIKELGSQILKEHPVENTQLQNEKLYLYYLQNGRDMYVDQELDINRLSDYDVDHIVPQSFLKDDSIDNKVLTRSDKARGKSDNVPSEEVVKKMKNYWRQLLNAKLITQRKFDNLTKAERGGLSELDKAGFIKRQLVETRQITKHVAQILDSRMNTKYDENDKLIREVKVITLKSKLVSDFRKDFQFYKVREINNYHHAHDAYLNAVVGTALIKKYPKLESEFVYGDYKVYDVRKMIAKSEQEIGKATAKYFFYSNIMNFFKTEITLANGEIRKRPLIETNGETGEIVWDKGRDFATVRKVLSMPQVNIVKKTEVQTGGFSKESILPKRNSDKLIARKKDWDPKKYGGFDSPTVAYSVLVVAKVEKGKSKKLKSVKELLGITIMERSSFEKNPIDFLEAKGYKEVKKDLIIKLPKYSLFELENGRKRMLASAGELQKGNELALPSKYVNFLYLASHYEKLKGSPEDNEQKQLFVEQHKHYLDEIIEQISEFSKRVILADANLDKVLSAYNKHRDKPIREQAENIIHLFTLTNLGAPAAFKYFDTTIDRKRYTSTKEVLDATLIHQSITGLYETRIDLSQLGGDGGGGSGSSPAPGGTLNIEDEYRLHETSKEPDVSLGSTWLSDFPQAWAETGGMGLAVRQAPLIIPLKATSTPVSIKQYPMSQEARLGIKPHIQRLLDQGILVPCQSPWNTPLLPVKKPGTNDYRPVQDLREVNKRVEDIHPTVPNPYNLLSGLPPSHQWYTVLDLKDAFFCLRLHPTSQPLFAFEWRDPEMGISGQLTWTRLPQGFKNSPTLFNEALHRDLADFRIQHPDLILLQYVDDLLLAATSELDCQQGTRALLQTLGNLGYRASAKKAQICQKQVKYLGYLLKEGQRWLTEARKETVMGQPTPKTPRQLREFLGKAGFCRLFIPGFAEMAAPLYPLTKPGTLFNWGPDQQKAYQEIKQALLTAPALGLPDLTKPFELFVDEKQGYAKGVLTQKLGPWRRPVAYLSKKLDPVAAGWPPCLRMVAAIAVLTKDAGKLTMGQPLVILAPHAVEALVKQPPDRWLSNARMTHYQALLLDTDRVQFGPVVALNPATLLPLPEEGLQHNCLDILAEAHGTRPDLTDQPLPDADHTWYTDGSSLLQEGQRKAGAAVTTETEVIWAKALPAGTSAQRAELIALTQALKMAEGKKLNVYTDSRYAFATAHIHGEIYRRRGWLTSEGKEIKNKDEILALLKALFLPKRLSIIHCPGHQKGHSAEARGNRMADQAARKAAITETPDTSTLLIENSSPSGGSKRTADGSEFEAGKRTADGSEFEKRTADGSEFESPKKKAKVE

SEQ ID NO: 2680 - protein, 2120 aa, synthetic construct
  source 1..2120: note = Description of Artificial Sequence: Synthetic polypeptide
MPAAKRVKLDGGDKKYSIGLDIGTNSVGWAVITDEYKVPSKKFKVLGNTDRHSIKKNLIGALLFDSGETAEATRLKRTARRRYTRRKNRICYLQEIFSNEMAKVDDSFFHRLEESFLVEEDKKHERHPIFGNIVDEVAYHEKYPTIYHLRKKLVDSTDKADLRLIYLALAHMIKFRGHFLIEGDLNPDNSDVDKLFIQLVQTYNQLFEENPINASGVDAKAILSARLSKSRRLENLIAQLPGEKKNGLFGNLIALSLGLTPNFKSNFDLAEDAKLQLSKDTYDDDLDNLLAQIGDQYADLFLAAKNLSDAILLSDILRVNTEITKAPLSASMIKRYDEHHQDLTLLKALVRQQLPEKYKEIFFDQSKNGYAGYIDGGASQEEFYKFIKPILEKMDGTEELLVKLNREDLLRKQRTFDNGSIPHQIHLGELHAILRRQEDFYPFLKDNREKIEKILTFRIPYYVGPLARGNSRFAWMTRKSEETITPWNFEEVVDKGASAQSFIERMTNFDKNLPNEKVLPKHSLLYEYFTVYNELTKVKYVTEGMRKPAFLSGEQKKAIVDLLFKTNRKVTVKQLKEDYFKKIECFDSVEISGVEDRFNASLGTYHDLLKIIKDKDFLDNEENEDILEDIVLTLTLFEDREMIEERLKTYAHLFDDKVMKQLKRRRYTGWGRLSRKLINGIRDKQSGKTILDFLKSDGFANRNFMQLIHDDSLTFKEDIQKAQVSGQGDSLHEHIANLAGSPAIKKGILQTVKVVDELVKVMGRHKPENIVIEMARENQTTQKGQKNSRERMKRIEEGIKELGSQILKEHPVENTQLQNEKLYLYYLQNGRDMYVDQELDINRLSDYDVDHIVPQSFLKDDSIDNKVLTRSDKARGKSDNVPSEEVVKKMKNYWRQLLNAKLITQRKFDNLTKAERGGLSELDKAGFIKRQLVETRQITKHVAQILDSRMNTKYDENDKLIREVKVITLKSKLVSDFRKDFQFYKVREINNYHHAHDAYLNAVVGTALIKKYPKLESEFVYGDYKVYDVRKMIAKSEQEIGKATAKYFFYSNIMNFFKTEITLANGEIRKRPLIETNGETGEIVWDKGRDFATVRKVLSMPQVNIVKKTEVQTGGFSKESILPKRNSDKLIARKKDWDPKKYGGFDSPTVAYSVLVVAKVEKGKSKKLKSVKELLGITIMERSSFEKNPIDFLEAKGYKEVKKDLIIKLPKYSLFELENGRKRMLASAGELQKGNELALPSKYVNFLYLASHYEKLKGSPEDNEQKQLFVEQHKHYLDEIIEQISEFSKRVILADANLDKVLSAYNKHRDKPIREQAENIIHLFTLTNLGAPAAFKYFDTTIDRKRYTSTKEVLDATLIHQSITGLYETRIDLSQLGGDGGGGSGGSGGSGGSGGSGGTLNIEDEYRLHETSKEPDVSLGSTWLSDFPQAWAETGGMGLAVRQAPLIIPLKATSTPVSIKQYPMSQEARLGIKPHIQRLLDQGILVPCQSPWNTPLLPVKKPGTNDYRPVQDLREVNKRVEDIHPTVPNPYNLLSGLPPSHQWYTVLDLKDAFFCLRLHPTSQPLFAFEWRDPEMGISGQLTWTRLPQGFKNSPTLFNEALHRDLADFRIQHPDLILLQYVDDLLLAATSELDCQQGTRALLQTLGNLGYRASAKKAQICQKQVKYLGYLLKEGQRWLTEARKETVMGQPTPKTPRQLREFLGKAGFCRLFIPGFAEMAAPLYPLTKPGTLFNWGPDQQKAYQEIKQALLTAPALGLPDLTKPFELFVDEKQGYAKGVLTQKLGPWRRPVAYLSKKLDPVAAGWPPCLRMVAAIAVLTKDAGKLTMGQPLVILAPHAVEALVKQPPDRWLSNARMTHYQALLLDTDRVQFGPVVALNPATLLPLPEEGLQHNCLDILAEAHGTRPDLTDQPLPDADHTWYTDGSSLLQEGQRKAGAAVTTETEVIWAKALPAGTSAQRAELIALTQALKMAEGKKLNVYTDSRYAFATAHIHGEIYRRRGWLTSEGKEIKNKDEILALLKALFLPKRLSIIHCPGHQKGHSAEARGNRMADQAARKAAITETPDTSTLLIENSSPSGGSKRTADGSEFEAGKRTADGSEFEKRTADGSEFESPKKKAKVE

SEQ ID NO: 2681 - protein, 2116 aa, synthetic construct
  source 1..2116: note = Description of Artificial Sequence: Synthetic polypeptide
MPAAKRVKLDGGDKKYSIGLDIGTNSVGWAVITDEYKVPSKKFKVLGNTDRHSIKKNLIGALLFDSGETAEATRLKRTARRRYTRRKNRICYLQEIFSNEMAKVDDSFFHRLEESFLVEEDKKHERHPIFGNIVDEVAYHEKYPTIYHLRKKLVDSTDKADLRLIYLALAHMIKFRGHFLIEGDLNPDNSDVDKLFIQLVQTYNQLFEENPINASGVDAKAILSARLSKSRRLENLIAQLPGEKKNGLFGNLIALSLGLTPNFKSNFDLAEDAKLQLSKDTYDDDLDNLLAQIGDQYADLFLAAKNLSDAILLSDILRVNTEITKAPLSASMIKRYDEHHQDLTLLKALVRQQLPEKYKEIFFDQSKNGYAGYIDGGASQEEFYKFIKPILEKMDGTEELLVKLNREDLLRKQRTFDNGSIPHQIHLGELHAILRRQEDFYPFLKDNREKIEKILTFRIPYYVGPLARGNSRFAWMTRKSEETITPWNFEEVVDKGASAQSFIERMTNFDKNLPNEKVLPKHSLLYEYFTVYNELTKVKYVTEGMRKPAFLSGEQKKAIVDLLFKTNRKVTVKQLKEDYFKKIECFDSVEISGVEDRFNASLGTYHDLLKIIKDKDFLDNEENEDILEDIVLTLTLFEDREMIEERLKTYAHLFDDKVMKQLKRRRYTGWGRLSRKLINGIRDKQSGKTILDFLKSDGFANRNFMQLIHDDSLTFKEDIQKAQVSGQGDSLHEHIANLAGSPAIKKGILQTVKVVDELVKVMGRHKPENIVIEMARENQTTQKGQKNSRERMKRIEEGIKELGSQILKEHPVENTQLQNEKLYLYYLQNGRDMYVDQELDINRLSDYDVDHIVPQSFLKDDSIDNKVLTRSDKARGKSDNVPSEEVVKKMKNYWRQLLNAKLITQRKFDNLTKAERGGLSELDKAGFIKRQLVETRQITKHVAQILDSRMNTKYDENDKLIREVKVITLKSKLVSDFRKDFQFYKVREINNYHHAHDAYLNAVVGTALIKKYPKLESEFVYGDYKVYDVRKMIAKSEQEIGKATAKYFFYSNIMNFFKTEITLANGEIRKRPLIETNGETGEIVWDKGRDFATVRKVLSMPQVNIVKKTEVQTGGFSKESILPKRNSDKLIARKKDWDPKKYGGFDSPTVAYSVLVVAKVEKGKSKKLKSVKELLGITIMERSSFEKNPIDFLEAKGYKEVKKDLIIKLPKYSLFELENGRKRMLASAGELQKGNELALPSKYVNFLYLASHYEKLKGSPEDNEQKQLFVEQHKHYLDEIIEQISEFSKRVILADANLDKVLSAYNKHRDKPIREQAENIIHLFTLTNLGAPAAFKYFDTTIDRKRYTSTKEVLDATLIHQSITGLYETRIDLSQLGGDGGEAAAKPAPGGGGGTLNIEDEYRLHETSKEPDVSLGSTWLSDFPQAWAETGGMGLAVRQAPLIIPLKATSTPVSIKQYPMSQEARLGIKPHIQRLLDQGILVPCQSPWNTPLLPVKKPGTNDYRPVQDLREVNKRVEDIHPTVPNPYNLLSGLPPSHQWYTVLDLKDAFFCLRLHPTSQPLFAFEWRDPEMGISGQLTWTRLPQGFKNSPTLFNEALHRDLADFRIQHPDLILLQYVDDLLLAATSELDCQQGTRALLQTLGNLGYRASAKKAQICQKQVKYLGYLLKEGQRWLTEARKETVMGQPTPKTPRQLREFLGKAGFCRLFIPGFAEMAAPLYPLTKPGTLFNWGPDQQKAYQEIKQALLTAPALGLPDLTKPFELFVDEKQGYAKGVLTQKLGPWRRPVAYLSKKLDPVAAGWPPCLRMVAAIAVLTKDAGKLTMGQPLVILAPHAVEALVKQPPDRWLSNARMTHYQALLLDTDRVQFGPVVALNPATLLPLPEEGLQHNCLDILAEAHGTRPDLTDQPLPDADHTWYTDGSSLLQEGQRKAGAAVTTETEVIWAKALPAGTSAQRAELIALTQALKMAEGKKLNVYTDSRYAFATAHIHGEIYRRRGWLTSEGKEIKNKDEILALLKALFLPKRLSIIHCPGHQKGHSAEARGNRMADQAARKAAITETPDTSTLLIENSSPSGGSKRTADGSEFEAGKRTADGSEFEKRTADGSEFESPKKKAKVE

SEQ ID NO: 2682 - protein, 2111 aa, synthetic construct
  source 1..2111: note = Description of Artificial Sequence: Synthetic polypeptide
MPAAKRVKLDGGDKKYSIGLDIGTNSVGWAVITDEYKVPSKKFKVLGNTDRHSIKKNLIGALLFDSGETAEATRLKRTARRRYTRRKNRICYLQEIFSNEMAKVDDSFFHRLEESFLVEEDKKHERHPIFGNIVDEVAYHEKYPTIYHLRKKLVDSTDKADLRLIYLALAHMIKFRGHFLIEGDLNPDNSDVDKLFIQLVQTYNQLFEENPINASGVDAKAILSARLSKSRRLENLIAQLPGEKKNGLFGNLIALSLGLTPNFKSNFDLAEDAKLQLSKDTYDDDLDNLLAQIGDQYADLFLAAKNLSDAILLSDILRVNTEITKAPLSASMIKRYDEHHQDLTLLKALVRQQLPEKYKEIFFDQSKNGYAGYIDGGASQEEFYKFIKPILEKMDGTEELLVKLNREDLLRKQRTFDNGSIPHQIHLGELHAILRRQEDFYPFLKDNREKIEKILTFRIPYYVGPLARGNSRFAWMTRKSEETITPWNFEEVVDKGASAQSFIERMTNFDKNLPNEKVLPKHSLLYEYFTVYNELTKVKYVTEGMRKPAFLSGEQKKAIVDLLFKTNRKVTVKQLKEDYFKKIECFDSVEISGVEDRFNASLGTYHDLLKIIKDKDFLDNEENEDILEDIVLTLTLFEDREMIEERLKTYAHLFDDKVMKQLKRRRYTGWGRLSRKLINGIRDKQSGKTILDFLKSDGFANRNFMQLIHDDSLTFKEDIQKAQVSGQGDSLHEHIANLAGSPAIKKGILQTVKVVDELVKVMGRHKPENIVIEMARENQTTQKGQKNSRERMKRIEEGIKELGSQILKEHPVENTQLQNEKLYLYYLQNGRDMYVDQELDINRLSDYDVDHIVPQSFLKDDSIDNKVLTRSDKARGKSDNVPSEEVVKKMKNYWRQLLNAKLITQRKFDNLTKAERGGLSELDKAGFIKRQLVETRQITKHVAQILDSRMNTKYDENDKLIREVKVITLKSKLVSDFRKDFQFYKVREINNYHHAHDAYLNAVVGTALIKKYPKLESEFVYGDYKVYDVRKMIAKSEQEIGKATAKYFFYSNIMNFFKTEITLANGEIRKRPLIETNGETGEIVWDKGRDFATVRKVLSMPQVNIVKKTEVQTGGFSKESILPKRNSDKLIARKKDWDPKKYGGFDSPTVAYSVLVVAKVEKGKSKKLKSVKELLGITIMERSSFEKNPIDFLEAKGYKEVKKDLIIKLPKYSLFELENGRKRMLASAGELQKGNELALPSKYVNFLYLASHYEKLKGSPEDNEQKQLFVEQHKHYLDEIIEQISEFSKRVILADANLDKVLSAYNKHRDKPIREQAENIIHLFTLTNLGAPAAFKYFDTTIDRKRYTSTKEVLDATLIHQSITGLYETRIDLSQLGGDGGGSSGGSGGTLNIEDEYRLHETSKEPDVSLGSTWLSDFPQAWAETGGMGLAVRQAPLIIPLKATSTPVSIKQYPMSQEARLGIKPHIQRLLDQGILVPCQSPWNTPLLPVKKPGTNDYRPVQDLREVNKRVEDIHPTVPNPYNLLSGLPPSHQWYTVLDLKDAFFCLRLHPTSQPLFAFEWRDPEMGISGQLTWTRLPQGFKNSPTLFNEALHRDLADFRIQHPDLILLQYVDDLLLAATSELDCQQGTRALLQTLGNLGYRASAKKAQICQKQVKYLGYLLKEGQRWLTEARKETVMGQPTPKTPRQLREFLGKAGFCRLFIPGFAEMAAPLYPLTKPGTLFNWGPDQQKAYQEIKQALLTAPALGLPDLTKPFELFVDEKQGYAKGVLTQKLGPWRRPVAYLSKKLDPVAAGWPPCLRMVAAIAVLTKDAGKLTMGQPLVILAPHAVEALVKQPPDRWLSNARMTHYQALLLDTDRVQFGPVVALNPATLLPLPEEGLQHNCLDILAEAHGTRPDLTDQPLPDADHTWYTDGSSLLQEGQRKAGAAVTTETEVIWAKALPAGTSAQRAELIALTQALKMAEGKKLNVYTDSRYAFATAHIHGEIYRRRGWLTSEGKEIKNKDEILALLKALFLPKRLSIIHCPGHQKGHSAEARGNRMADQAARKAAITETPDTSTLLIENSSPSGGSKRTADGSEFEAGKRTADGSEFEKRTADGSEFESPKKKAKVE

SEQ ID NO: 2683 - protein, 2116 aa, synthetic construct
  source 1..2116: note = Description of Artificial Sequence: Synthetic polypeptide
MPAAKRVKLDGGDKKYSIGLDIGTNSVGWAVITDEYKVPSKKFKVLGNTDRHSIKKNLIGALLFDSGETAEATRLKRTARRRYTRRKNRICYLQEIFSNEMAKVDDSFFHRLEESFLVEEDKKHERHPIFGNIVDEVAYHEKYPTIYHLRKKLVDSTDKADLRLIYLALAHMIKFRGHFLIEGDLNPDNSDVDKLFIQLVQTYNQLFEENPINASGVDAKAILSARLSKSRRLENLIAQLPGEKKNGLFGNLIALSLGLTPNFKSNFDLAEDAKLQLSKDTYDDDLDNLLAQIGDQYADLFLAAKNLSDAILLSDILRVNTEITKAPLSASMIKRYDEHHQDLTLLKALVRQQLPEKYKEIFFDQSKNGYAGYIDGGASQEEFYKFIKPILEKMDGTEELLVKLNREDLLRKQRTFDNGSIPHQIHLGELHAILRRQEDFYPFLKDNREKIEKILTFRIPYYVGPLARGNSRFAWMTRKSEETITPWNFEEVVDKGASAQSFIERMTNFDKNLPNEKVLPKHSLLYEYFTVYNELTKVKYVTEGMRKPAFLSGEQKKAIVDLLFKTNRKVTVKQLKEDYFKKIECFDSVEISGVEDRFNASLGTYHDLLKIIKDKDFLDNEENEDILEDIVLTLTLFEDREMIEERLKTYAHLFDDKVMKQLKRRRYTGWGRLSRKLINGIRDKQSGKTILDFLKSDGFANRNFMQLIHDDSLTFKEDIQKAQVSGQGDSLHEHIANLAGSPAIKKGILQTVKVVDELVKVMGRHKPENIVIEMARENQTTQKGQKNSRERMKRIEEGIKELGSQILKEHPVENTQLQNEKLYLYYLQNGRDMYVDQELDINRLSDYDVDHIVPQSFLKDDSIDNKVLTRSDKARGKSDNVPSEEVVKKMKNYWRQLLNAKLITQRKFDNLTKAERGGLSELDKAGFIKRQLVETRQITKHVAQILDSRMNTKYDENDKLIREVKVITLKSKLVSDFRKDFQFYKVREINNYHHAHDAYLNAVVGTALIKKYPKLESEFVYGDYKVYDVRKMIAKSEQEIGKATAKYFFYSNIMNFFKTEITLANGEIRKRPLIETNGETGEIVWDKGRDFATVRKVLSMPQVNIVKKTEVQTGGFSKESILPKRNSDKLIARKKDWDPKKYGGFDSPTVAYSVLVVAKVEKGKSKKLKSVKELLGITIMERSSFEKNPIDFLEAKGYKEVKKDLIIKLPKYSLFELENGRKRMLASAGELQKGNELALPSKYVNFLYLASHYEKLKGSPEDNEQKQLFVEQHKHYLDEIIEQISEFSKRVILADANLDKVLSAYNKHRDKPIREQAENIIHLFTLTNLGAPAAFKYFDTTIDRKRYTSTKEVLDATLIHQSITGLYETRIDLSQLGGDGGEAAAKGSSGGSGGTLNIEDEYRLHETSKEPDVSLGSTWLSDFPQAWAETGGMGLAVRQAPLIIPLKATSTPVSIKQYPMSQEARLGIKPHIQRLLDQGILVPCQSPWNTPLLPVKKPGTNDYRPVQDLREVNKRVEDIHPTVPNPYNLLSGLPPSHQWYTVLDLKDAFFCLRLHPTSQPLFAFEWRDPEMGISGQLTWTRLPQGFKNSPTLFNEALHRDLADFRIQHPDLILLQYVDDLLLAATSELDCQQGTRALLQTLGNLGYRASAKKAQICQKQVKYLGYLLKEGQRWLTEARKETVMGQPTPKTPRQLREFLGKAGFCRLFIPGFAEMAAPLYPLTKPGTLFNWGPDQQKAYQEIKQALLTAPALGLPDLTKPFELFVDEKQGYAKGVLTQKLGPWRRPVAYLSKKLDPVAAGWPPCLRMVAAIAVLTKDAGKLTMGQPLVILAPHAVEALVKQPPDRWLSNARMTHYQALLLDTDRVQFGPVVALNPATLLPLPEEGLQHNCLDILAEAHGTRPDLTDQPLPDADHTWYTDGSSLLQEGQRKAGAAVTTETEVIWAKALPAGTSAQRAELIALTQALKMAEGKKLNVYTDSRYAFATAHIHGEIYRRRGWLTSEGKEIKNKDEILALLKALFLPKRLSIIHCPGHQKGHSAEARGNRMADQAARKAAITETPDTSTLLIENSSPSGGSKRTADGSEFEAGKRTADGSEFEKRTADGSEFESPKKKAKVE

SEQ ID NO: 2684 - protein, 2114 aa, synthetic construct
  source 1..2114: note = Description of Artificial Sequence: Synthetic polypeptide
MPAAKRVKLDGGDKKYSIGLDIGTNSVGWAVITDEYKVPSKKFKVLGNTDRHSIKKNLIGALLFDSGETAEATRLKRTARRRYTRRKNRICYLQEIFSNEMAKVDDSFFHRLEESFLVEEDKKHERHPIFGNIVDEVAYHEKYPTIYHLRKKLVDSTDKADLRLIYLALAHMIKFRGHFLIEGDLNPDNSDVDKLFIQLVQTYNQLFEENPINASGVDAKAILSARLSKSRRLENLIAQLPGEKKNGLFGNLIALSLGLTPNFKSNFDLAEDAKLQLSKDTYDDDLDNLLAQIGDQYADLFLAAKNLSDAILLSDILRVNTEITKAPLSASMIKRYDEHHQDLTLLKALVRQQLPEKYKEIFFDQSKNGYAGYIDGGASQEEFYKFIKPILEKMDGTEELLVKLNREDLLRKQRTFDNGSIPHQIHLGELHAILRRQEDFYPFLKDNREKIEKILTFRIPYYVGPLARGNSRFAWMTRKSEETITPWNFEEVVDKGASAQSFIERMTNFDKNLPNEKVLPKHSLLYEYFTVYNELTKVKYVTEGMRKPAFLSGEQKKAIVDLLFKTNRKVTVKQLKEDYFKKIECFDSVEISGVEDRFNASLGTYHDLLKIIKDKDFLDNEENEDILEDIVLTLTLFEDREMIEERLKTYAHLFDDKVMKQLKRRRYTGWGRLSRKLINGIRDKQSGKTILDFLKSDGFANRNFMQLIHDDSLTFKEDIQKAQVSGQGDSLHEHIANLAGSPAIKKGILQTVKVVDELVKVMGRHKPENIVIEMARENQTTQKGQKNSRERMKRIEEGIKELGSQILKEHPVENTQLQNEKLYLYYLQNGRDMYVDQELDINRLSDYDVDHIVPQSFLKDDSIDNKVLTRSDKARGKSDNVPSEEVVKKMKNYWRQLLNAKLITQRKFDNLTKAERGGLSELDKAGFIKRQLVETRQITKHVAQILDSRMNTKYDENDKLIREVKVITLKSKLVSDFRKDFQFYKVREINNYHHAHDAYLNAVVGTALIKKYPKLESEFVYGDYKVYDVRKMIAKSEQEIGKATAKYFFYSNIMNFFKTEITLANGEIRKRPLIETNGETGEIVWDKGRDFATVRKVLSMPQVNIVKKTEVQTGGFSKESILPKRNSDKLIARKKDWDPKKYGGFDSPTVAYSVLVVAKVEKGKSKKLKSVKELLGITIMERSSFEKNPIDFLEAKGYKEVKKDLIIKLPKYSLFELENGRKRMLASAGELQKGNELALPSKYVNFLYLASHYEKLKGSPEDNEQKQLFVEQHKHYLDEIIEQISEFSKRVILADANLDKVLSAYNKHRDKPIREQAENIIHLFTLTNLGAPAAFKYFDTTIDRKRYTSTKEVLDATLIHQSITGLYETRIDLSQLGGDGGGGSPAPGSSGGTLNIEDEYRLHETSKEPDVSLGSTWLSDFPQAWAETGGMGLAVRQAPLIIPLKATSTPVSIKQYPMSQEARLGIKPHIQRLLDQGILVPCQSPWNTPLLPVKKPGTNDYRPVQDLREVNKRVEDIHPTVPNPYNLLSGLPPSHQWYTVLDLKDAFFCLRLHPTSQPLFAFEWRDPEMGISGQLTWTRLPQGFKNSPTLFNEALHRDLADFRIQHPDLILLQYVDDLLLAATSELDCQQGTRALLQTLGNLGYRASAKKAQICQKQVKYLGYLLKEGQRWLTEARKETVMGQPTPKTPRQLREFLGKAGFCRLFIPGFAEMAAPLYPLTKPGTLFNWGPDQQKAYQEIKQALLTAPALGLPDLTKPFELFVDEKQGYAKGVLTQKLGPWRRPVAYLSKKLDPVAAGWPPCLRMVAAIAVLTKDAGKLTMGQPLVILAPHAVEALVKQPPDRWLSNARMTHYQALLLDTDRVQFGPVVALNPATLLPLPEEGLQHNCLDILAEAHGTRPDLTDQPLPDADHTWYTDGSSLLQEGQRKAGAAVTTETEVIWAKALPAGTSAQRAELIALTQALKMAEGKKLNVYTDSRYAFATAHIHGEIYRRRGWLTSEGKEIKNKDEILALLKALFLPKRLSIIHCPGHQKGHSAEARGNRMADQAARKAAITETPDTSTLLIENSSPSGGSKRTADGSEFEAGKRTADGSEFEKRTADGSEFESPKKKAKVE

SEQ ID NO: 2685 - protein, 2114 aa, synthetic construct
  source 1..2114: note = Description of Artificial Sequence: Synthetic polypeptide
MPAAKRVKLDGGDKKYSIGLDIGTNSVGWAVITDEYKVPSKKFKVLGNTDRHSIKKNLIGALLFDSGETAEATRLKRTARRRYTRRKNRICYLQEIFSNEMAKVDDSFFHRLEESFLVEEDKKHERHPIFGNIVDEVAYHEKYPTIYHLRKKLVDSTDKADLRLIYLALAHMIKFRGHFLIEGDLNPDNSDVDKLFIQLVQTYNQLFEENPINASGVDAKAILSARLSKSRRLENLIAQLPGEKKNGLFGNLIALSLGLTPNFKSNFDLAEDAKLQLSKDTYDDDLDNLLAQIGDQYADLFLAAKNLSDAILLSDILRVNTEITKAPLSASMIKRYDEHHQDLTLLKALVRQQLPEKYKEIFFDQSKNGYAGYIDGGASQEEFYKFIKPILEKMDGTEELLVKLNREDLLRKQRTFDNGSIPHQIHLGELHAILRRQEDFYPFLKDNREKIEKILTFRIPYYVGPLARGNSRFAWMTRKSEETITPWNFEEVVDKGASAQSFIERMTNFDKNLPNEKVLPKHSLLYEYFTVYNELTKVKYVTEGMRKPAFLSGEQKKAIVDLLFKTNRKVTVKQLKEDYFKKIECFDSVEISGVEDRFNASLGTYHDLLKIIKDKDFLDNEENEDILEDIVLTLTLFEDREMIEERLKTYAHLFDDKVMKQLKRRRYTGWGRLSRKLINGIRDKQSGKTILDFLKSDGFANRNFMQLIHDDSLTFKEDIQKAQVSGQGDSLHEHIANLAGSPAIKKGILQTVKVVDELVKVMGRHKPENIVIEMARENQTTQKGQKNSRERMKRIEEGIKELGSQILKEHPVENTQLQNEKLYLYYLQNGRDMYVDQELDINRLSDYDVDHIVPQSFLKDDSIDNKVLTRSDKARGKSDNVPSEEVVKKMKNYWRQLLNAKLITQRKFDNLTKAERGGLSELDKAGFIKRQLVETRQITKHVAQILDSRMNTKYDENDKLIREVKVITLKSKLVSDFRKDFQFYKVREINNYHHAHDAYLNAVVGTALIKKYPKLESEFVYGDYKVYDVRKMIAKSEQEIGKATAKYFFYSNIMNFFKTEITLANGEIRKRPLIETNGETGEIVWDKGRDFATVRKVLSMPQVNIVKKTEVQTGGFSKESILPKRNSDKLIARKKDWDPKKYGGFDSPTVAYSVLVVAKVEKGKSKKLKSVKELLGITIMERSSFEKNPIDFLEAKGYKEVKKDLIIKLPKYSLFELENGRKRMLASAGELQKGNELALPSKYVNFLYLASHYEKLKGSPEDNEQKQLFVEQHKHYLDEIIEQISEFSKRVILADANLDKVLSAYNKHRDKPIREQAENIIHLFTLTNLGAPAAFKYFDTTIDRKRYTSTKEVLDATLIHQSITGLYETRIDLSQLGGDGGPAPGSSGGSGGTLNIEDEYRLHETSKEPDVSLGSTWLSDFPQAWAETGGMGLAVRQAPLIIPLKATSTPVSIKQYPMSQEARLGIKPHIQRLLDQGILVPCQSPWNTPLLPVKKPGTNDYRPVQDLREVNKRVEDIHPTVPNPYNLLSGLPPSHQWYTVLDLKDAFFCLRLHPTSQPLFAFEWRDPEMGISGQLTWTRLPQGFKNSPTLFNEALHRDLADFRIQHPDLILLQYVDDLLLAATSELDCQQGTRALLQTLGNLGYRASAKKAQICQKQVKYLGYLLKEGQRWLTEARKETVMGQPTPKTPRQLREFLGKAGFCRLFIPGFAEMAAPLYPLTKPGTLFNWGPDQQKAYQEIKQALLTAPALGLPDLTKPFELFVDEKQGYAKGVLTQKLGPWRRPVAYLSKKLDPVAAGWPPCLRMVAAIAVLTKDAGKLTMGQPLVILAPHAVEALVKQPPDRWLSNARMTHYQALLLDTDRVQFGPVVALNPATLLPLPEEGLQHNCLDILAEAHGTRPDLTDQPLPDADHTWYTDGSSLLQEGQRKAGAAVTTETEVIWAKALPAGTSAQRAELIALTQALKMAEGKKLNVYTDSRYAFATAHIHGEIYRRRGWLTSEGKEIKNKDEILALLKALFLPKRLSIIHCPGHQKGHSAEARGNRMADQAARKAAITETPDTSTLLIENSSPSGGSKRTADGSEFEAGKRTADGSEFEKRTADGSEFESPKKKAKVE

SEQ ID NO: 2686 - protein, 2116 aa, synthetic construct
  source 1..2116: note = Description of Artificial Sequence: Synthetic polypeptide
MPAAKRVKLDGGDKKYSIGLDIGTNSVGWAVITDEYKVPSKKFKVLGNTDRHSIKKNLIGALLFDSGETAEATRLKRTARRRYTRRKNRICYLQEIFSNEMAKVDDSFFHRLEESFLVEEDKKHERHPIFGNIVDEVAYHEKYPTIYHLRKKLVDSTDKADLRLIYLALAHMIKFRGHFLIEGDLNPDNSDVDKLFIQLVQTYNQLFEENPINASGVDAKAILSARLSKSRRLENLIAQLPGEKKNGLFGNLIALSLGLTPNFKSNFDLAEDAKLQLSKDTYDDDLDNLLAQIGDQYADLFLAAKNLSDAILLSDILRVNTEITKAPLSASMIKRYDEHHQDLTLLKALVRQQLPEKYKEIFFDQSKNGYAGYIDGGASQEEFYKFIKPILEKMDGTEELLVKLNREDLLRKQRTFDNGSIPHQIHLGELHAILRRQEDFYPFLKDNREKIEKILTFRIPYYVGPLARGNSRFAWMTRKSEETITPWNFEEVVDKGASAQSFIERMTNFDKNLPNEKVLPKHSLLYEYFTVYNELTKVKYVTEGMRKPAFLSGEQKKAIVDLLFKTNRKVTVKQLKEDYFKKIECFDSVEISGVEDRFNASLGTYHDLLKIIKDKDFLDNEENEDILEDIVLTLTLFEDREMIEERLKTYAHLFDDKVMKQLKRRRYTGWGRLSRKLINGIRDKQSGKTILDFLKSDGFANRNFMQLIHDDSLTFKEDIQKAQVSGQGDSLHEHIANLAGSPAIKKGILQTVKVVDELVKVMGRHKPENIVIEMARENQTTQKGQKNSRERMKRIEEGIKELGSQILKEHPVENTQLQNEKLYLYYLQNGRDMYVDQELDINRLSDYDVDHIVPQSFLKDDSIDNKVLTRSDKARGKSDNVPSEEVVKKMKNYWRQLLNAKLITQRKFDNLTKAERGGLSELDKAGFIKRQLVETRQITKHVAQILDSRMNTKYDENDKLIREVKVITLKSKLVSDFRKDFQFYKVREINNYHHAHDAYLNAVVGTALIKKYPKLESEFVYGDYKVYDVRKMIAKSEQEIGKATAKYFFYSNIMNFFKTEITLANGEIRKRPLIETNGETGEIVWDKGRDFATVRKVLSMPQVNIVKKTEVQTGGFSKESILPKRNSDKLIARKKDWDPKKYGGFDSPTVAYSVLVVAKVEKGKSKKLKSVKELLGITIMERSSFEKNPIDFLEAKGYKEVKKDLIIKLPKYSLFELENGRKRMLASAGELQKGNELALPSKYVNFLYLASHYEKLKGSPEDNEQKQLFVEQHKHYLDEIIEQISEFSKRVILADANLDKVLSAYNKHRDKPIREQAENIIHLFTLTNLGAPAAFKYFDTTIDRKRYTSTKEVLDATLIHQSITGLYETRIDLSQLGGDGGEAAAKGSSGGGGGTLNIEDEYRLHETSKEPDVSLGSTWLSDFPQAWAETGGMGLAVRQAPLIIPLKATSTPVSIKQYPMSQEARLGIKPHIQRLLDQGILVPCQSPWNTPLLPVKKPGTNDYRPVQDLREVNKRVEDIHPTVPNPYNLLSGLPPSHQWYTVLDLKDAFFCLRLHPTSQPLFAFEWRDPEMGISGQLTWTRLPQGFKNSPTLFNEALHRDLADFRIQHPDLILLQYVDDLLLAATSELDCQQGTRALLQTLGNLGYRASAKKAQICQKQVKYLGYLLKEGQRWLTEARKETVMGQPTPKTPRQLREFLGKAGFCRLFIPGFAEMAAPLYPLTKPGTLFNWGPDQQKAYQEIKQALLTAPALGLPDLTKPFELFVDEKQGYAKGVLTQKLGPWRRPVAYLSKKLDPVAAGWPPCLRMVAAIAVLTKDAGKLTMGQPLVILAPHAVEALVKQPPDRWLSNARMTHYQALLLDTDRVQFGPVVALNPATLLPLPEEGLQHNCLDILAEAHGTRPDLTDQPLPDADHTWYTDGSSLLQEGQRKAGAAVTTETEVIWAKALPAGTSAQRAELIALTQALKMAEGKKLNVYTDSRYAFATAHIHGEIYRRRGWLTSEGKEIKNKDEILALLKALFLPKRLSIIHCPGHQKGHSAEARGNRMADQAARKAAITETPDTSTLLIENSSPSGGSKRTADGSEFEAGKRTADGSEFEKRTADGSEFESPKKKAKVE

SEQ ID NO: 2687 - protein, 2117 aa, synthetic construct
  source 1..2117: note = Description of Artificial Sequence: Synthetic polypeptide
MPAAKRVKLDGGDKKYSIGLDIGTNSVGWAVITDEYKVPSKKFKVLGNTDRHSIKKNLIGALLFDSGETAEATRLKRTARRRYTRRKNRICYLQEIFSNEMAKVDDSFFHRLEESFLVEEDKKHERHPIFGNIVDEVAYHEKYPTIYHLRKKLVDSTDKADLRLIYLALAHMIKFRGHFLIEGDLNPDNSDVDKLFIQLVQTYNQLFEENPINASGVDAKAILSARLSKSRRLENLIAQLPGEKKNGLFGNLIALSLGLTPNFKSNFDLAEDAKLQLSKDTYDDDLDNLLAQIGDQYADLFLAAKNLSDAILLSDILRVNTEITKAPLSASMIKRYDEHHQDLTLLKALVRQQLPEKYKEIFFDQSKNGYAGYIDGGASQEEFYKFIKPILEKMDGTEELLVKLNREDLLRKQRTFDNGSIPHQIHLGELHAILRRQEDFYPFLKDNREKIEKILTFRIPYYVGPLARGNSRFAWMTRKSEETITPWNFEEVVDKGASAQSFIERMTNFDKNLPNEKVLPKHSLLYEYFTVYNELTKVKYVTEGMRKPAFLSGEQKKAIVDLLFKTNRKVTVKQLKEDYFKKIECFDSVEISGVEDRFNASLGTYHDLLKIIKDKDFLDNEENEDILEDIVLTLTLFEDREMIEERLKTYAHLFDDKVMKQLKRRRYTGWGRLSRKLINGIRDKQSGKTILDFLKSDGFANRNFMQLIHDDSLTFKEDIQKAQVSGQGDSLHEHIANLAGSPAIKKGILQTVKVVDELVKVMGRHKPENIVIEMARENQTTQKGQKNSRERMKRIEEGIKELGSQILKEHPVENTQLQNEKLYLYYLQNGRDMYVDQELDINRLSDYDVDHIVPQSFLKDDSIDNKVLTRSDKARGKSDNVPSEEVVKKMKNYWRQLLNAKLITQRKFDNLTKAERGGLSELDKAGFIKRQLVETRQITKHVAQILDSRMNTKYDENDKLIREVKVITLKSKLVSDFRKDFQFYKVREINNYHHAHDAYLNAVVGTALIKKYPKLESEFVYGDYKVYDVRKMIAKSEQEIGKATAKYFFYSNIMNFFKTEITLANGEIRKRPLIETNGETGEIVWDKGRDFATVRKVLSMPQVNIVKKTEVQTGGFSKESILPKRNSDKLIARKKDWDPKKYGGFDSPTVAYSVLVVAKVEKGKSKKLKSVKELLGITIMERSSFEKNPIDFLEAKGYKEVKKDLIIKLPKYSLFELENGRKRMLASAGELQKGNELALPSKYVNFLYLASHYEKLKGSPEDNEQKQLFVEQHKHYLDEIIEQISEFSKRVILADANLDKVLSAYNKHRDKPIREQAENIIHLFTLTNLGAPAAFKYFDTTIDRKRYTSTKEVLDATLIHQSITGLYETRIDLSQLGGDGGGGSGGSGGSGGSGGTLNIEDEYRLHETSKEPDVSLGSTWLSDFPQAWAETGGMGLAVRQAPLIIPLKATSTPVSIKQYPMSQEARLGIKPHIQRLLDQGILVPCQSPWNTPLLPVKKPGTNDYRPVQDLREVNKRVEDIHPTVPNPYNLLSGLPPSHQWYTVLDLKDAFFCLRLHPTSQPLFAFEWRDPEMGISGQLTWTRLPQGFKNSPTLFNEALHRDLADFRIQHPDLILLQYVDDLLLAATSELDCQQGTRALLQTLGNLGYRASAKKAQICQKQVKYLGYLLKEGQRWLTEARKETVMGQPTPKTPRQLREFLGKAGFCRLFIPGFAEMAAPLYPLTKPGTLFNWGPDQQKAYQEIKQALLTAPALGLPDLTKPFELFVDEKQGYAKGVLTQKLGPWRRPVAYLSKKLDPVAAGWPPCLRMVAAIAVLTKDAGKLTMGQPLVILAPHAVEALVKQPPDRWLSNARMTHYQALLLDTDRVQFGPVVALNPATLLPLPEEGLQHNCLDILAEAHGTRPDLTDQPLPDADHTWYTDGSSLLQEGQRKAGAAVTTETEVIWAKALPAGTSAQRAELIALTQALKMAEGKKLNVYTDSRYAFATAHIHGEIYRRRGWLTSEGKEIKNKDEILALLKALFLPKRLSIIHCPGHQKGHSAEARGNRMADQAARKAAITETPDTSTLLIENSSPSGGSKRTADGSEFEAGKRTADGSEFEKRTADGSEFESPKKKAKVE

SEQ ID NO: 2688 - protein, 2116 aa, synthetic construct
  source 1..2116: note = Description of Artificial Sequence: Synthetic polypeptide
MPAAKRVKLDGGDKKYSIGLDIGTNSVGWAVITDEYKVPSKKFKVLGNTDRHSIKKNLIGALLFDSGETAEATRLKRTARRRYTRRKNRICYLQEIFSNEMAKVDDSFFHRLEESFLVEEDKKHERHPIFGNIVDEVAYHEKYPTIYHLRKKLVDSTDKADLRLIYLALAHMIKFRGHFLIEGDLNPDNSDVDKLFIQLVQTYNQLFEENPINASGVDAKAILSARLSKSRRLENLIAQLPGEKKNGLFGNLIALSLGLTPNFKSNFDLAEDAKLQLSKDTYDDDLDNLLAQIGDQYADLFLAAKNLSDAILLSDILRVNTEITKAPLSASMIKRYDEHHQDLTLLKALVRQQLPEKYKEIFFDQSKNGYAGYIDGGASQEEFYKFIKPILEKMDGTEELLVKLNREDLLRKQRTFDNGSIPHQIHLGELHAILRRQEDFYPFLKDNREKIEKILTFRIPYYVGPLARGNSRFAWMTRKSEETITPWNFEEVVDKGASAQSFIERMTNFDKNLPNEKVLPKHSLLYEYFTVYNELTKVKYVTEGMRKPAFLSGEQKKAIVDLLFKTNRKVTVKQLKEDYFKKIECFDSVEISGVEDRFNASLGTYHDLLKIIKDKDFLDNEENEDILEDIVLTLTLFEDREMIEERLKTYAHLFDDKVMKQLKRRRYTGWGRLSRKLINGIRDKQSGKTILDFLKSDGFANRNFMQLIHDDSLTFKEDIQKAQVSGQGDSLHEHIANLAGSPAIKKGILQTVKVVDELVKVMGRHKPENIVIEMARENQTTQKGQKNSRERMKRIEEGIKELGSQILKEHPVENTQLQNEKLYLYYLQNGRDMYVDQELDINRLSDYDVDHIVPQSFLKDDSIDNKVLTRSDKARGKSDNVPSEEVVKKMKNYWRQLLNAKLITQRKFDNLTKAERGGLSELDKAGFIKRQLVETRQITKHVAQILDSRMNTKYDENDKLIREVKVITLKSKLVSDFRKDFQFYKVREINNYHHAHDAYLNAVVGTALIKKYPKLESEFVYGDYKVYDVRKMIAKSEQEIGKATAKYFFYSNIMNFFKTEITLANGEIRKRPLIETNGETGEIVWDKGRDFATVRKVLSMPQVNIVKKTEVQTGGFSKESILPKRNSDKLIARKKDWDPKKYGGFDSPTVAYSVLVVAKVEKGKSKKLKSVKELLGITIMERSSFEKNPIDFLEAKGYKEVKKDLIIKLPKYSLFELENGRKRMLASAGELQKGNELALPSKYVNFLYLASHYEKLKGSPEDNEQKQLFVEQHKHYLDEIIEQISEFSKRVILADANLDKVLSAYNKHRDKPIREQAENIIHLFTLTNLGAPAAFKYFDTTIDRKRYTSTKEVLDATLIHQSITGLYETRIDLSQLGGDGGGGGGSSEAAAKGGTLNIEDEYRLHETSKEPDVSLGSTWLSDFPQAWAETGGMGLAVRQAPLIIPLKATSTPVSIKQYPMSQEARLGIKPHIQRLLDQGILVPCQSPWNTPLLPVKKPGTNDYRPVQDLREVNKRVEDIHPTVPNPYNLLSGLPPSHQWYTVLDLKDAFFCLRLHPTSQPLFAFEWRDPEMGISGQLTWTRLPQGFKNSPTLFNEALHRDLADFRIQHPDLILLQYVDDLLLAATSELDCQQGTRALLQTLGNLGYRASAKKAQICQKQVKYLGYLLKEGQRWLTEARKETVMGQPTPKTPRQLREFLGKAGFCRLFIPGFAEMAAPLYPLTKPGTLFNWGPDQQKAYQEIKQALLTAPALGLPDLTKPFELFVDEKQGYAKGVLTQKLGPWRRPVAYLSKKLDPVAAGWPPCLRMVAAIAVLTKDAGKLTMGQPLVILAPHAVEALVKQPPDRWLSNARMTHYQALLLDTDRVQFGPVVALNPATLLPLPEEGLQHNCLDILAEAHGTRPDLTDQPLPDADHTWYTDGSSLLQEGQRKAGAAVTTETEVIWAKALPAGTSAQRAELIALTQALKMAEGKKLNVYTDSRYAFATAHIHGEIYRRRGWLTSEGKEIKNKDEILALLKALFLPKRLSIIHCPGHQKGHSAEARGNRMADQAARKAAITETPDTSTLLIENSSPSGGSKRTADGSEFEAGKRTADGSEFEKRTADGSEFESPKKKAKVE

SEQ ID NO: 2689 - protein, 2114 aa, synthetic construct
  source 1..2114: note = Description of Artificial Sequence: Synthetic polypeptide
MPAAKRVKLDGGDKKYSIGLDIGTNSVGWAVITDEYKVPSKKFKVLGNTDRHSIKKNLIGALLFDSGETAEATRLKRTARRRYTRRKNRICYLQEIFSNEMAKVDDSFFHRLEESFLVEEDKKHERHPIFGNIVDEVAYHEKYPTIYHLRKKLVDSTDKADLRLIYLALAHMIKFRGHFLIEGDLNPDNSDVDKLFIQLVQTYNQLFEENPINASGVDAKAILSARLSKSRRLENLIAQLPGEKKNGLFGNLIALSLGLTPNFKSNFDLAEDAKLQLSKDTYDDDLDNLLAQIGDQYADLFLAAKNLSDAILLSDILRVNTEITKAPLSASMIKRYDEHHQDLTLLKALVRQQLPEKYKEIFFDQSKNGYAGYIDGGASQEEFYKFIKPILEKMDGTEELLVKLNREDLLRKQRTFDNGSIPHQIHLGELHAILRRQEDFYPFLKDNREKIEKILTFRIPYYVGPLARGNSRFAWMTRKSEETITPWNFEEVVDKGASAQSFIERMTNFDKNLPNEKVLPKHSLLYEYFTVYNELTKVKYVTEGMRKPAFLSGEQKKAIVDLLFKTNRKVTVKQLKEDYFKKIECFDSVEISGVEDRFNASLGTYHDLLKIIKDKDFLDNEENEDILEDIVLTLTLFEDREMIEERLKTYAHLFDDKVMKQLKRRRYTGWGRLSRKLINGIRDKQSGKTILDFLKSDGFANRNFMQLIHDDSLTFKEDIQKAQVSGQGDSLHEHIANLAGSPAIKKGILQTVKVVDELVKVMGRHKPENIVIEMARENQTTQKGQKNSRERMKRIEEGIKELGSQILKEHPVENTQLQNEKLYLYYLQNGRDMYVDQELDINRLSDYDVDHIVPQSFLKDDSIDNKVLTRSDKARGKSDNVPSEEVVKKMKNYWRQLLNAKLITQRKFDNLTKAERGGLSELDKAGFIKRQLVETRQITKHVAQILDSRMNTKYDENDKLIREVKVITLKSKLVSDFRKDFQFYKVREINNYHHAHDAYLNAVVGTALIKKYPKLESEFVYGDYKVYDVRKMIAKSEQEIGKATAKYFFYSNIMNFFKTEITLANGEIRKRPLIETNGETGEIVWDKGRDFATVRKVLSMPQVNIVKKTEVQTGGFSKESILPKRNSDKLIARKKDWDPKKYGGFDSPTVAYSVLVVAKVEKGKSKKLKSVKELLGITIMERSSFEKNPIDFLEAKGYKEVKKDLIIKLPKYSLFELENGRKRMLASAGELQKGNELALPSKYVNFLYLASHYEKLKGSPEDNEQKQLFVEQHKHYLDEIIEQISEFSKRVILADANLDKVLSAYNKHRDKPIREQAENIIHLFTLTNLGAPAAFKYFDTTIDRKRYTSTKEVLDATLIHQSITGLYETRIDLSQLGGDGGGSSPAPGGSGGTLNIEDEYRLHETSKEPDVSLGSTWLSDFPQAWAETGGMGLAVRQAPLIIPLKATSTPVSIKQYPMSQEARLGIKPHIQRLLDQGILVPCQSPWNTPLLPVKKPGTNDYRPVQDLREVNKRVEDIHPTVPNPYNLLSGLPPSHQWYTVLDLKDAFFCLRLHPTSQPLFAFEWRDPEMGISGQLTWTRLPQGFKNSPTLFNEALHRDLADFRIQHPDLILLQYVDDLLLAATSELDCQQGTRALLQTLGNLGYRASAKKAQICQKQVKYLGYLLKEGQRWLTEARKETVMGQPTPKTPRQLREFLGKAGFCRLFIPGFAEMAAPLYPLTKPGTLFNWGPDQQKAYQEIKQALLTAPALGLPDLTKPFELFVDEKQGYAKGVLTQKLGPWRRPVAYLSKKLDPVAAGWPPCLRMVAAIAVLTKDAGKLTMGQPLVILAPHAVEALVKQPPDRWLSNARMTHYQALLLDTDRVQFGPVVALNPATLLPLPEEGLQHNCLDILAEAHGTRPDLTDQPLPDADHTWYTDGSSLLQEGQRKAGAAVTTETEVIWAKALPAGTSAQRAELIALTQALKMAEGKKLNVYTDSRYAFATAHIHGEIYRRRGWLTSEGKEIKNKDEILALLKALFLPKRLSIIHCPGHQKGHSAEARGNRMADQAARKAAITETPDTSTLLIENSSPSGGSKRTADGSEFEAGKRTADGSEFEKRTADGSEFESPKKKAKVE

SEQ ID NO: 2690 - protein, 2116 aa, synthetic construct
  source 1..2116: note = Description of Artificial Sequence: Synthetic polypeptide
MPAAKRVKLDGGDKKYSIGLDIGTNSVGWAVITDEYKVPSKKFKVLGNTDRHSIKKNLIGALLFDSGETAEATRLKRTARRRYTRRKNRICYLQEIFSNEMAKVDDSFFHRLEESFLVEEDKKHERHPIFGNIVDEVAYHEKYPTIYHLRKKLVDSTDKADLRLIYLALAHMIKFRGHFLIEGDLNPDNSDVDKLFIQLVQTYNQLFEENPINASGVDAKAILSARLSKSRRLENLIAQLPGEKKNGLFGNLIALSLGLTPNFKSNFDLAEDAKLQLSKDTYDDDLDNLLAQIGDQYADLFLAAKNLSDAILLSDILRVNTEITKAPLSASMIKRYDEHHQDLTLLKALVRQQLPEKYKEIFFDQSKNGYAGYIDGGASQEEFYKFIKPILEKMDGTEELLVKLNREDLLRKQRTFDNGSIPHQIHLGELHAILRRQEDFYPFLKDNREKIEKILTFRIPYYVGPLARGNSRFAWMTRKSEETITPWNFEEVVDKGASAQSFIERMTNFDKNLPNEKVLPKHSLLYEYFTVYNELTKVKYVTEGMRKPAFLSGEQKKAIVDLLFKTNRKVTVKQLKEDYFKKIECFDSVEISGVEDRFNASLGTYHDLLKIIKDKDFLDNEENEDILEDIVLTLTLFEDREMIEERLKTYAHLFDDKVMKQLKRRRYTGWGRLSRKLINGIRDKQSGKTILDFLKSDGFANRNFMQLIHDDSLTFKEDIQKAQVSGQGDSLHEHIANLAGSPAIKKGILQTVKVVDELVKVMGRHKPENIVIEMARENQTTQKGQKNSRERMKRIEEGIKELGSQILKEHPVENTQLQNEKLYLYYLQNGRDMYVDQELDINRLSDYDVDHIVPQSFLKDDSIDNKVLTRSDKARGKSDNVPSEEVVKKMKNYWRQLLNAKLITQRKFDNLTKAERGGLSELDKAGFIKRQLVETRQITKHVAQILDSRMNTKYDENDKLIREVKVITLKSKLVSDFRKDFQFYKVREINNYHHAHDAYLNAVVGTALIKKYPKLESEFVYGDYKVYDVRKMIAKSEQEIGKATAKYFFYSNIMNFFKTEITLANGEIRKRPLIETNGETGEIVWDKGRDFATVRKVLSMPQVNIVKKTEVQTGGFSKESILPKRNSDKLIARKKDWDPKKYGGFDSPTVAYSVLVVAKVEKGKSKKLKSVKELLGITIMERSSFEKNPIDFLEAKGYKEVKKDLIIKLPKYSLFELENGRKRMLASAGELQKGNELALPSKYVNFLYLASHYEKLKGSPEDNEQKQLFVEQHKHYLDEIIEQISEFSKRVILADANLDKVLSAYNKHRDKPIREQAENIIHLFTLTNLGAPAAFKYFDTTIDRKRYTSTKEVLDATLIHQSITGLYETRIDLSQLGGDGGGGSEAAAKPAPGGTLNIEDEYRLHETSKEPDVSLGSTWLSDFPQAWAETGGMGLAVRQAPLIIPLKATSTPVSIKQYPMSQEARLGIKPHIQRLLDQGILVPCQSPWNTPLLPVKKPGTNDYRPVQDLREVNKRVEDIHPTVPNPYNLLSGLPPSHQWYTVLDLKDAFFCLRLHPTSQPLFAFEWRDPEMGISGQLTWTRLPQGFKNSPTLFNEALHRDLADFRIQHPDLILLQYVDDLLLAATSELDCQQGTRALLQTLGNLGYRASAKKAQICQKQVKYLGYLLKEGQRWLTEARKETVMGQPTPKTPRQLREFLGKAGFCRLFIPGFAEMAAPLYPLTKPGTLFNWGPDQQKAYQEIKQALLTAPALGLPDLTKPFELFVDEKQGYAKGVLTQKLGPWRRPVAYLSKKLDPVAAGWPPCLRMVAAIAVLTKDAGKLTMGQPLVILAPHAVEALVKQPPDRWLSNARMTHYQALLLDTDRVQFGPVVALNPATLLPLPEEGLQHNCLDILAEAHGTRPDLTDQPLPDADHTWYTDGSSLLQEGQRKAGAAVTTETEVIWAKALPAGTSAQRAELIALTQALKMAEGKKLNVYTDSRYAFATAHIHGEIYRRRGWLTSEGKEIKNKDEILALLKALFLPKRLSIIHCPGHQKGHSAEARGNRMADQAARKAAITETPDTSTLLIENSSPSGGSKRTADGSEFEAGKRTADGSEFEKRTADGSEFESPKKKAKVE

SEQ ID NO: 2691 - protein, 2110 aa, synthetic construct
  source 1..2110: note = Description of Artificial Sequence: Synthetic polypeptide
MPAAKRVKLDGGDKKYSIGLDIGTNSVGWAVITDEYKVPSKKFKVLGNTDRHSIKKNLIGALLFDSGETAEATRLKRTARRRYTRRKNRICYLQEIFSNEMAKVDDSFFHRLEESFLVEEDKKHERHPIFGNIVDEVAYHEKYPTIYHLRKKLVDSTDKADLRLIYLALAHMIKFRGHFLIEGDLNPDNSDVDKLFIQLVQTYNQLFEENPINASGVDAKAILSARLSKSRRLENLIAQLPGEKKNGLFGNLIALSLGLTPNFKSNFDLAEDAKLQLSKDTYDDDLDNLLAQIGDQYADLFLAAKNLSDAILLSDILRVNTEITKAPLSASMIKRYDEHHQDLTLLKALVRQQLPEKYKEIFFDQSKNGYAGYIDGGASQEEFYKFIKPILEKMDGTEELLVKLNREDLLRKQRTFDNGSIPHQIHLGELHAILRRQEDFYPFLKDNREKIEKILTFRIPYYVGPLARGNSRFAWMTRKSEETITPWNFEEVVDKGASAQSFIERMTNFDKNLPNEKVLPKHSLLYEYFTVYNELTKVKYVTEGMRKPAFLSGEQKKAIVDLLFKTNRKVTVKQLKEDYFKKIECFDSVEISGVEDRFNASLGTYHDLLKIIKDKDFLDNEENEDILEDIVLTLTLFEDREMIEERLKTYAHLFDDKVMKQLKRRRYTGWGRLSRKLINGIRDKQSGKTILDFLKSDGFANRNFMQLIHDDSLTFKEDIQKAQVSGQGDSLHEHIANLAGSPAIKKGILQTVKVVDELVKVMGRHKPENIVIEMARENQTTQKGQKNSRERMKRIEEGIKELGSQILKEHPVENTQLQNEKLYLYYLQNGRDMYVDQELDINRLSDYDVDHIVPQSFLKDDSIDNKVLTRSDKARGKSDNVPSEEVVKKMKNYWRQLLNAKLITQRKFDNLTKAERGGLSELDKAGFIKRQLVETRQITKHVAQILDSRMNTKYDENDKLIREVKVITLKSKLVSDFRKDFQFYKVREINNYHHAHDAYLNAVVGTALIKKYPKLESEFVYGDYKVYDVRKMIAKSEQEIGKATAKYFFYSNIMNFFKTEITLANGEIRKRPLIETNGETGEIVWDKGRDFATVRKVLSMPQVNIVKKTEVQTGGFSKESILPKRNSDKLIARKKDWDPKKYGGFDSPTVAYSVLVVAKVEKGKSKKLKSVKELLGITIMERSSFEKNPIDFLEAKGYKEVKKDLIIKLPKYSLFELENGRKRMLASAGELQKGNELALPSKYVNFLYLASHYEKLKGSPEDNEQKQLFVEQHKHYLDEIIEQISEFSKRVILADANLDKVLSAYNKHRDKPIREQAENIIHLFTLTNLGAPAAFKYFDTTIDRKRYTSTKEVLDATLIHQSITGLYETRIDLSQLGGDGGGGGGSGGTLNIEDEYRLHETSKEPDVSLGSTWLSDFPQAWAETGGMGLAVRQAPLIIPLKATSTPVSIKQYPMSQEARLGIKPHIQRLLDQGILVPCQSPWNTPLLPVKKPGTNDYRPVQDLREVNKRVEDIHPTVPNPYNLLSGLPPSHQWYTVLDLKDAFFCLRLHPTSQPLFAFEWRDPEMGISGQLTWTRLPQGFKNSPTLFNEALHRDLADFRIQHPDLILLQYVDDLLLAATSELDCQQGTRALLQTLGNLGYRASAKKAQICQKQVKYLGYLLKEGQRWLTEARKETVMGQPTPKTPRQLREFLGKAGFCRLFIPGFAEMAAPLYPLTKPGTLFNWGPDQQKAYQEIKQALLTAPALGLPDLTKPFELFVDEKQGYAKGVLTQKLGPWRRPVAYLSKKLDPVAAGWPPCLRMVAAIAVLTKDAGKLTMGQPLVILAPHAVEALVKQPPDRWLSNARMTHYQALLLDTDRVQFGPVVALNPATLLPLPEEGLQHNCLDILAEAHGTRPDLTDQPLPDADHTWYTDGSSLLQEGQRKAGAAVTTETEVIWAKALPAGTSAQRAELIALTQALKMAEGKKLNVYTDSRYAFATAHIHGEIYRRRGWLTSEGKEIKNKDEILALLKALFLPKRLSIIHCPGHQKGHSAEARGNRMADQAARKAAITETPDTSTLLIENSSPSGGSKRTADGSEFEAGKRTADGSEFEKRTADGSEFESPKKKAKVE

SEQ ID NO: 2692 - protein, 2116 aa, synthetic construct
  source 1..2116: note = Description of Artificial Sequence: Synthetic polypeptide
MPAAKRVKLDGGDKKYSIGLDIGTNSVGWAVITDEYKVPSKKFKVLGNTDRHSIKKNLIGALLFDSGETAEATRLKRTARRRYTRRKNRICYLQEIFSNEMAKVDDSFFHRLEESFLVEEDKKHERHPIFGNIVDEVAYHEKYPTIYHLRKKLVDSTDKADLRLIYLALAHMIKFRGHFLIEGDLNPDNSDVDKLFIQLVQTYNQLFEENPINASGVDAKAILSARLSKSRRLENLIAQLPGEKKNGLFGNLIALSLGLTPNFKSNFDLAEDAKLQLSKDTYDDDLDNLLAQIGDQYADLFLAAKNLSDAILLSDILRVNTEITKAPLSASMIKRYDEHHQDLTLLKALVRQQLPEKYKEIFFDQSKNGYAGYIDGGASQEEFYKFIKPILEKMDGTEELLVKLNREDLLRKQRTFDNGSIPHQIHLGELHAILRRQEDFYPFLKDNREKIEKILTFRIPYYVGPLARGNSRFAWMTRKSEETITPWNFEEVVDKGASAQSFIERMTNFDKNLPNEKVLPKHSLLYEYFTVYNELTKVKYVTEGMRKPAFLSGEQKKAIVDLLFKTNRKVTVKQLKEDYFKKIECFDSVEISGVEDRFNASLGTYHDLLKIIKDKDFLDNEENEDILEDIVLTLTLFEDREMIEERLKTYAHLFDDKVMKQLKRRRYTGWGRLSRKLINGIRDKQSGKTILDFLKSDGFANRNFMQLIHDDSLTFKEDIQKAQVSGQGDSLHEHIANLAGSPAIKKGILQTVKVVDELVKVMGRHKPENIVIEMARENQTTQKGQKNSRERMKRIEEGIKELGSQILKEHPVENTQLQNEKLYLYYLQNGRDMYVDQELDINRLSDYDVDHIVPQSFLKDDSIDNKVLTRSDKARGKSDNVPSEEVVKKMKNYWRQLLNAKLITQRKFDNLTKAERGGLSELDKAGFIKRQLVETRQITKHVAQILDSRMNTKYDENDKLIREVKVITLKSKLVSDFRKDFQFYKVREINNYHHAHDAYLNAVVGTALIKKYPKLESEFVYGDYKVYDVRKMIAKSEQEIGKATAKYFFYSNIMNFFKTEITLANGEIRKRPLIETNGETGEIVWDKGRDFATVRKVLSMPQVNIVKKTEVQTGGFSKESILPKRNSDKLIARKKDWDPKKYGGFDSPTVAYSVLVVAKVEKGKSKKLKSVKELLGITIMERSSFEKNPIDFLEAKGYKEVKKDLIIKLPKYSLFELENGRKRMLASAGELQKGNELALPSKYVNFLYLASHYEKLKGSPEDNEQKQLFVEQHKHYLDEIIEQISEFSKRVILADANLDKVLSAYNKHRDKPIREQAENIIHLFTLTNLGAPAAFKYFDTTIDRKRYTSTKEVLDATLIHQSITGLYETRIDLSQLGGDGGGGSGGGEAAAKGGTLNIEDEYRLHETSKEPDVSLGSTWLSDFPQAWAETGGMGLAVRQAPLIIPLKATSTPVSIKQYPMSQEARLGIKPHIQRLLDQGILVPCQSPWNTPLLPVKKPGTNDYRPVQDLREVNKRVEDIHPTVPNPYNLLSGLPPSHQWYTVLDLKDAFFCLRLHPTSQPLFAFEWRDPEMGISGQLTWTRLPQGFKNSPTLFNEALHRDLADFRIQHPDLILLQYVDDLLLAATSELDCQQGTRALLQTLGNLGYRASAKKAQICQKQVKYLGYLLKEGQRWLTEARKETVMGQPTPKTPRQLREFLGKAGFCRLFIPGFAEMAAPLYPLTKPGTLFNWGPDQQKAYQEIKQALLTAPALGLPDLTKPFELFVDEKQGYAKGVLTQKLGPWRRPVAYLSKKLDPVAAGWPPCLRMVAAIAVLTKDAGKLTMGQPLVILAPHAVEALVKQPPDRWLSNARMTHYQALLLDTDRVQFGPVVALNPATLLPLPEEGLQHNCLDILAEAHGTRPDLTDQPLPDADHTWYTDGSSLLQEGQRKAGAAVTTETEVIWAKALPAGTSAQRAELIALTQALKMAEGKKLNVYTDSRYAFATAHIHGEIYRRRGWLTSEGKEIKNKDEILALLKALFLPKRLSIIHCPGHQKGHSAEARGNRMADQAARKAAITETPDTSTLLIENSSPSGGSKRTADGSEFEAGKRTADGSEFEKRTADGSEFESPKKKAKVE

SEQ ID NO: 2693 - protein, 2111 aa, synthetic construct
  source 1..2111: note = Description of Artificial Sequence: Synthetic polypeptide
MPAAKRVKLDGGDKKYSIGLDIGTNSVGWAVITDEYKVPSKKFKVLGNTDRHSIKKNLIGALLFDSGETAEATRLKRTARRRYTRRKNRICYLQEIFSNEMAKVDDSFFHRLEESFLVEEDKKHERHPIFGNIVDEVAYHEKYPTIYHLRKKLVDSTDKADLRLIYLALAHMIKFRGHFLIEGDLNPDNSDVDKLFIQLVQTYNQLFEENPINASGVDAKAILSARLSKSRRLENLIAQLPGEKKNGLFGNLIALSLGLTPNFKSNFDLAEDAKLQLSKDTYDDDLDNLLAQIGDQYADLFLAAKNLSDAILLSDILRVNTEITKAPLSASMIKRYDEHHQDLTLLKALVRQQLPEKYKEIFFDQSKNGYAGYIDGGASQEEFYKFIKPILEKMDGTEELLVKLNREDLLRKQRTFDNGSIPHQIHLGELHAILRRQEDFYPFLKDNREKIEKILTFRIPYYVGPLARGNSRFAWMTRKSEETITPWNFEEVVDKGASAQSFIERMTNFDKNLPNEKVLPKHSLLYEYFTVYNELTKVKYVTEGMRKPAFLSGEQKKAIVDLLFKTNRKVTVKQLKEDYFKKIECFDSVEISGVEDRFNASLGTYHDLLKIIKDKDFLDNEENEDILEDIVLTLTLFEDREMIEERLKTYAHLFDDKVMKQLKRRRYTGWGRLSRKLINGIRDKQSGKTILDFLKSDGFANRNFMQLIHDDSLTFKEDIQKAQVSGQGDSLHEHIANLAGSPAIKKGILQTVKVVDELVKVMGRHKPENIVIEMARENQTTQKGQKNSRERMKRIEEGIKELGSQILKEHPVENTQLQNEKLYLYYLQNGRDMYVDQELDINRLSDYDVDHIVPQSFLKDDSIDNKVLTRSDKARGKSDNVPSEEVVKKMKNYWRQLLNAKLITQRKFDNLTKAERGGLSELDKAGFIKRQLVETRQITKHVAQILDSRMNTKYDENDKLIREVKVITLKSKLVSDFRKDFQFYKVREINNYHHAHDAYLNAVVGTALIKKYPKLESEFVYGDYKVYDVRKMIAKSEQEIGKATAKYFFYSNIMNFFKTEITLANGEIRKRPLIETNGETGEIVWDKGRDFATVRKVLSMPQVNIVKKTEVQTGGFSKESILPKRNSDKLIARKKDWDPKKYGGFDSPTVAYSVLVVAKVEKGKSKKLKSVKELLGITIMERSSFEKNPIDFLEAKGYKEVKKDLIIKLPKYSLFELENGRKRMLASAGELQKGNELALPSKYVNFLYLASHYEKLKGSPEDNEQKQLFVEQHKHYLDEIIEQISEFSKRVILADANLDKVLSAYNKHRDKPIREQAENIIHLFTLTNLGAPAAFKYFDTTIDRKRYTSTKEVLDATLIHQSITGLYETRIDLSQLGGDGGGGSGGSGGTLNIEDEYRLHETSKEPDVSLGSTWLSDFPQAWAETGGMGLAVRQAPLIIPLKATSTPVSIKQYPMSQEARLGIKPHIQRLLDQGILVPCQSPWNTPLLPVKKPGTNDYRPVQDLREVNKRVEDIHPTVPNPYNLLSGLPPSHQWYTVLDLKDAFFCLRLHPTSQPLFAFEWRDPEMGISGQLTWTRLPQGFKNSPTLFNEALHRDLADFRIQHPDLILLQYVDDLLLAATSELDCQQGTRALLQTLGNLGYRASAKKAQICQKQVKYLGYLLKEGQRWLTEARKETVMGQPTPKTPRQLREFLGKAGFCRLFIPGFAEMAAPLYPLTKPGTLFNWGPDQQKAYQEIKQALLTAPALGLPDLTKPFELFVDEKQGYAKGVLTQKLGPWRRPVAYLSKKLDPVAAGWPPCLRMVAAIAVLTKDAGKLTMGQPLVILAPHAVEALVKQPPDRWLSNARMTHYQALLLDTDRVQFGPVVALNPATLLPLPEEGLQHNCLDILAEAHGTRPDLTDQPLPDADHTWYTDGSSLLQEGQRKAGAAVTTETEVIWAKALPAGTSAQRAELIALTQALKMAEGKKLNVYTDSRYAFATAHIHGEIYRRRGWLTSEGKEIKNKDEILALLKALFLPKRLSIIHCPGHQKGHSAEARGNRMADQAARKAAITETPDTSTLLIENSSPSGGSKRTADGSEFEAGKRTADGSEFEKRTADGSEFESPKKKAKVE

SEQ ID NO: 2694 - protein, 2114 aa, synthetic construct
  source 1..2114: note = Description of Artificial Sequence: Synthetic polypeptide
MPAAKRVKLDGGDKKYSIGLDIGTNSVGWAVITDEYKVPSKKFKVLGNTDRHSIKKNLIGALLFDSGETAEATRLKRTARRRYTRRKNRICYLQEIFSNEMAKVDDSFFHRLEESFLVEEDKKHERHPIFGNIVDEVAYHEKYPTIYHLRKKLVDSTDKADLRLIYLALAHMIKFRGHFLIEGDLNPDNSDVDKLFIQLVQTYNQLFEENPINASGVDAKAILSARLSKSRRLENLIAQLPGEKKNGLFGNLIALSLGLTPNFKSNFDLAEDAKLQLSKDTYDDDLDNLLAQIGDQYADLFLAAKNLSDAILLSDILRVNTEITKAPLSASMIKRYDEHHQDLTLLKALVRQQLPEKYKEIFFDQSKNGYAGYIDGGASQEEFYKFIKPILEKMDGTEELLVKLNREDLLRKQRTFDNGSIPHQIHLGELHAILRRQEDFYPFLKDNREKIEKILTFRIPYYVGPLARGNSRFAWMTRKSEETITPWNFEEVVDKGASAQSFIERMTNFDKNLPNEKVLPKHSLLYEYFTVYNELTKVKYVTEGMRKPAFLSGEQKKAIVDLLFKTNRKVTVKQLKEDYFKKIECFDSVEISGVEDRFNASLGTYHDLLKIIKDKDFLDNEENEDILEDIVLTLTLFEDREMIEERLKTYAHLFDDKVMKQLKRRRYTGWGRLSRKLINGIRDKQSGKTILDFLKSDGFANRNFMQLIHDDSLTFKEDIQKAQVSGQGDSLHEHIANLAGSPAIKKGILQTVKVVDELVKVMGRHKPENIVIEMARENQTTQKGQKNSRERMKRIEEGIKELGSQILKEHPVENTQLQNEKLYLYYLQNGRDMYVDQELDINRLSDYDVDHIVPQSFLKDDSIDNKVLTRSDKARGKSDNVPSEEVVKKMKNYWRQLLNAKLITQRKFDNLTKAERGGLSELDKAGFIKRQLVETRQITKHVAQILDSRMNTKYDENDKLIREVKVITLKSKLVSDFRKDFQFYKVREINNYHHAHDAYLNAVVGTALIKKYPKLESEFVYGDYKVYDVRKMIAKSEQEIGKATAKYFFYSNIMNFFKTEITLANGEIRKRPLIETNGETGEIVWDKGRDFATVRKVLSMPQVNIVKKTEVQTGGFSKESILPKRNSDKLIARKKDWDPKKYGGFDSPTVAYSVLVVAKVEKGKSKKLKSVKELLGITIMERSSFEKNPIDFLEAKGYKEVKKDLIIKLPKYSLFELENGRKRMLASAGELQKGNELALPSKYVNFLYLASHYEKLKGSPEDNEQKQLFVEQHKHYLDEIIEQISEFSKRVILADANLDKVLSAYNKHRDKPIREQAENIIHLFTLTNLGAPAAFKYFDTTIDRKRYTSTKEVLDATLIHQSITGLYETRIDLSQLGGDGGGSSGGSGGGGGTLNIEDEYRLHETSKEPDVSLGSTWLSDFPQAWAETGGMGLAVRQAPLIIPLKATSTPVSIKQYPMSQEARLGIKPHIQRLLDQGILVPCQSPWNTPLLPVKKPGTNDYRPVQDLREVNKRVEDIHPTVPNPYNLLSGLPPSHQWYTVLDLKDAFFCLRLHPTSQPLFAFEWRDPEMGISGQLTWTRLPQGFKNSPTLFNEALHRDLADFRIQHPDLILLQYVDDLLLAATSELDCQQGTRALLQTLGNLGYRASAKKAQICQKQVKYLGYLLKEGQRWLTEARKETVMGQPTPKTPRQLREFLGKAGFCRLFIPGFAEMAAPLYPLTKPGTLFNWGPDQQKAYQEIKQALLTAPALGLPDLTKPFELFVDEKQGYAKGVLTQKLGPWRRPVAYLSKKLDPVAAGWPPCLRMVAAIAVLTKDAGKLTMGQPLVILAPHAVEALVKQPPDRWLSNARMTHYQALLLDTDRVQFGPVVALNPATLLPLPEEGLQHNCLDILAEAHGTRPDLTDQPLPDADHTWYTDGSSLLQEGQRKAGAAVTTETEVIWAKALPAGTSAQRAELIALTQALKMAEGKKLNVYTDSRYAFATAHIHGEIYRRRGWLTSEGKEIKNKDEILALLKALFLPKRLSIIHCPGHQKGHSAEARGNRMADQAARKAAITETPDTSTLLIENSSPSGGSKRTADGSEFEAGKRTADGSEFEKRTADGSEFESPKKKAKVE

SEQ ID NO: 2695 - protein, 2116 aa, synthetic construct
  source 1..2116: note = Description of Artificial Sequence: Synthetic polypeptide
MPAAKRVKLDGGDKKYSIGLDIGTNSVGWAVITDEYKVPSKKFKVLGNTDRHSIKKNLIGALLFDSGETAEATRLKRTARRRYTRRKNRICYLQEIFSNEMAKVDDSFFHRLEESFLVEEDKKHERHPIFGNIVDEVAYHEKYPTIYHLRKKLVDSTDKADLRLIYLALAHMIKFRGHFLIEGDLNPDNSDVDKLFIQLVQTYNQLFEENPINASGVDAKAILSARLSKSRRLENLIAQLPGEKKNGLFGNLIALSLGLTPNFKSNFDLAEDAKLQLSKDTYDDDLDNLLAQIGDQYADLFLAAKNLSDAILLSDILRVNTEITKAPLSASMIKRYDEHHQDLTLLKALVRQQLPEKYKEIFFDQSKNGYAGYIDGGASQEEFYKFIKPILEKMDGTEELLVKLNREDLLRKQRTFDNGSIPHQIHLGELHAILRRQEDFYPFLKDNREKIEKILTFRIPYYVGPLARGNSRFAWMTRKSEETITPWNFEEVVDKGASAQSFIERMTNFDKNLPNEKVLPKHSLLYEYFTVYNELTKVKYVTEGMRKPAFLSGEQKKAIVDLLFKTNRKVTVKQLKEDYFKKIECFDSVEISGVEDRFNASLGTYHDLLKIIKDKDFLDNEENEDILEDIVLTLTLFEDREMIEERLKTYAHLFDDKVMKQLKRRRYTGWGRLSRKLINGIRDKQSGKTILDFLKSDGFANRNFMQLIHDDSLTFKEDIQKAQVSGQGDSLHEHIANLAGSPAIKKGILQTVKVVDELVKVMGRHKPENIVIEMARENQTTQKGQKNSRERMKRIEEGIKELGSQILKEHPVENTQLQNEKLYLYYLQNGRDMYVDQELDINRLSDYDVDHIVPQSFLKDDSIDNKVLTRSDKARGKSDNVPSEEVVKKMKNYWRQLLNAKLITQRKFDNLTKAERGGLSELDKAGFIKRQLVETRQITKHVAQILDSRMNTKYDENDKLIREVKVITLKSKLVSDFRKDFQFYKVREINNYHHAHDAYLNAVVGTALIKKYPKLESEFVYGDYKVYDVRKMIAKSEQEIGKATAKYFFYSNIMNFFKTEITLANGEIRKRPLIETNGETGEIVWDKGRDFATVRKVLSMPQVNIVKKTEVQTGGFSKESILPKRNSDKLIARKKDWDPKKYGGFDSPTVAYSVLVVAKVEKGKSKKLKSVKELLGITIMERSSFEKNPIDFLEAKGYKEVKKDLIIKLPKYSLFELENGRKRMLASAGELQKGNELALPSKYVNFLYLASHYEKLKGSPEDNEQKQLFVEQHKHYLDEIIEQISEFSKRVILADANLDKVLSAYNKHRDKPIREQAENIIHLFTLTNLGAPAAFKYFDTTIDRKRYTSTKEVLDATLIHQSITGLYETRIDLSQLGGDGGEAAAKGGGGSSGGTLNIEDEYRLHETSKEPDVSLGSTWLSDFPQAWAETGGMGLAVRQAPLIIPLKATSTPVSIKQYPMSQEARLGIKPHIQRLLDQGILVPCQSPWNTPLLPVKKPGTNDYRPVQDLREVNKRVEDIHPTVPNPYNLLSGLPPSHQWYTVLDLKDAFFCLRLHPTSQPLFAFEWRDPEMGISGQLTWTRLPQGFKNSPTLFNEALHRDLADFRIQHPDLILLQYVDDLLLAATSELDCQQGTRALLQTLGNLGYRASAKKAQICQKQVKYLGYLLKEGQRWLTEARKETVMGQPTPKTPRQLREFLGKAGFCRLFIPGFAEMAAPLYPLTKPGTLFNWGPDQQKAYQEIKQALLTAPALGLPDLTKPFELFVDEKQGYAKGVLTQKLGPWRRPVAYLSKKLDPVAAGWPPCLRMVAAIAVLTKDAGKLTMGQPLVILAPHAVEALVKQPPDRWLSNARMTHYQALLLDTDRVQFGPVVALNPATLLPLPEEGLQHNCLDILAEAHGTRPDLTDQPLPDADHTWYTDGSSLLQEGQRKAGAAVTTETEVIWAKALPAGTSAQRAELIALTQALKMAEGKKLNVYTDSRYAFATAHIHGEIYRRRGWLTSEGKEIKNKDEILALLKALFLPKRLSIIHCPGHQKGHSAEARGNRMADQAARKAAITETPDTSTLLIENSSPSGGSKRTADGSEFEAGKRTADGSEFEKRTADGSEFESPKKKAKVE

SEQ ID NO: 2696 - protein, 2117 aa, synthetic construct
  source 1..2117: note = Description of Artificial Sequence: Synthetic polypeptide
MPAAKRVKLDGGDKKYSIGLDIGTNSVGWAVITDEYKVPSKKFKVLGNTDRHSIKKNLIGALLFDSGETAEATRLKRTARRRYTRRKNRICYLQEIFSNEMAKVDDSFFHRLEESFLVEEDKKHERHPIFGNIVDEVAYHEKYPTIYHLRKKLVDSTDKADLRLIYLALAHMIKFRGHFLIEGDLNPDNSDVDKLFIQLVQTYNQLFEENPINASGVDAKAILSARLSKSRRLENLIAQLPGEKKNGLFGNLIALSLGLTPNFKSNFDLAEDAKLQLSKDTYDDDLDNLLAQIGDQYADLFLAAKNLSDAILLSDILRVNTEITKAPLSASMIKRYDEHHQDLTLLKALVRQQLPEKYKEIFFDQSKNGYAGYIDGGASQEEFYKFIKPILEKMDGTEELLVKLNREDLLRKQRTFDNGSIPHQIHLGELHAILRRQEDFYPFLKDNREKIEKILTFRIPYYVGPLARGNSRFAWMTRKSEETITPWNFEEVVDKGASAQSFIERMTNFDKNLPNEKVLPKHSLLYEYFTVYNELTKVKYVTEGMRKPAFLSGEQKKAIVDLLFKTNRKVTVKQLKEDYFKKIECFDSVEISGVEDRFNASLGTYHDLLKIIKDKDFLDNEENEDILEDIVLTLTLFEDREMIEERLKTYAHLFDDKVMKQLKRRRYTGWGRLSRKLINGIRDKQSGKTILDFLKSDGFANRNFMQLIHDDSLTFKEDIQKAQVSGQGDSLHEHIANLAGSPAIKKGILQTVKVVDELVKVMGRHKPENIVIEMARENQTTQKGQKNSRERMKRIEEGIKELGSQILKEHPVENTQLQNEKLYLYYLQNGRDMYVDQELDINRLSDYDVDHIVPQSFLKDDSIDNKVLTRSDKARGKSDNVPSEEVVKKMKNYWRQLLNAKLITQRKFDNLTKAERGGLSELDKAGFIKRQLVETRQITKHVAQILDSRMNTKYDENDKLIREVKVITLKSKLVSDFRKDFQFYKVREINNYHHAHDAYLNAVVGTALIKKYPKLESEFVYGDYKVYDVRKMIAKSEQEIGKATAKYFFYSNIMNFFKTEITLANGEIRKRPLIETNGETGEIVWDKGRDFATVRKVLSMPQVNIVKKTEVQTGGFSKESILPKRNSDKLIARKKDWDPKKYGGFDSPTVAYSVLVVAKVEKGKSKKLKSVKELLGITIMERSSFEKNPIDFLEAKGYKEVKKDLIIKLPKYSLFELENGRKRMLASAGELQKGNELALPSKYVNFLYLASHYEKLKGSPEDNEQKQLFVEQHKHYLDEIIEQISEFSKRVILADANLDKVLSAYNKHRDKPIREQAENIIHLFTLTNLGAPAAFKYFDTTIDRKRYTSTKEVLDATLIHQSITGLYETRIDLSQLGGDGGGSAGSAAGSGEFGGTLNIEDEYRLHETSKEPDVSLGSTWLSDFPQAWAETGGMGLAVRQAPLIIPLKATSTPVSIKQYPMSQEARLGIKPHIQRLLDQGILVPCQSPWNTPLLPVKKPGTNDYRPVQDLREVNKRVEDIHPTVPNPYNLLSGLPPSHQWYTVLDLKDAFFCLRLHPTSQPLFAFEWRDPEMGISGQLTWTRLPQGFKNSPTLFNEALHRDLADFRIQHPDLILLQYVDDLLLAATSELDCQQGTRALLQTLGNLGYRASAKKAQICQKQVKYLGYLLKEGQRWLTEARKETVMGQPTPKTPRQLREFLGKAGFCRLFIPGFAEMAAPLYPLTKPGTLFNWGPDQQKAYQEIKQALLTAPALGLPDLTKPFELFVDEKQGYAKGVLTQKLGPWRRPVAYLSKKLDPVAAGWPPCLRMVAAIAVLTKDAGKLTMGQPLVILAPHAVEALVKQPPDRWLSNARMTHYQALLLDTDRVQFGPVVALNPATLLPLPEEGLQHNCLDILAEAHGTRPDLTDQPLPDADHTWYTDGSSLLQEGQRKAGAAVTTETEVIWAKALPAGTSAQRAELIALTQALKMAEGKKLNVYTDSRYAFATAHIHGEIYRRRGWLTSEGKEIKNKDEILALLKALFLPKRLSIIHCPGHQKGHSAEARGNRMADQAARKAAITETPDTSTLLIENSSPSGGSKRTADGSEFEAGKRTADGSEFEKRTADGSEFESPKKKAKVE

SEQ ID NO: 2697 - protein, 2114 aa, synthetic construct
  source 1..2114: note = Description of Artificial Sequence: Synthetic polypeptide
MPAAKRVKLDGGDKKYSIGLDIGTNSVGWAVITDEYKVPSKKFKVLGNTDRHSIKKNLIGALLFDSGETAEATRLKRTARRRYTRRKNRICYLQEIFSNEMAKVDDSFFHRLEESFLVEEDKKHERHPIFGNIVDEVAYHEKYPTIYHLRKKLVDSTDKADLRLIYLALAHMIKFRGHFLIEGDLNPDNSDVDKLFIQLVQTYNQLFEENPINASGVDAKAILSARLSKSRRLENLIAQLPGEKKNGLFGNLIALSLGLTPNFKSNFDLAEDAKLQLSKDTYDDDLDNLLAQIGDQYADLFLAAKNLSDAILLSDILRVNTEITKAPLSASMIKRYDEHHQDLTLLKALVRQQLPEKYKEIFFDQSKNGYAGYIDGGASQEEFYKFIKPILEKMDGTEELLVKLNREDLLRKQRTFDNGSIPHQIHLGELHAILRRQEDFYPFLKDNREKIEKILTFRIPYYVGPLARGNSRFAWMTRKSEETITPWNFEEVVDKGASAQSFIERMTNFDKNLPNEKVLPKHSLLYEYFTVYNELTKVKYVTEGMRKPAFLSGEQKKAIVDLLFKTNRKVTVKQLKEDYFKKIECFDSVEISGVEDRFNASLGTYHDLLKIIKDKDFLDNEENEDILEDIVLTLTLFEDREMIEERLKTYAHLFDDKVMKQLKRRRYTGWGRLSRKLINGIRDKQSGKTILDFLKSDGFANRNFMQLIHDDSLTFKEDIQKAQVSGQGDSLHEHIANLAGSPAIKKGILQTVKVVDELVKVMGRHKPENIVIEMARENQTTQKGQKNSRERMKRIEEGIKELGSQILKEHPVENTQLQNEKLYLYYLQNGRDMYVDQELDINRLSDYDVDHIVPQSFLKDDSIDNKVLTRSDKARGKSDNVPSEEVVKKMKNYWRQLLNAKLITQRKFDNLTKAERGGLSELDKAGFIKRQLVETRQITKHVAQILDSRMNTKYDENDKLIREVKVITLKSKLVSDFRKDFQFYKVREINNYHHAHDAYLNAVVGTALIKKYPKLESEFVYGDYKVYDVRKMIAKSEQEIGKATAKYFFYSNIMNFFKTEITLANGEIRKRPLIETNGETGEIVWDKGRDFATVRKVLSMPQVNIVKKTEVQTGGFSKESILPKRNSDKLIARKKDWDPKKYGGFDSPTVAYSVLVVAKVEKGKSKKLKSVKELLGITIMERSSFEKNPIDFLEAKGYKEVKKDLIIKLPKYSLFELENGRKRMLASAGELQKGNELALPSKYVNFLYLASHYEKLKGSPEDNEQKQLFVEQHKHYLDEIIEQISEFSKRVILADANLDKVLSAYNKHRDKPIREQAENIIHLFTLTNLGAPAAFKYFDTTIDRKRYTSTKEVLDATLIHQSITGLYETRIDLSQLGGDGGGGSGGSGGSGGTLNIEDEYRLHETSKEPDVSLGSTWLSDFPQAWAETGGMGLAVRQAPLIIPLKATSTPVSIKQYPMSQEARLGIKPHIQRLLDQGILVPCQSPWNTPLLPVKKPGTNDYRPVQDLREVNKRVEDIHPTVPNPYNLLSGLPPSHQWYTVLDLKDAFFCLRLHPTSQPLFAFEWRDPEMGISGQLTWTRLPQGFKNSPTLFNEALHRDLADFRIQHPDLILLQYVDDLLLAATSELDCQQGTRALLQTLGNLGYRASAKKAQICQKQVKYLGYLLKEGQRWLTEARKETVMGQPTPKTPRQLREFLGKAGFCRLFIPGFAEMAAPLYPLTKPGTLFNWGPDQQKAYQEIKQALLTAPALGLPDLTKPFELFVDEKQGYAKGVLTQKLGPWRRPVAYLSKKLDPVAAGWPPCLRMVAAIAVLTKDAGKLTMGQPLVILAPHAVEALVKQPPDRWLSNARMTHYQALLLDTDRVQFGPVVALNPATLLPLPEEGLQHNCLDILAEAHGTRPDLTDQPLPDADHTWYTDGSSLLQEGQRKAGAAVTTETEVIWAKALPAGTSAQRAELIALTQALKMAEGKKLNVYTDSRYAFATAHIHGEIYRRRGWLTSEGKEIKNKDEILALLKALFLPKRLSIIHCPGHQKGHSAEARGNRMADQAARKAAITETPDTSTLLIENSSPSGGSKRTADGSEFEAGKRTADGSEFEKRTADGSEFESPKKKAKVE

SEQ ID NO: 2698 - protein, 2114 aa, synthetic construct
  source 1..2114: note = Description of Artificial Sequence: Synthetic polypeptide
MPAAKRVKLDGGDKKYSIGLDIGTNSVGWAVITDEYKVPSKKFKVLGNTDRHSIKKNLIGALLFDSGETAEATRLKRTARRRYTRRKNRICYLQEIFSNEMAKVDDSFFHRLEESFLVEEDKKHERHPIFGNIVDEVAYHEKYPTIYHLRKKLVDSTDKADLRLIYLALAHMIKFRGHFLIEGDLNPDNSDVDKLFIQLVQTYNQLFEENPINASGVDAKAILSARLSKSRRLENLIAQLPGEKKNGLFGNLIALSLGLTPNFKSNFDLAEDAKLQLSKDTYDDDLDNLLAQIGDQYADLFLAAKNLSDAILLSDILRVNTEITKAPLSASMIKRYDEHHQDLTLLKALVRQQLPEKYKEIFFDQSKNGYAGYIDGGASQEEFYKFIKPILEKMDGTEELLVKLNREDLLRKQRTFDNGSIPHQIHLGELHAILRRQEDFYPFLKDNREKIEKILTFRIPYYVGPLARGNSRFAWMTRKSEETITPWNFEEVVDKGASAQSFIERMTNFDKNLPNEKVLPKHSLLYEYFTVYNELTKVKYVTEGMRKPAFLSGEQKKAIVDLLFKTNRKVTVKQLKEDYFKKIECFDSVEISGVEDRFNASLGTYHDLLKIIKDKDFLDNEENEDILEDIVLTLTLFEDREMIEERLKTYAHLFDDKVMKQLKRRRYTGWGRLSRKLINGIRDKQSGKTILDFLKSDGFANRNFMQLIHDDSLTFKEDIQKAQVSGQGDSLHEHIANLAGSPAIKKGILQTVKVVDELVKVMGRHKPENIVIEMARENQTTQKGQKNSRERMKRIEEGIKELGSQILKEHPVENTQLQNEKLYLYYLQNGRDMYVDQELDINRLSDYDVDHIVPQSFLKDDSIDNKVLTRSDKARGKSDNVPSEEVVKKMKNYWRQLLNAKLITQRKFDNLTKAERGGLSELDKAGFIKRQLVETRQITKHVAQILDSRMNTKYDENDKLIREVKVITLKSKLVSDFRKDFQFYKVREINNYHHAHDAYLNAVVGTALIKKYPKLESEFVYGDYKVYDVRKMIAKSEQEIGKATAKYFFYSNIMNFFKTEITLANGEIRKRPLIETNGETGEIVWDKGRDFATVRKVLSMPQVNIVKKTEVQTGGFSKESILPKRNSDKLIARKKDWDPKKYGGFDSPTVAYSVLVVAKVEKGKSKKLKSVKELLGITIMERSSFEKNPIDFLEAKGYKEVKKDLIIKLPKYSLFELENGRKRMLASAGELQKGNELALPSKYVNFLYLASHYEKLKGSPEDNEQKQLFVEQHKHYLDEIIEQISEFSKRVILADANLDKVLSAYNKHRDKPIREQAENIIHLFTLTNLGAPAAFKYFDTTIDRKRYTSTKEVLDATLIHQSITGLYETRIDLSQLGGDGGGGGPAPGSSGGTLNIEDEYRLHETSKEPDVSLGSTWLSDFPQAWAETGGMGLAVRQAPLIIPLKATSTPVSIKQYPMSQEARLGIKPHIQRLLDQGILVPCQSPWNTPLLPVKKPGTNDYRPVQDLREVNKRVEDIHPTVPNPYNLLSGLPPSHQWYTVLDLKDAFFCLRLHPTSQPLFAFEWRDPEMGISGQLTWTRLPQGFKNSPTLFNEALHRDLADFRIQHPDLILLQYVDDLLLAATSELDCQQGTRALLQTLGNLGYRASAKKAQICQKQVKYLGYLLKEGQRWLTEARKETVMGQPTPKTPRQLREFLGKAGFCRLFIPGFAEMAAPLYPLTKPGTLFNWGPDQQKAYQEIKQALLTAPALGLPDLTKPFELFVDEKQGYAKGVLTQKLGPWRRPVAYLSKKLDPVAAGWPPCLRMVAAIAVLTKDAGKLTMGQPLVILAPHAVEALVKQPPDRWLSNARMTHYQALLLDTDRVQFGPVVALNPATLLPLPEEGLQHNCLDILAEAHGTRPDLTDQPLPDADHTWYTDGSSLLQEGQRKAGAAVTTETEVIWAKALPAGTSAQRAELIALTQALKMAEGKKLNVYTDSRYAFATAHIHGEIYRRRGWLTSEGKEIKNKDEILALLKALFLPKRLSIIHCPGHQKGHSAEARGNRMADQAARKAAITETPDTSTLLIENSSPSGGSKRTADGSEFEAGKRTADGSEFEKRTADGSEFESPKKKAKVE

SEQ ID NO: 2699 - protein, 2114 aa, synthetic construct
  source 1..2114: note = Description of Artificial Sequence: Synthetic polypeptide
MPAAKRVKLDGGDKKYSIGLDIGTNSVGWAVITDEYKVPSKKFKVLGNTDRHSIKKNLIGALLFDSGETAEATRLKRTARRRYTRRKNRICYLQEIFSNEMAKVDDSFFHRLEESFLVEEDKKHERHPIFGNIVDEVAYHEKYPTIYHLRKKLVDSTDKADLRLIYLALAHMIKFRGHFLIEGDLNPDNSDVDKLFIQLVQTYNQLFEENPINASGVDAKAILSARLSKSRRLENLIAQLPGEKKNGLFGNLIALSLGLTPNFKSNFDLAEDAKLQLSKDTYDDDLDNLLAQIGDQYADLFLAAKNLSDAILLSDILRVNTEITKAPLSASMIKRYDEHHQDLTLLKALVRQQLPEKYKEIFFDQSKNGYAGYIDGGASQEEFYKFIKPILEKMDGTEELLVKLNREDLLRKQRTFDNGSIPHQIHLGELHAILRRQEDFYPFLKDNREKIEKILTFRIPYYVGPLARGNSRFAWMTRKSEETITPWNFEEVVDKGASAQSFIERMTNFDKNLPNEKVLPKHSLLYEYFTVYNELTKVKYVTEGMRKPAFLSGEQKKAIVDLLFKTNRKVTVKQLKEDYFKKIECFDSVEISGVEDRFNASLGTYHDLLKIIKDKDFLDNEENEDILEDIVLTLTLFEDREMIEERLKTYAHLFDDKVMKQLKRRRYTGWGRLSRKLINGIRDKQSGKTILDFLKSDGFANRNFMQLIHDDSLTFKEDIQKAQVSGQGDSLHEHIANLAGSPAIKKGILQTVKVVDELVKVMGRHKPENIVIEMARENQTTQKGQKNSRERMKRIEEGIKELGSQILKEHPVENTQLQNEKLYLYYLQNGRDMYVDQELDINRLSDYDVDHIVPQSFLKDDSIDNKVLTRSDKARGKSDNVPSEEVVKKMKNYWRQLLNAKLITQRKFDNLTKAERGGLSELDKAGFIKRQLVETRQITKHVAQILDSRMNTKYDENDKLIREVKVITLKSKLVSDFRKDFQFYKVREINNYHHAHDAYLNAVVGTALIKKYPKLESEFVYGDYKVYDVRKMIAKSEQEIGKATAKYFFYSNIMNFFKTEITLANGEIRKRPLIETNGETGEIVWDKGRDFATVRKVLSMPQVNIVKKTEVQTGGFSKESILPKRNSDKLIARKKDWDPKKYGGFDSPTVAYSVLVVAKVEKGKSKKLKSVKELLGITIMERSSFEKNPIDFLEAKGYKEVKKDLIIKLPKYSLFELENGRKRMLASAGELQKGNELALPSKYVNFLYLASHYEKLKGSPEDNEQKQLFVEQHKHYLDEIIEQISEFSKRVILADANLDKVLSAYNKHRDKPIREQAENIIHLFTLTNLGAPAAFKYFDTTIDRKRYTSTKEVLDATLIHQSITGLYETRIDLSQLGGDGGGSSGGSPAPGGTLNIEDEYRLHETSKEPDVSLGSTWLSDFPQAWAETGGMGLAVRQAPLIIPLKATSTPVSIKQYPMSQEARLGIKPHIQRLLDQGILVPCQSPWNTPLLPVKKPGTNDYRPVQDLREVNKRVEDIHPTVPNPYNLLSGLPPSHQWYTVLDLKDAFFCLRLHPTSQPLFAFEWRDPEMGISGQLTWTRLPQGFKNSPTLFNEALHRDLADFRIQHPDLILLQYVDDLLLAATSELDCQQGTRALLQTLGNLGYRASAKKAQICQKQVKYLGYLLKEGQRWLTEARKETVMGQPTPKTPRQLREFLGKAGFCRLFIPGFAEMAAPLYPLTKPGTLFNWGPDQQKAYQEIKQALLTAPALGLPDLTKPFELFVDEKQGYAKGVLTQKLGPWRRPVAYLSKKLDPVAAGWPPCLRMVAAIAVLTKDAGKLTMGQPLVILAPHAVEALVKQPPDRWLSNARMTHYQALLLDTDRVQFGPVVALNPATLLPLPEEGLQHNCLDILAEAHGTRPDLTDQPLPDADHTWYTDGSSLLQEGQRKAGAAVTTETEVIWAKALPAGTSAQRAELIALTQALKMAEGKKLNVYTDSRYAFATAHIHGEIYRRRGWLTSEGKEIKNKDEILALLKALFLPKRLSIIHCPGHQKGHSAEARGNRMADQAARKAAITETPDTSTLLIENSSPSGGSKRTADGSEFEAGKRTADGSEFEKRTADGSEFESPKKKAKVE

SEQ ID NO: 2700 - protein, 2113 aa, synthetic construct
  source 1..2113: note = Description of Artificial Sequence: Synthetic polypeptide
MPAAKRVKLDGGDKKYSIGLDIGTNSVGWAVITDEYKVPSKKFKVLGNTDRHSIKKNLIGALLFDSGETAEATRLKRTARRRYTRRKNRICYLQEIFSNEMAKVDDSFFHRLEESFLVEEDKKHERHPIFGNIVDEVAYHEKYPTIYHLRKKLVDSTDKADLRLIYLALAHMIKFRGHFLIEGDLNPDNSDVDKLFIQLVQTYNQLFEENPINASGVDAKAILSARLSKSRRLENLIAQLPGEKKNGLFGNLIALSLGLTPNFKSNFDLAEDAKLQLSKDTYDDDLDNLLAQIGDQYADLFLAAKNLSDAILLSDILRVNTEITKAPLSASMIKRYDEHHQDLTLLKALVRQQLPEKYKEIFFDQSKNGYAGYIDGGASQEEFYKFIKPILEKMDGTEELLVKLNREDLLRKQRTFDNGSIPHQIHLGELHAILRRQEDFYPFLKDNREKIEKILTFRIPYYVGPLARGNSRFAWMTRKSEETITPWNFEEVVDKGASAQSFIERMTNFDKNLPNEKVLPKHSLLYEYFTVYNELTKVKYVTEGMRKPAFLSGEQKKAIVDLLFKTNRKVTVKQLKEDYFKKIECFDSVEISGVEDRFNASLGTYHDLLKIIKDKDFLDNEENEDILEDIVLTLTLFEDREMIEERLKTYAHLFDDKVMKQLKRRRYTGWGRLSRKLINGIRDKQSGKTILDFLKSDGFANRNFMQLIHDDSLTFKEDIQKAQVSGQGDSLHEHIANLAGSPAIKKGILQTVKVVDELVKVMGRHKPENIVIEMARENQTTQKGQKNSRERMKRIEEGIKELGSQILKEHPVENTQLQNEKLYLYYLQNGRDMYVDQELDINRLSDYDVDHIVPQSFLKDDSIDNKVLTRSDKARGKSDNVPSEEVVKKMKNYWRQLLNAKLITQRKFDNLTKAERGGLSELDKAGFIKRQLVETRQITKHVAQILDSRMNTKYDENDKLIREVKVITLKSKLVSDFRKDFQFYKVREINNYHHAHDAYLNAVVGTALIKKYPKLESEFVYGDYKVYDVRKMIAKSEQEIGKATAKYFFYSNIMNFFKTEITLANGEIRKRPLIETNGETGEIVWDKGRDFATVRKVLSMPQVNIVKKTEVQTGGFSKESILPKRNSDKLIARKKDWDPKKYGGFDSPTVAYSVLVVAKVEKGKSKKLKSVKELLGITIMERSSFEKNPIDFLEAKGYKEVKKDLIIKLPKYSLFELENGRKRMLASAGELQKGNELALPSKYVNFLYLASHYEKLKGSPEDNEQKQLFVEQHKHYLDEIIEQISEFSKRVILADANLDKVLSAYNKHRDKPIREQAENIIHLFTLTNLGAPAAFKYFDTTIDRKRYTSTKEVLDATLIHQSITGLYETRIDLSQLGGDGGGGSEAAAKGGTLNIEDEYRLHETSKEPDVSLGSTWLSDFPQAWAETGGMGLAVRQAPLIIPLKATSTPVSIKQYPMSQEARLGIKPHIQRLLDQGILVPCQSPWNTPLLPVKKPGTNDYRPVQDLREVNKRVEDIHPTVPNPYNLLSGLPPSHQWYTVLDLKDAFFCLRLHPTSQPLFAFEWRDPEMGISGQLTWTRLPQGFKNSPTLFNEALHRDLADFRIQHPDLILLQYVDDLLLAATSELDCQQGTRALLQTLGNLGYRASAKKAQICQKQVKYLGYLLKEGQRWLTEARKETVMGQPTPKTPRQLREFLGKAGFCRLFIPGFAEMAAPLYPLTKPGTLFNWGPDQQKAYQEIKQALLTAPALGLPDLTKPFELFVDEKQGYAKGVLTQKLGPWRRPVAYLSKKLDPVAAGWPPCLRMVAAIAVLTKDAGKLTMGQPLVILAPHAVEALVKQPPDRWLSNARMTHYQALLLDTDRVQFGPVVALNPATLLPLPEEGLQHNCLDILAEAHGTRPDLTDQPLPDADHTWYTDGSSLLQEGQRKAGAAVTTETEVIWAKALPAGTSAQRAELIALTQALKMAEGKKLNVYTDSRYAFATAHIHGEIYRRRGWLTSEGKEIKNKDEILALLKALFLPKRLSIIHCPGHQKGHSAEARGNRMADQAARKAAITETPDTSTLLIENSSPSGGSKRTADGSEFEAGKRTADGSEFEKRTADGSEFESPKKKAKVE

SEQ ID NO: 2701 - protein, 2116 aa, synthetic construct
  source 1..2116: note = Description of Artificial Sequence: Synthetic polypeptide
MPAAKRVKLDGGDKKYSIGLDIGTNSVGWAVITDEYKVPSKKFKVLGNTDRHSIKKNLIGALLFDSGETAEATRLKRTARRRYTRRKNRICYLQEIFSNEMAKVDDSFFHRLEESFLVEEDKKHERHPIFGNIVDEVAYHEKYPTIYHLRKKLVDSTDKADLRLIYLALAHMIKFRGHFLIEGDLNPDNSDVDKLFIQLVQTYNQLFEENPINASGVDAKAILSARLSKSRRLENLIAQLPGEKKNGLFGNLIALSLGLTPNFKSNFDLAEDAKLQLSKDTYDDDLDNLLAQIGDQYADLFLAAKNLSDAILLSDILRVNTEITKAPLSASMIKRYDEHHQDLTLLKALVRQQLPEKYKEIFFDQSKNGYAGYIDGGASQEEFYKFIKPILEKMDGTEELLVKLNREDLLRKQRTFDNGSIPHQIHLGELHAILRRQEDFYPFLKDNREKIEKILTFRIPYYVGPLARGNSRFAWMTRKSEETITPWNFEEVVDKGASAQSFIERMTNFDKNLPNEKVLPKHSLLYEYFTVYNELTKVKYVTEGMRKPAFLSGEQKKAIVDLLFKTNRKVTVKQLKEDYFKKIECFDSVEISGVEDRFNASLGTYHDLLKIIKDKDFLDNEENEDILEDIVLTLTLFEDREMIEERLKTYAHLFDDKVMKQLKRRRYTGWGRLSRKLINGIRDKQSGKTILDFLKSDGFANRNFMQLIHDDSLTFKEDIQKAQVSGQGDSLHEHIANLAGSPAIKKGILQTVKVVDELVKVMGRHKPENIVIEMARENQTTQKGQKNSRERMKRIEEGIKELGSQILKEHPVENTQLQNEKLYLYYLQNGRDMYVDQELDINRLSDYDVDHIVPQSFLKDDSIDNKVLTRSDKARGKSDNVPSEEVVKKMKNYWRQLLNAKLITQRKFDNLTKAERGGLSELDKAGFIKRQLVETRQITKHVAQILDSRMNTKYDENDKLIREVKVITLKSKLVSDFRKDFQFYKVREINNYHHAHDAYLNAVVGTALIKKYPKLESEFVYGDYKVYDVRKMIAKSEQEIGKATAKYFFYSNIMNFFKTEITLANGEIRKRPLIETNGETGEIVWDKGRDFATVRKVLSMPQVNIVKKTEVQTGGFSKESILPKRNSDKLIARKKDWDPKKYGGFDSPTVAYSVLVVAKVEKGKSKKLKSVKELLGITIMERSSFEKNPIDFLEAKGYKEVKKDLIIKLPKYSLFELENGRKRMLASAGELQKGNELALPSKYVNFLYLASHYEKLKGSPEDNEQKQLFVEQHKHYLDEIIEQISEFSKRVILADANLDKVLSAYNKHRDKPIREQAENIIHLFTLTNLGAPAAFKYFDTTIDRKRYTSTKEVLDATLIHQSITGLYETRIDLSQLGGDGGGGSPAPEAAAKGGTLNIEDEYRLHETSKEPDVSLGSTWLSDFPQAWAETGGMGLAVRQAPLIIPLKATSTPVSIKQYPMSQEARLGIKPHIQRLLDQGILVPCQSPWNTPLLPVKKPGTNDYRPVQDLREVNKRVEDIHPTVPNPYNLLSGLPPSHQWYTVLDLKDAFFCLRLHPTSQPLFAFEWRDPEMGISGQLTWTRLPQGFKNSPTLFNEALHRDLADFRIQHPDLILLQYVDDLLLAATSELDCQQGTRALLQTLGNLGYRASAKKAQICQKQVKYLGYLLKEGQRWLTEARKETVMGQPTPKTPRQLREFLGKAGFCRLFIPGFAEMAAPLYPLTKPGTLFNWGPDQQKAYQEIKQALLTAPALGLPDLTKPFELFVDEKQGYAKGVLTQKLGPWRRPVAYLSKKLDPVAAGWPPCLRMVAAIAVLTKDAGKLTMGQPLVILAPHAVEALVKQPPDRWLSNARMTHYQALLLDTDRVQFGPVVALNPATLLPLPEEGLQHNCLDILAEAHGTRPDLTDQPLPDADHTWYTDGSSLLQEGQRKAGAAVTTETEVIWAKALPAGTSAQRAELIALTQALKMAEGKKLNVYTDSRYAFATAHIHGEIYRRRGWLTSEGKEIKNKDEILALLKALFLPKRLSIIHCPGHQKGHSAEARGNRMADQAARKAAITETPDTSTLLIENSSPSGGSKRTADGSEFEAGKRTADGSEFEKRTADGSEFESPKKKAKVE

SEQ ID NO: 2702 - protein, 2114 aa, synthetic construct
  source 1..2114: note = Description of Artificial Sequence: Synthetic polypeptide
MPAAKRVKLDGGDKKYSIGLDIGTNSVGWAVITDEYKVPSKKFKVLGNTDRHSIKKNLIGALLFDSGETAEATRLKRTARRRYTRRKNRICYLQEIFSNEMAKVDDSFFHRLEESFLVEEDKKHERHPIFGNIVDEVAYHEKYPTIYHLRKKLVDSTDKADLRLIYLALAHMIKFRGHFLIEGDLNPDNSDVDKLFIQLVQTYNQLFEENPINASGVDAKAILSARLSKSRRLENLIAQLPGEKKNGLFGNLIALSLGLTPNFKSNFDLAEDAKLQLSKDTYDDDLDNLLAQIGDQYADLFLAAKNLSDAILLSDILRVNTEITKAPLSASMIKRYDEHHQDLTLLKALVRQQLPEKYKEIFFDQSKNGYAGYIDGGASQEEFYKFIKPILEKMDGTEELLVKLNREDLLRKQRTFDNGSIPHQIHLGELHAILRRQEDFYPFLKDNREKIEKILTFRIPYYVGPLARGNSRFAWMTRKSEETITPWNFEEVVDKGASAQSFIERMTNFDKNLPNEKVLPKHSLLYEYFTVYNELTKVKYVTEGMRKPAFLSGEQKKAIVDLLFKTNRKVTVKQLKEDYFKKIECFDSVEISGVEDRFNASLGTYHDLLKIIKDKDFLDNEENEDILEDIVLTLTLFEDREMIEERLKTYAHLFDDKVMKQLKRRRYTGWGRLSRKLINGIRDKQSGKTILDFLKSDGFANRNFMQLIHDDSLTFKEDIQKAQVSGQGDSLHEHIANLAGSPAIKKGILQTVKVVDELVKVMGRHKPENIVIEMARENQTTQKGQKNSRERMKRIEEGIKELGSQILKEHPVENTQLQNEKLYLYYLQNGRDMYVDQELDINRLSDYDVDHIVPQSFLKDDSIDNKVLTRSDKARGKSDNVPSEEVVKKMKNYWRQLLNAKLITQRKFDNLTKAERGGLSELDKAGFIKRQLVETRQITKHVAQILDSRMNTKYDENDKLIREVKVITLKSKLVSDFRKDFQFYKVREINNYHHAHDAYLNAVVGTALIKKYPKLESEFVYGDYKVYDVRKMIAKSEQEIGKATAKYFFYSNIMNFFKTEITLANGEIRKRPLIETNGETGEIVWDKGRDFATVRKVLSMPQVNIVKKTEVQTGGFSKESILPKRNSDKLIARKKDWDPKKYGGFDSPTVAYSVLVVAKVEKGKSKKLKSVKELLGITIMERSSFEKNPIDFLEAKGYKEVKKDLIIKLPKYSLFELENGRKRMLASAGELQKGNELALPSKYVNFLYLASHYEKLKGSPEDNEQKQLFVEQHKHYLDEIIEQISEFSKRVILADANLDKVLSAYNKHRDKPIREQAENIIHLFTLTNLGAPAAFKYFDTTIDRKRYTSTKEVLDATLIHQSITGLYETRIDLSQLGGDGGGGSGGGGSSGGTLNIEDEYRLHETSKEPDVSLGSTWLSDFPQAWAETGGMGLAVRQAPLIIPLKATSTPVSIKQYPMSQEARLGIKPHIQRLLDQGILVPCQSPWNTPLLPVKKPGTNDYRPVQDLREVNKRVEDIHPTVPNPYNLLSGLPPSHQWYTVLDLKDAFFCLRLHPTSQPLFAFEWRDPEMGISGQLTWTRLPQGFKNSPTLFNEALHRDLADFRIQHPDLILLQYVDDLLLAATSELDCQQGTRALLQTLGNLGYRASAKKAQICQKQVKYLGYLLKEGQRWLTEARKETVMGQPTPKTPRQLREFLGKAGFCRLFIPGFAEMAAPLYPLTKPGTLFNWGPDQQKAYQEIKQALLTAPALGLPDLTKPFELFVDEKQGYAKGVLTQKLGPWRRPVAYLSKKLDPVAAGWPPCLRMVAAIAVLTKDAGKLTMGQPLVILAPHAVEALVKQPPDRWLSNARMTHYQALLLDTDRVQFGPVVALNPATLLPLPEEGLQHNCLDILAEAHGTRPDLTDQPLPDADHTWYTDGSSLLQEGQRKAGAAVTTETEVIWAKALPAGTSAQRAELIALTQALKMAEGKKLNVYTDSRYAFATAHIHGEIYRRRGWLTSEGKEIKNKDEILALLKALFLPKRLSIIHCPGHQKGHSAEARGNRMADQAARKAAITETPDTSTLLIENSSPSGGSKRTADGSEFEAGKRTADGSEFEKRTADGSEFESPKKKAKVE

SEQ ID NO: 2703 - protein, 2116 aa, synthetic construct
  source 1..2116: note = Description of Artificial Sequence: Synthetic polypeptide
MPAAKRVKLDGGDKKYSIGLDIGTNSVGWAVITDEYKVPSKKFKVLGNTDRHSIKKNLIGALLFDSGETAEATRLKRTARRRYTRRKNRICYLQEIFSNEMAKVDDSFFHRLEESFLVEEDKKHERHPIFGNIVDEVAYHEKYPTIYHLRKKLVDSTDKADLRLIYLALAHMIKFRGHFLIEGDLNPDNSDVDKLFIQLVQTYNQLFEENPINASGVDAKAILSARLSKSRRLENLIAQLPGEKKNGLFGNLIALSLGLTPNFKSNFDLAEDAKLQLSKDTYDDDLDNLLAQIGDQYADLFLAAKNLSDAILLSDILRVNTEITKAPLSASMIKRYDEHHQDLTLLKALVRQQLPEKYKEIFFDQSKNGYAGYIDGGASQEEFYKFIKPILEKMDGTEELLVKLNREDLLRKQRTFDNGSIPHQIHLGELHAILRRQEDFYPFLKDNREKIEKILTFRIPYYVGPLARGNSRFAWMTRKSEETITPWNFEEVVDKGASAQSFIERMTNFDKNLPNEKVLPKHSLLYEYFTVYNELTKVKYVTEGMRKPAFLSGEQKKAIVDLLFKTNRKVTVKQLKEDYFKKIECFDSVEISGVEDRFNASLGTYHDLLKIIKDKDFLDNEENEDILEDIVLTLTLFEDREMIEERLKTYAHLFDDKVMKQLKRRRYTGWGRLSRKLINGIRDKQSGKTILDFLKSDGFANRNFMQLIHDDSLTFKEDIQKAQVSGQGDSLHEHIANLAGSPAIKKGILQTVKVVDELVKVMGRHKPENIVIEMARENQTTQKGQKNSRERMKRIEEGIKELGSQILKEHPVENTQLQNEKLYLYYLQNGRDMYVDQELDINRLSDYDVDHIVPQSFLKDDSIDNKVLTRSDKARGKSDNVPSEEVVKKMKNYWRQLLNAKLITQRKFDNLTKAERGGLSELDKAGFIKRQLVETRQITKHVAQILDSRMNTKYDENDKLIREVKVITLKSKLVSDFRKDFQFYKVREINNYHHAHDAYLNAVVGTALIKKYPKLESEFVYGDYKVYDVRKMIAKSEQEIGKATAKYFFYSNIMNFFKTEITLANGEIRKRPLIETNGETGEIVWDKGRDFATVRKVLSMPQVNIVKKTEVQTGGFSKESILPKRNSDKLIARKKDWDPKKYGGFDSPTVAYSVLVVAKVEKGKSKKLKSVKELLGITIMERSSFEKNPIDFLEAKGYKEVKKDLIIKLPKYSLFELENGRKRMLASAGELQKGNELALPSKYVNFLYLASHYEKLKGSPEDNEQKQLFVEQHKHYLDEIIEQISEFSKRVILADANLDKVLSAYNKHRDKPIREQAENIIHLFTLTNLGAPAAFKYFDTTIDRKRYTSTKEVLDATLIHQSITGLYETRIDLSQLGGDGGGSSEAAAKGGSGGTLNIEDEYRLHETSKEPDVSLGSTWLSDFPQAWAETGGMGLAVRQAPLIIPLKATSTPVSIKQYPMSQEARLGIKPHIQRLLDQGILVPCQSPWNTPLLPVKKPGTNDYRPVQDLREVNKRVEDIHPTVPNPYNLLSGLPPSHQWYTVLDLKDAFFCLRLHPTSQPLFAFEWRDPEMGISGQLTWTRLPQGFKNSPTLFNEALHRDLADFRIQHPDLILLQYVDDLLLAATSELDCQQGTRALLQTLGNLGYRASAKKAQICQKQVKYLGYLLKEGQRWLTEARKETVMGQPTPKTPRQLREFLGKAGFCRLFIPGFAEMAAPLYPLTKPGTLFNWGPDQQKAYQEIKQALLTAPALGLPDLTKPFELFVDEKQGYAKGVLTQKLGPWRRPVAYLSKKLDPVAAGWPPCLRMVAAIAVLTKDAGKLTMGQPLVILAPHAVEALVKQPPDRWLSNARMTHYQALLLDTDRVQFGPVVALNPATLLPLPEEGLQHNCLDILAEAHGTRPDLTDQPLPDADHTWYTDGSSLLQEGQRKAGAAVTTETEVIWAKALPAGTSAQRAELIALTQALKMAEGKKLNVYTDSRYAFATAHIHGEIYRRRGWLTSEGKEIKNKDEILALLKALFLPKRLSIIHCPGHQKGHSAEARGNRMADQAARKAAITETPDTSTLLIENSSPSGGSKRTADGSEFEAGKRTADGSEFEKRTADGSEFESPKKKAKVE

SEQ ID NO: 2704 - protein, 2094 aa, synthetic construct
  source 1..2094: note = Description of Artificial Sequence: Synthetic polypeptide
MPAAKRVKLDGGDKKYSIGLDIGTNSVGWAVITDEYKVPSKKFKVLGNTDRHSIKKNLIGALLFDSGETAEATRLKRTARRRYTRRKNRICYLQEIFSNEMAKVDDSFFHRLEESFLVEEDKKHERHPIFGNIVDEVAYHEKYPTIYHLRKKLVDSTDKADLRLIYLALAHMIKFRGHFLIEGDLNPDNSDVDKLFIQLVQTYNQLFEENPINASGVDAKAILSARLSKSRRLENLIAQLPGEKKNGLFGNLIALSLGLTPNFKSNFDLAEDAKLQLSKDTYDDDLDNLLAQIGDQYADLFLAAKNLSDAILLSDILRVNTEITKAPLSASMIKRYDEHHQDLTLLKALVRQQLPEKYKEIFFDQSKNGYAGYIDGGASQEEFYKFIKPILEKMDGTEELLVKLNREDLLRKQRTFDNGSIPHQIHLGELHAILRRQEDFYPFLKDNREKIEKILTFRIPYYVGPLARGNSRFAWMTRKSEETITPWNFEEVVDKGASAQSFIERMTNFDKNLPNEKVLPKHSLLYEYFTVYNELTKVKYVTEGMRKPAFLSGEQKKAIVDLLFKTNRKVTVKQLKEDYFKKIECFDSVEISGVEDRFNASLGTYHDLLKIIKDKDFLDNEENEDILEDIVLTLTLFEDREMIEERLKTYAHLFDDKVMKQLKRRRYTGWGRLSRKLINGIRDKQSGKTILDFLKSDGFANRNFMQLIHDDSLTFKEDIQKAQVSGQGDSLHEHIANLAGSPAIKKGILQTVKVVDELVKVMGRHKPENIVIEMARENQTTQKGQKNSRERMKRIEEGIKELGSQILKEHPVENTQLQNEKLYLYYLQNGRDMYVDQELDINRLSDYDVDHIVPQSFLKDDSIDNKVLTRSDKARGKSDNVPSEEVVKKMKNYWRQLLNAKLITQRKFDNLTKAERGGLSELDKAGFIKRQLVETRQITKHVAQILDSRMNTKYDENDKLIREVKVITLKSKLVSDFRKDFQFYKVREINNYHHAHDAYLNAVVGTALIKKYPKLESEFVYGDYKVYDVRKMIAKSEQEIGKATAKYFFYSNIMNFFKTEITLANGEIRKRPLIETNGETGEIVWDKGRDFATVRKVLSMPQVNIVKKTEVQTGGFSKESILPKRNSDKLIARKKDWDPKKYGGFDSPTVAYSVLVVAKVEKGKSKKLKSVKELLGITIMERSSFEKNPIDFLEAKGYKEVKKDLIIKLPKYSLFELENGRKRMLASAGELQKGNELALPSKYVNFLYLASHYEKLKGSPEDNEQKQLFVEQHKHYLDEIIEQISEFSKRVILADANLDKVLSAYNKHRDKPIREQAENIIHLFTLTNLGAPAAFKYFDTTIDRKRYTSTKEVLDATLIHQSITGLYETRIDLSQLGGDGGGGSPAPGSSGGTLNIEDEHRLHETSKEPDVSLGSTWLSDFPQAWAETGGMGLAVRQAPLIIPLKATSTPVSIKQYPMSQEARLGIKPHIQRLLDQGILVPCQSPWNTPLLPVKKPGTNDYRPVQDLREVNKRVEDIHPTVPNPYNLLSGLPPSHQWYTVLDLKDAFFCLRLHPTSQPLFAFEWRDPEMGISGQLTWTRLPQGFKNSPTLFDEALHRDLADFRIQHPDLILLQYVDDLLLAATSELDCQQGTRALLQTLGNLGYRASAKKAQICQKQVKYLGYLLKEGQRWLTEARKETVMGQPTPKTPRQLREFLGTAGFCRLWIPGFAEMAAPLYPLTKTGTLFNWGPDQQKAYQEIKQALLTAPALGLPDLTKPFELFVDEKQGYAKGVLTQKLGPWRRPVAYLSKKLDPVAAGWPPCLRMVAAIAVLTKDAGKLTMGQPLVILAPHAVEALVKQPPDRWLSNARMTHYQALLLDTDRVQFGPVVALNPATLLPLPEEGLQHNCLDILAEAHGTRPDLTDQPLPDADHTWYTDGSSLLQEGQRKAGAAVTTETEVIWAKALPAGTSAQRAELIALTQALKMAEGKKLNVYTDSRYAFATAHIHGEIYRRRGLLTSEGKEIKNKDEILALLKALFLPKRLSIIHCPGHQKGHSAEARGNRMADQAARKAAITETPDTSTLLAGKRTADGSEFEKRTADGSEFESPKKKAKVE

SEQ ID NO: 2705 - protein, 2096 aa, synthetic construct
  source 1..2096: note = Description of Artificial Sequence: Synthetic polypeptide
MPAAKRVKLDGGDKKYSIGLDIGTNSVGWAVITDEYKVPSKKFKVLGNTDRHSIKKNLIGALLFDSGETAEATRLKRTARRRYTRRKNRICYLQEIFSNEMAKVDDSFFHRLEESFLVEEDKKHERHPIFGNIVDEVAYHEKYPTIYHLRKKLVDSTDKADLRLIYLALAHMIKFRGHFLIEGDLNPDNSDVDKLFIQLVQTYNQLFEENPINASGVDAKAILSARLSKSRRLENLIAQLPGEKKNGLFGNLIALSLGLTPNFKSNFDLAEDAKLQLSKDTYDDDLDNLLAQIGDQYADLFLAAKNLSDAILLSDILRVNTEITKAPLSASMIKRYDEHHQDLTLLKALVRQQLPEKYKEIFFDQSKNGYAGYIDGGASQEEFYKFIKPILEKMDGTEELLVKLNREDLLRKQRTFDNGSIPHQIHLGELHAILRRQEDFYPFLKDNREKIEKILTFRIPYYVGPLARGNSRFAWMTRKSEETITPWNFEEVVDKGASAQSFIERMTNFDKNLPNEKVLPKHSLLYEYFTVYNELTKVKYVTEGMRKPAFLSGEQKKAIVDLLFKTNRKVTVKQLKEDYFKKIECFDSVEISGVEDRFNASLGTYHDLLKIIKDKDFLDNEENEDILEDIVLTLTLFEDREMIEERLKTYAHLFDDKVMKQLKRRRYTGWGRLSRKLINGIRDKQSGKTILDFLKSDGFANRNFMQLIHDDSLTFKEDIQKAQVSGQGDSLHEHIANLAGSPAIKKGILQTVKVVDELVKVMGRHKPENIVIEMARENQTTQKGQKNSRERMKRIEEGIKELGSQILKEHPVENTQLQNEKLYLYYLQNGRDMYVDQELDINRLSDYDVDHIVPQSFLKDDSIDNKVLTRSDKARGKSDNVPSEEVVKKMKNYWRQLLNAKLITQRKFDNLTKAERGGLSELDKAGFIKRQLVETRQITKHVAQILDSRMNTKYDENDKLIREVKVITLKSKLVSDFRKDFQFYKVREINNYHHAHDAYLNAVVGTALIKKYPKLESEFVYGDYKVYDVRKMIAKSEQEIGKATAKYFFYSNIMNFFKTEITLANGEIRKRPLIETNGETGEIVWDKGRDFATVRKVLSMPQVNIVKKTEVQTGGFSKESILPKRNSDKLIARKKDWDPKKYGGFDSPTVAYSVLVVAKVEKGKSKKLKSVKELLGITIMERSSFEKNPIDFLEAKGYKEVKKDLIIKLPKYSLFELENGRKRMLASAGELQKGNELALPSKYVNFLYLASHYEKLKGSPEDNEQKQLFVEQHKHYLDEIIEQISEFSKRVILADANLDKVLSAYNKHRDKPIREQAENIIHLFTLTNLGAPAAFKYFDTTIDRKRYTSTKEVLDATLIHQSITGLYETRIDLSQLGGDGGEAAAKGSSGGGGGTLNIEDEHRLHETSKEPDVSLGSTWLSDFPQAWAETGGMGLAVRQAPLIIPLKATSTPVSIKQYPMSQEARLGIKPHIQRLLDQGILVPCQSPWNTPLLPVKKPGTNDYRPVQDLREVNKRVEDIHPTVPNPYNLLSGLPPSHQWYTVLDLKDAFFCLRLHPTSQPLFAFEWRDPEMGISGQLTWTRLPQGFKNSPTLFDEALHRDLADFRIQHPDLILLQYVDDLLLAATSELDCQQGTRALLQTLGNLGYRASAKKAQICQKQVKYLGYLLKEGQRWLTEARKETVMGQPTPKTPRQLREFLGTAGFCRLWIPGFAEMAAPLYPLTKTGTLFNWGPDQQKAYQEIKQALLTAPALGLPDLTKPFELFVDEKQGYAKGVLTQKLGPWRRPVAYLSKKLDPVAAGWPPCLRMVAAIAVLTKDAGKLTMGQPLVILAPHAVEALVKQPPDRWLSNARMTHYQALLLDTDRVQFGPVVALNPATLLPLPEEGLQHNCLDILAEAHGTRPDLTDQPLPDADHTWYTDGSSLLQEGQRKAGAAVTTETEVIWAKALPAGTSAQRAELIALTQALKMAEGKKLNVYTDSRYAFATAHIHGEIYRRRGLLTSEGKEIKNKDEILALLKALFLPKRLSIIHCPGHQKGHSAEARGNRMADQAARKAAITETPDTSTLLAGKRTADGSEFEKRTADGSEFESPKKKAKVE

SEQ ID NO: 2706 - protein, 2096 aa, synthetic construct
  source 1..2096: note = Description of Artificial Sequence: Synthetic polypeptide
MPAAKRVKLDGGDKKYSIGLDIGTNSVGWAVITDEYKVPSKKFKVLGNTDRHSIKKNLIGALLFDSGETAEATRLKRTARRRYTRRKNRICYLQEIFSNEMAKVDDSFFHRLEESFLVEEDKKHERHPIFGNIVDEVAYHEKYPTIYHLRKKLVDSTDKADLRLIYLALAHMIKFRGHFLIEGDLNPDNSDVDKLFIQLVQTYNQLFEENPINASGVDAKAILSARLSKSRRLENLIAQLPGEKKNGLFGNLIALSLGLTPNFKSNFDLAEDAKLQLSKDTYDDDLDNLLAQIGDQYADLFLAAKNLSDAILLSDILRVNTEITKAPLSASMIKRYDEHHQDLTLLKALVRQQLPEKYKEIFFDQSKNGYAGYIDGGASQEEFYKFIKPILEKMDGTEELLVKLNREDLLRKQRTFDNGSIPHQIHLGELHAILRRQEDFYPFLKDNREKIEKILTFRIPYYVGPLARGNSRFAWMTRKSEETITPWNFEEVVDKGASAQSFIERMTNFDKNLPNEKVLPKHSLLYEYFTVYNELTKVKYVTEGMRKPAFLSGEQKKAIVDLLFKTNRKVTVKQLKEDYFKKIECFDSVEISGVEDRFNASLGTYHDLLKIIKDKDFLDNEENEDILEDIVLTLTLFEDREMIEERLKTYAHLFDDKVMKQLKRRRYTGWGRLSRKLINGIRDKQSGKTILDFLKSDGFANRNFMQLIHDDSLTFKEDIQKAQVSGQGDSLHEHIANLAGSPAIKKGILQTVKVVDELVKVMGRHKPENIVIEMARENQTTQKGQKNSRERMKRIEEGIKELGSQILKEHPVENTQLQNEKLYLYYLQNGRDMYVDQELDINRLSDYDVDHIVPQSFLKDDSIDNKVLTRSDKARGKSDNVPSEEVVKKMKNYWRQLLNAKLITQRKFDNLTKAERGGLSELDKAGFIKRQLVETRQITKHVAQILDSRMNTKYDENDKLIREVKVITLKSKLVSDFRKDFQFYKVREINNYHHAHDAYLNAVVGTALIKKYPKLESEFVYGDYKVYDVRKMIAKSEQEIGKATAKYFFYSNIMNFFKTEITLANGEIRKRPLIETNGETGEIVWDKGRDFATVRKVLSMPQVNIVKKTEVQTGGFSKESILPKRNSDKLIARKKDWDPKKYGGFDSPTVAYSVLVVAKVEKGKSKKLKSVKELLGITIMERSSFEKNPIDFLEAKGYKEVKKDLIIKLPKYSLFELENGRKRMLASAGELQKGNELALPSKYVNFLYLASHYEKLKGSPEDNEQKQLFVEQHKHYLDEIIEQISEFSKRVILADANLDKVLSAYNKHRDKPIREQAENIIHLFTLTNLGAPAAFKYFDTTIDRKRYTSTKEVLDATLIHQSITGLYETRIDLSQLGGDGGGSSGGGEAAAKGGTLNIEDEHRLHETSKEPDVSLGSTWLSDFPQAWAETGGMGLAVRQAPLIIPLKATSTPVSIKQYPMSQEARLGIKPHIQRLLDQGILVPCQSPWNTPLLPVKKPGTNDYRPVQDLREVNKRVEDIHPTVPNPYNLLSGLPPSHQWYTVLDLKDAFFCLRLHPTSQPLFAFEWRDPEMGISGQLTWTRLPQGFKNSPTLFDEALHRDLADFRIQHPDLILLQYVDDLLLAATSELDCQQGTRALLQTLGNLGYRASAKKAQICQKQVKYLGYLLKEGQRWLTEARKETVMGQPTPKTPRQLREFLGTAGFCRLWIPGFAEMAAPLYPLTKTGTLFNWGPDQQKAYQEIKQALLTAPALGLPDLTKPFELFVDEKQGYAKGVLTQKLGPWRRPVAYLSKKLDPVAAGWPPCLRMVAAIAVLTKDAGKLTMGQPLVILAPHAVEALVKQPPDRWLSNARMTHYQALLLDTDRVQFGPVVALNPATLLPLPEEGLQHNCLDILAEAHGTRPDLTDQPLPDADHTWYTDGSSLLQEGQRKAGAAVTTETEVIWAKALPAGTSAQRAELIALTQALKMAEGKKLNVYTDSRYAFATAHIHGEIYRRRGLLTSEGKEIKNKDEILALLKALFLPKRLSIIHCPGHQKGHSAEARGNRMADQAARKAAITETPDTSTLLAGKRTADGSEFEKRTADGSEFESPKKKAKVE

SEQ ID NO: 2707 - protein, 2093 aa, synthetic construct
  source 1..2093: note = Description of Artificial Sequence: Synthetic polypeptide
MPAAKRVKLDGGDKKYSIGLDIGTNSVGWAVITDEYKVPSKKFKVLGNTDRHSIKKNLIGALLFDSGETAEATRLKRTARRRYTRRKNRICYLQEIFSNEMAKVDDSFFHRLEESFLVEEDKKHERHPIFGNIVDEVAYHEKYPTIYHLRKKLVDSTDKADLRLIYLALAHMIKFRGHFLIEGDLNPDNSDVDKLFIQLVQTYNQLFEENPINASGVDAKAILSARLSKSRRLENLIAQLPGEKKNGLFGNLIALSLGLTPNFKSNFDLAEDAKLQLSKDTYDDDLDNLLAQIGDQYADLFLAAKNLSDAILLSDILRVNTEITKAPLSASMIKRYDEHHQDLTLLKALVRQQLPEKYKEIFFDQSKNGYAGYIDGGASQEEFYKFIKPILEKMDGTEELLVKLNREDLLRKQRTFDNGSIPHQIHLGELHAILRRQEDFYPFLKDNREKIEKILTFRIPYYVGPLARGNSRFAWMTRKSEETITPWNFEEVVDKGASAQSFIERMTNFDKNLPNEKVLPKHSLLYEYFTVYNELTKVKYVTEGMRKPAFLSGEQKKAIVDLLFKTNRKVTVKQLKEDYFKKIECFDSVEISGVEDRFNASLGTYHDLLKIIKDKDFLDNEENEDILEDIVLTLTLFEDREMIEERLKTYAHLFDDKVMKQLKRRRYTGWGRLSRKLINGIRDKQSGKTILDFLKSDGFANRNFMQLIHDDSLTFKEDIQKAQVSGQGDSLHEHIANLAGSPAIKKGILQTVKVVDELVKVMGRHKPENIVIEMARENQTTQKGQKNSRERMKRIEEGIKELGSQILKEHPVENTQLQNEKLYLYYLQNGRDMYVDQELDINRLSDYDVDHIVPQSFLKDDSIDNKVLTRSDKARGKSDNVPSEEVVKKMKNYWRQLLNAKLITQRKFDNLTKAERGGLSELDKAGFIKRQLVETRQITKHVAQILDSRMNTKYDENDKLIREVKVITLKSKLVSDFRKDFQFYKVREINNYHHAHDAYLNAVVGTALIKKYPKLESEFVYGDYKVYDVRKMIAKSEQEIGKATAKYFFYSNIMNFFKTEITLANGEIRKRPLIETNGETGEIVWDKGRDFATVRKVLSMPQVNIVKKTEVQTGGFSKESILPKRNSDKLIARKKDWDPKKYGGFDSPTVAYSVLVVAKVEKGKSKKLKSVKELLGITIMERSSFEKNPIDFLEAKGYKEVKKDLIIKLPKYSLFELENGRKRMLASAGELQKGNELALPSKYVNFLYLASHYEKLKGSPEDNEQKQLFVEQHKHYLDEIIEQISEFSKRVILADANLDKVLSAYNKHRDKPIREQAENIIHLFTLTNLGAPAAFKYFDTTIDRKRYTSTKEVLDATLIHQSITGLYETRIDLSQLGGDGGEAAAKGSSGGTLNIEDEHRLHETSKEPDVSLGSTWLSDFPQAWAETGGMGLAVRQAPLIIPLKATSTPVSIKQYPMSQEARLGIKPHIQRLLDQGILVPCQSPWNTPLLPVKKPGTNDYRPVQDLREVNKRVEDIHPTVPNPYNLLSGLPPSHQWYTVLDLKDAFFCLRLHPTSQPLFAFEWRDPEMGISGQLTWTRLPQGFKNSPTLFDEALHRDLADFRIQHPDLILLQYVDDLLLAATSELDCQQGTRALLQTLGNLGYRASAKKAQICQKQVKYLGYLLKEGQRWLTEARKETVMGQPTPKTPRQLREFLGTAGFCRLWIPGFAEMAAPLYPLTKTGTLFNWGPDQQKAYQEIKQALLTAPALGLPDLTKPFELFVDEKQGYAKGVLTQKLGPWRRPVAYLSKKLDPVAAGWPPCLRMVAAIAVLTKDAGKLTMGQPLVILAPHAVEALVKQPPDRWLSNARMTHYQALLLDTDRVQFGPVVALNPATLLPLPEEGLQHNCLDILAEAHGTRPDLTDQPLPDADHTWYTDGSSLLQEGQRKAGAAVTTETEVIWAKALPAGTSAQRAELIALTQALKMAEGKKLNVYTDSRYAFATAHIHGEIYRRRGLLTSEGKEIKNKDEILALLKALFLPKRLSIIHCPGHQKGHSAEARGNRMADQAARKAAITETPDTSTLLAGKRTADGSEFEKRTADGSEFESPKKKAKVE

SEQ ID NO: 2708 - protein, 2096 aa, synthetic construct
  source 1..2096: note = Description of Artificial Sequence: Synthetic polypeptide
MPAAKRVKLDGGDKKYSIGLDIGTNSVGWAVITDEYKVPSKKFKVLGNTDRHSIKKNLIGALLFDSGETAEATRLKRTARRRYTRRKNRICYLQEIFSNEMAKVDDSFFHRLEESFLVEEDKKHERHPIFGNIVDEVAYHEKYPTIYHLRKKLVDSTDKADLRLIYLALAHMIKFRGHFLIEGDLNPDNSDVDKLFIQLVQTYNQLFEENPINASGVDAKAILSARLSKSRRLENLIAQLPGEKKNGLFGNLIALSLGLTPNFKSNFDLAEDAKLQLSKDTYDDDLDNLLAQIGDQYADLFLAAKNLSDAILLSDILRVNTEITKAPLSASMIKRYDEHHQDLTLLKALVRQQLPEKYKEIFFDQSKNGYAGYIDGGASQEEFYKFIKPILEKMDGTEELLVKLNREDLLRKQRTFDNGSIPHQIHLGELHAILRRQEDFYPFLKDNREKIEKILTFRIPYYVGPLARGNSRFAWMTRKSEETITPWNFEEVVDKGASAQSFIERMTNFDKNLPNEKVLPKHSLLYEYFTVYNELTKVKYVTEGMRKPAFLSGEQKKAIVDLLFKTNRKVTVKQLKEDYFKKIECFDSVEISGVEDRFNASLGTYHDLLKIIKDKDFLDNEENEDILEDIVLTLTLFEDREMIEERLKTYAHLFDDKVMKQLKRRRYTGWGRLSRKLINGIRDKQSGKTILDFLKSDGFANRNFMQLIHDDSLTFKEDIQKAQVSGQGDSLHEHIANLAGSPAIKKGILQTVKVVDELVKVMGRHKPENIVIEMARENQTTQKGQKNSRERMKRIEEGIKELGSQILKEHPVENTQLQNEKLYLYYLQNGRDMYVDQELDINRLSDYDVDHIVPQSFLKDDSIDNKVLTRSDKARGKSDNVPSEEVVKKMKNYWRQLLNAKLITQRKFDNLTKAERGGLSELDKAGFIKRQLVETRQITKHVAQILDSRMNTKYDENDKLIREVKVITLKSKLVSDFRKDFQFYKVREINNYHHAHDAYLNAVVGTALIKKYPKLESEFVYGDYKVYDVRKMIAKSEQEIGKATAKYFFYSNIMNFFKTEITLANGEIRKRPLIETNGETGEIVWDKGRDFATVRKVLSMPQVNIVKKTEVQTGGFSKESILPKRNSDKLIARKKDWDPKKYGGFDSPTVAYSVLVVAKVEKGKSKKLKSVKELLGITIMERSSFEKNPIDFLEAKGYKEVKKDLIIKLPKYSLFELENGRKRMLASAGELQKGNELALPSKYVNFLYLASHYEKLKGSPEDNEQKQLFVEQHKHYLDEIIEQISEFSKRVILADANLDKVLSAYNKHRDKPIREQAENIIHLFTLTNLGAPAAFKYFDTTIDRKRYTSTKEVLDATLIHQSITGLYETRIDLSQLGGDGGGGGGGSEAAAKGGTLNIEDEHRLHETSKEPDVSLGSTWLSDFPQAWAETGGMGLAVRQAPLIIPLKATSTPVSIKQYPMSQEARLGIKPHIQRLLDQGILVPCQSPWNTPLLPVKKPGTNDYRPVQDLREVNKRVEDIHPTVPNPYNLLSGLPPSHQWYTVLDLKDAFFCLRLHPTSQPLFAFEWRDPEMGISGQLTWTRLPQGFKNSPTLFDEALHRDLADFRIQHPDLILLQYVDDLLLAATSELDCQQGTRALLQTLGNLGYRASAKKAQICQKQVKYLGYLLKEGQRWLTEARKETVMGQPTPKTPRQLREFLGTAGFCRLWIPGFAEMAAPLYPLTKTGTLFNWGPDQQKAYQEIKQALLTAPALGLPDLTKPFELFVDEKQGYAKGVLTQKLGPWRRPVAYLSKKLDPVAAGWPPCLRMVAAIAVLTKDAGKLTMGQPLVILAPHAVEALVKQPPDRWLSNARMTHYQALLLDTDRVQFGPVVALNPATLLPLPEEGLQHNCLDILAEAHGTRPDLTDQPLPDADHTWYTDGSSLLQEGQRKAGAAVTTETEVIWAKALPAGTSAQRAELIALTQALKMAEGKKLNVYTDSRYAFATAHIHGEIYRRRGLLTSEGKEIKNKDEILALLKALFLPKRLSIIHCPGHQKGHSAEARGNRMADQAARKAAITETPDTSTLLAGKRTADGSEFEKRTADGSEFESPKKKAKVE

SEQ ID NO: 2709 - protein, 2096 aa, synthetic construct
  source 1..2096: note = Description of Artificial Sequence: Synthetic polypeptide
MPAAKRVKLDGGDKKYSIGLDIGTNSVGWAVITDEYKVPSKKFKVLGNTDRHSIKKNLIGALLFDSGETAEATRLKRTARRRYTRRKNRICYLQEIFSNEMAKVDDSFFHRLEESFLVEEDKKHERHPIFGNIVDEVAYHEKYPTIYHLRKKLVDSTDKADLRLIYLALAHMIKFRGHFLIEGDLNPDNSDVDKLFIQLVQTYNQLFEENPINASGVDAKAILSARLSKSRRLENLIAQLPGEKKNGLFGNLIALSLGLTPNFKSNFDLAEDAKLQLSKDTYDDDLDNLLAQIGDQYADLFLAAKNLSDAILLSDILRVNTEITKAPLSASMIKRYDEHHQDLTLLKALVRQQLPEKYKEIFFDQSKNGYAGYIDGGASQEEFYKFIKPILEKMDGTEELLVKLNREDLLRKQRTFDNGSIPHQIHLGELHAILRRQEDFYPFLKDNREKIEKILTFRIPYYVGPLARGNSRFAWMTRKSEETITPWNFEEVVDKGASAQSFIERMTNFDKNLPNEKVLPKHSLLYEYFTVYNELTKVKYVTEGMRKPAFLSGEQKKAIVDLLFKTNRKVTVKQLKEDYFKKIECFDSVEISGVEDRFNASLGTYHDLLKIIKDKDFLDNEENEDILEDIVLTLTLFEDREMIEERLKTYAHLFDDKVMKQLKRRRYTGWGRLSRKLINGIRDKQSGKTILDFLKSDGFANRNFMQLIHDDSLTFKEDIQKAQVSGQGDSLHEHIANLAGSPAIKKGILQTVKVVDELVKVMGRHKPENIVIEMARENQTTQKGQKNSRERMKRIEEGIKELGSQILKEHPVENTQLQNEKLYLYYLQNGRDMYVDQELDINRLSDYDVDHIVPQSFLKDDSIDNKVLTRSDKARGKSDNVPSEEVVKKMKNYWRQLLNAKLITQRKFDNLTKAERGGLSELDKAGFIKRQLVETRQITKHVAQILDSRMNTKYDENDKLIREVKVITLKSKLVSDFRKDFQFYKVREINNYHHAHDAYLNAVVGTALIKKYPKLESEFVYGDYKVYDVRKMIAKSEQEIGKATAKYFFYSNIMNFFKTEITLANGEIRKRPLIETNGETGEIVWDKGRDFATVRKVLSMPQVNIVKKTEVQTGGFSKESILPKRNSDKLIARKKDWDPKKYGGFDSPTVAYSVLVVAKVEKGKSKKLKSVKELLGITIMERSSFEKNPIDFLEAKGYKEVKKDLIIKLPKYSLFELENGRKRMLASAGELQKGNELALPSKYVNFLYLASHYEKLKGSPEDNEQKQLFVEQHKHYLDEIIEQISEFSKRVILADANLDKVLSAYNKHRDKPIREQAENIIHLFTLTNLGAPAAFKYFDTTIDRKRYTSTKEVLDATLIHQSITGLYETRIDLSQLGGDGGPAPAPAPAPAPGGTLNIEDEHRLHETSKEPDVSLGSTWLSDFPQAWAETGGMGLAVRQAPLIIPLKATSTPVSIKQYPMSQEARLGIKPHIQRLLDQGILVPCQSPWNTPLLPVKKPGTNDYRPVQDLREVNKRVEDIHPTVPNPYNLLSGLPPSHQWYTVLDLKDAFFCLRLHPTSQPLFAFEWRDPEMGISGQLTWTRLPQGFKNSPTLFDEALHRDLADFRIQHPDLILLQYVDDLLLAATSELDCQQGTRALLQTLGNLGYRASAKKAQICQKQVKYLGYLLKEGQRWLTEARKETVMGQPTPKTPRQLREFLGTAGFCRLWIPGFAEMAAPLYPLTKTGTLFNWGPDQQKAYQEIKQALLTAPALGLPDLTKPFELFVDEKQGYAKGVLTQKLGPWRRPVAYLSKKLDPVAAGWPPCLRMVAAIAVLTKDAGKLTMGQPLVILAPHAVEALVKQPPDRWLSNARMTHYQALLLDTDRVQFGPVVALNPATLLPLPEEGLQHNCLDILAEAHGTRPDLTDQPLPDADHTWYTDGSSLLQEGQRKAGAAVTTETEVIWAKALPAGTSAQRAELIALTQALKMAEGKKLNVYTDSRYAFATAHIHGEIYRRRGLLTSEGKEIKNKDEILALLKALFLPKRLSIIHCPGHQKGHSAEARGNRMADQAARKAAITETPDTSTLLAGKRTADGSEFEKRTADGSEFESPKKKAKVE

SEQ ID NO: 2710 - protein, 2091 aa, synthetic construct
  source 1..2091: note = Description of Artificial Sequence: Synthetic polypeptide
MPAAKRVKLDGGDKKYSIGLDIGTNSVGWAVITDEYKVPSKKFKVLGNTDRHSIKKNLIGALLFDSGETAEATRLKRTARRRYTRRKNRICYLQEIFSNEMAKVDDSFFHRLEESFLVEEDKKHERHPIFGNIVDEVAYHEKYPTIYHLRKKLVDSTDKADLRLIYLALAHMIKFRGHFLIEGDLNPDNSDVDKLFIQLVQTYNQLFEENPINASGVDAKAILSARLSKSRRLENLIAQLPGEKKNGLFGNLIALSLGLTPNFKSNFDLAEDAKLQLSKDTYDDDLDNLLAQIGDQYADLFLAAKNLSDAILLSDILRVNTEITKAPLSASMIKRYDEHHQDLTLLKALVRQQLPEKYKEIFFDQSKNGYAGYIDGGASQEEFYKFIKPILEKMDGTEELLVKLNREDLLRKQRTFDNGSIPHQIHLGELHAILRRQEDFYPFLKDNREKIEKILTFRIPYYVGPLARGNSRFAWMTRKSEETITPWNFEEVVDKGASAQSFIERMTNFDKNLPNEKVLPKHSLLYEYFTVYNELTKVKYVTEGMRKPAFLSGEQKKAIVDLLFKTNRKVTVKQLKEDYFKKIECFDSVEISGVEDRFNASLGTYHDLLKIIKDKDFLDNEENEDILEDIVLTLTLFEDREMIEERLKTYAHLFDDKVMKQLKRRRYTGWGRLSRKLINGIRDKQSGKTILDFLKSDGFANRNFMQLIHDDSLTFKEDIQKAQVSGQGDSLHEHIANLAGSPAIKKGILQTVKVVDELVKVMGRHKPENIVIEMARENQTTQKGQKNSRERMKRIEEGIKELGSQILKEHPVENTQLQNEKLYLYYLQNGRDMYVDQELDINRLSDYDVDHIVPQSFLKDDSIDNKVLTRSDKARGKSDNVPSEEVVKKMKNYWRQLLNAKLITQRKFDNLTKAERGGLSELDKAGFIKRQLVETRQITKHVAQILDSRMNTKYDENDKLIREVKVITLKSKLVSDFRKDFQFYKVREINNYHHAHDAYLNAVVGTALIKKYPKLESEFVYGDYKVYDVRKMIAKSEQEIGKATAKYFFYSNIMNFFKTEITLANGEIRKRPLIETNGETGEIVWDKGRDFATVRKVLSMPQVNIVKKTEVQTGGFSKESILPKRNSDKLIARKKDWDPKKYGGFDSPTVAYSVLVVAKVEKGKSKKLKSVKELLGITIMERSSFEKNPIDFLEAKGYKEVKKDLIIKLPKYSLFELENGRKRMLASAGELQKGNELALPSKYVNFLYLASHYEKLKGSPEDNEQKQLFVEQHKHYLDEIIEQISEFSKRVILADANLDKVLSAYNKHRDKPIREQAENIIHLFTLTNLGAPAAFKYFDTTIDRKRYTSTKEVLDATLIHQSITGLYETRIDLSQLGGDGGGSSPAPGGTLNIEDEHRLHETSKEPDVSLGSTWLSDFPQAWAETGGMGLAVRQAPLIIPLKATSTPVSIKQYPMSQEARLGIKPHIQRLLDQGILVPCQSPWNTPLLPVKKPGTNDYRPVQDLREVNKRVEDIHPTVPNPYNLLSGLPPSHQWYTVLDLKDAFFCLRLHPTSQPLFAFEWRDPEMGISGQLTWTRLPQGFKNSPTLFDEALHRDLADFRIQHPDLILLQYVDDLLLAATSELDCQQGTRALLQTLGNLGYRASAKKAQICQKQVKYLGYLLKEGQRWLTEARKETVMGQPTPKTPRQLREFLGTAGFCRLWIPGFAEMAAPLYPLTKTGTLFNWGPDQQKAYQEIKQALLTAPALGLPDLTKPFELFVDEKQGYAKGVLTQKLGPWRRPVAYLSKKLDPVAAGWPPCLRMVAAIAVLTKDAGKLTMGQPLVILAPHAVEALVKQPPDRWLSNARMTHYQALLLDTDRVQFGPVVALNPATLLPLPEEGLQHNCLDILAEAHGTRPDLTDQPLPDADHTWYTDGSSLLQEGQRKAGAAVTTETEVIWAKALPAGTSAQRAELIALTQALKMAEGKKLNVYTDSRYAFATAHIHGEIYRRRGLLTSEGKEIKNKDEILALLKALFLPKRLSIIHCPGHQKGHSAEARGNRMADQAARKAAITETPDTSTLLAGKRTADGSEFEKRTADGSEFESPKKKAKVE

SEQ ID NO: 2711 - protein, 2131 aa, synthetic construct
  source 1..2131: note = Description of Artificial Sequence: Synthetic polypeptide
MPAAKRVKLDGGDKKYSIGLDIGTNSVGWAVITDEYKVPSKKFKVLGNTDRHSIKKNLIGALLFDSGETAEATRLKRTARRRYTRRKNRICYLQEIFSNEMAKVDDSFFHRLEESFLVEEDKKHERHPIFGNIVDEVAYHEKYPTIYHLRKKLVDSTDKADLRLIYLALAHMIKFRGHFLIEGDLNPDNSDVDKLFIQLVQTYNQLFEENPINASGVDAKAILSARLSKSRRLENLIAQLPGEKKNGLFGNLIALSLGLTPNFKSNFDLAEDAKLQLSKDTYDDDLDNLLAQIGDQYADLFLAAKNLSDAILLSDILRVNTEITKAPLSASMIKRYDEHHQDLTLLKALVRQQLPEKYKEIFFDQSKNGYAGYIDGGASQEEFYKFIKPILEKMDGTEELLVKLNREDLLRKQRTFDNGSIPHQIHLGELHAILRRQEDFYPFLKDNREKIEKILTFRIPYYVGPLARGNSRFAWMTRKSEETITPWNFEEVVDKGASAQSFIERMTNFDKNLPNEKVLPKHSLLYEYFTVYNELTKVKYVTEGMRKPAFLSGEQKKAIVDLLFKTNRKVTVKQLKEDYFKKIECFDSVEISGVEDRFNASLGTYHDLLKIIKDKDFLDNEENEDILEDIVLTLTLFEDREMIEERLKTYAHLFDDKVMKQLKRRRYTGWGRLSRKLINGIRDKQSGKTILDFLKSDGFANRNFMQLIHDDSLTFKEDIQKAQVSGQGDSLHEHIANLAGSPAIKKGILQTVKVVDELVKVMGRHKPENIVIEMARENQTTQKGQKNSRERMKRIEEGIKELGSQILKEHPVENTQLQNEKLYLYYLQNGRDMYVDQELDINRLSDYDVDHIVPQSFLKDDSIDNKVLTRSDKARGKSDNVPSEEVVKKMKNYWRQLLNAKLITQRKFDNLTKAERGGLSELDKAGFIKRQLVETRQITKHVAQILDSRMNTKYDENDKLIREVKVITLKSKLVSDFRKDFQFYKVREINNYHHAHDAYLNAVVGTALIKKYPKLESEFVYGDYKVYDVRKMIAKSEQEIGKATAKYFFYSNIMNFFKTEITLANGEIRKRPLIETNGETGEIVWDKGRDFATVRKVLSMPQVNIVKKTEVQTGGFSKESILPKRNSDKLIARKKDWDPKKYGGFDSPTVAYSVLVVAKVEKGKSKKLKSVKELLGITIMERSSFEKNPIDFLEAKGYKEVKKDLIIKLPKYSLFELENGRKRMLASAGELQKGNELALPSKYVNFLYLASHYEKLKGSPEDNEQKQLFVEQHKHYLDEIIEQISEFSKRVILADANLDKVLSAYNKHRDKPIREQAENIIHLFTLTNLGAPAAFKYFDTTIDRKRYTSTKEVLDATLIHQSITGLYETRIDLSQLGGDGGAEAAAKEAAAKEAAAKEAAAKALEAEAAAKEAAAKEAAAKEAAAKAGGTLNIEDEHRLHETSKEPDVSLGSTWLSDFPQAWAETGGMGLAVRQAPLIIPLKATSTPVSIKQYPMSQEARLGIKPHIQRLLDQGILVPCQSPWNTPLLPVKKPGTNDYRPVQDLREVNKRVEDIHPTVPNPYNLLSGLPPSHQWYTVLDLKDAFFCLRLHPTSQPLFAFEWRDPEMGISGQLTWTRLPQGFKNSPTLFNEALHRDLADFRIQHPDLILLQYVDDLLLAATSELDCQQGTRALLQTLGNLGYRASAKKAQICQKQVKYLGYLLKEGQRWLTEARKETVMGQPTPKTPRQLREFLGTAGFCRLWIPGFAEMAAPLYPLTKPGTLFNWGPDQQKAYQEIKQALLTAPALGLPDLTKPFELFVDEKQGYAKGVLTQKLGPWRRPVAYLSKKLDPVAAGWPPCLRMVAAIAVLTKDAGKLTMGQPLVILAPHAVEALVKQPPDRWLSNARMTHYQALLLDTDRVQFGPVVALNPATLLPLPEEGLQHNCLDILAEAHGTRPDLTDQPLPDADHTWYTDGSSLLQEGQRKAGAAVTTETEVIWAKALPAGTSAQRAELIALTQALKMAEGKKLNVYTDSRYAFATAHIHGEIYRRRGWLTSEGKEIKNKDEILALLKALFLPKRLSIIHCPGHQKGHSAEARGNRMADQAARKAAITETPDTSTLLAGKRTADGSEFEKRTADGSEFESPKKKAKVE

SEQ ID NO: 2712 - protein, 2100 aa, synthetic construct
  source 1..2100: note = Description of Artificial Sequence: Synthetic polypeptide
MPAAKRVKLDGGDKKYSIGLDIGTNSVGWAVITDEYKVPSKKFKVLGNTDRHSIKKNLIGALLFDSGETAEATRLKRTARRRYTRRKNRICYLQEIFSNEMAKVDDSFFHRLEESFLVEEDKKHERHPIFGNIVDEVAYHEKYPTIYHLRKKLVDSTDKADLRLIYLALAHMIKFRGHFLIEGDLNPDNSDVDKLFIQLVQTYNQLFEENPINASGVDAKAILSARLSKSRRLENLIAQLPGEKKNGLFGNLIALSLGLTPNFKSNFDLAEDAKLQLSKDTYDDDLDNLLAQIGDQYADLFLAAKNLSDAILLSDILRVNTEITKAPLSASMIKRYDEHHQDLTLLKALVRQQLPEKYKEIFFDQSKNGYAGYIDGGASQEEFYKFIKPILEKMDGTEELLVKLNREDLLRKQRTFDNGSIPHQIHLGELHAILRRQEDFYPFLKDNREKIEKILTFRIPYYVGPLARGNSRFAWMTRKSEETITPWNFEEVVDKGASAQSFIERMTNFDKNLPNEKVLPKHSLLYEYFTVYNELTKVKYVTEGMRKPAFLSGEQKKAIVDLLFKTNRKVTVKQLKEDYFKKIECFDSVEISGVEDRFNASLGTYHDLLKIIKDKDFLDNEENEDILEDIVLTLTLFEDREMIEERLKTYAHLFDDKVMKQLKRRRYTGWGRLSRKLINGIRDKQSGKTILDFLKSDGFANRNFMQLIHDDSLTFKEDIQKAQVSGQGDSLHEHIANLAGSPAIKKGILQTVKVVDELVKVMGRHKPENIVIEMARENQTTQKGQKNSRERMKRIEEGIKELGSQILKEHPVENTQLQNEKLYLYYLQNGRDMYVDQELDINRLSDYDVDHIVPQSFLKDDSIDNKVLTRSDKARGKSDNVPSEEVVKKMKNYWRQLLNAKLITQRKFDNLTKAERGGLSELDKAGFIKRQLVETRQITKHVAQILDSRMNTKYDENDKLIREVKVITLKSKLVSDFRKDFQFYKVREINNYHHAHDAYLNAVVGTALIKKYPKLESEFVYGDYKVYDVRKMIAKSEQEIGKATAKYFFYSNIMNFFKTEITLANGEIRKRPLIETNGETGEIVWDKGRDFATVRKVLSMPQVNIVKKTEVQTGGFSKESILPKRNSDKLIARKKDWDPKKYGGFDSPTVAYSVLVVAKVEKGKSKKLKSVKELLGITIMERSSFEKNPIDFLEAKGYKEVKKDLIIKLPKYSLFELENGRKRMLASAGELQKGNELALPSKYVNFLYLASHYEKLKGSPEDNEQKQLFVEQHKHYLDEIIEQISEFSKRVILADANLDKVLSAYNKHRDKPIREQAENIIHLFTLTNLGAPAAFKYFDTTIDRKRYTSTKEVLDATLIHQSITGLYETRIDLSQLGGDGGEAAAKGGGGSEAAAKGGTLNIEDEHRLHETSKEPDVSLGSTWLSDFPQAWAETGGMGLAVRQAPLIIPLKATSTPVSIKQYPMSQEARLGIKPHIQRLLDQGILVPCQSPWNTPLLPVKKPGTNDYRPVQDLREVNKRVEDIHPTVPNPYNLLSGLPPSHQWYTVLDLKDAFFCLRLHPTSQPLFAFEWRDPEMGISGQLTWTRLPQGFKNSPTLFNEALHRDLADFRIQHPDLILLQYVDDLLLAATSELDCQQGTRALLQTLGNLGYRASAKKAQICQKQVKYLGYLLKEGQRWLTEARKETVMGQPTPKTPRQLREFLGTAGFCRLWIPGFAEMAAPLYPLTKPGTLFNWGPDQQKAYQEIKQALLTAPALGLPDLTKPFELFVDEKQGYAKGVLTQKLGPWRRPVAYLSKKLDPVAAGWPPCLRMVAAIAVLTKDAGKLTMGQPLVILAPHAVEALVKQPPDRWLSNARMTHYQALLLDTDRVQFGPVVALNPATLLPLPEEGLQHNCLDILAEAHGTRPDLTDQPLPDADHTWYTDGSSLLQEGQRKAGAAVTTETEVIWAKALPAGTSAQRAELIALTQALKMAEGKKLNVYTDSRYAFATAHIHGEIYRRRGWLTSEGKEIKNKDEILALLKALFLPKRLSIIHCPGHQKGHSAEARGNRMADQAARKAAITETPDTSTLLAGKRTADGSEFEKRTADGSEFESPKKKAKVE

SEQ ID NO: 2713 - protein, 2096 aa, synthetic construct
  source 1..2096: note = Description of Artificial Sequence: Synthetic polypeptide
MPAAKRVKLDGGDKKYSIGLDIGTNSVGWAVITDEYKVPSKKFKVLGNTDRHSIKKNLIGALLFDSGETAEATRLKRTARRRYTRRKNRICYLQEIFSNEMAKVDDSFFHRLEESFLVEEDKKHERHPIFGNIVDEVAYHEKYPTIYHLRKKLVDSTDKADLRLIYLALAHMIKFRGHFLIEGDLNPDNSDVDKLFIQLVQTYNQLFEENPINASGVDAKAILSARLSKSRRLENLIAQLPGEKKNGLFGNLIALSLGLTPNFKSNFDLAEDAKLQLSKDTYDDDLDNLLAQIGDQYADLFLAAKNLSDAILLSDILRVNTEITKAPLSASMIKRYDEHHQDLTLLKALVRQQLPEKYKEIFFDQSKNGYAGYIDGGASQEEFYKFIKPILEKMDGTEELLVKLNREDLLRKQRTFDNGSIPHQIHLGELHAILRRQEDFYPFLKDNREKIEKILTFRIPYYVGPLARGNSRFAWMTRKSEETITPWNFEEVVDKGASAQSFIERMTNFDKNLPNEKVLPKHSLLYEYFTVYNELTKVKYVTEGMRKPAFLSGEQKKAIVDLLFKTNRKVTVKQLKEDYFKKIECFDSVEISGVEDRFNASLGTYHDLLKIIKDKDFLDNEENEDILEDIVLTLTLFEDREMIEERLKTYAHLFDDKVMKQLKRRRYTGWGRLSRKLINGIRDKQSGKTILDFLKSDGFANRNFMQLIHDDSLTFKEDIQKAQVSGQGDSLHEHIANLAGSPAIKKGILQTVKVVDELVKVMGRHKPENIVIEMARENQTTQKGQKNSRERMKRIEEGIKELGSQILKEHPVENTQLQNEKLYLYYLQNGRDMYVDQELDINRLSDYDVDHIVPQSFLKDDSIDNKVLTRSDKARGKSDNVPSEEVVKKMKNYWRQLLNAKLITQRKFDNLTKAERGGLSELDKAGFIKRQLVETRQITKHVAQILDSRMNTKYDENDKLIREVKVITLKSKLVSDFRKDFQFYKVREINNYHHAHDAYLNAVVGTALIKKYPKLESEFVYGDYKVYDVRKMIAKSEQEIGKATAKYFFYSNIMNFFKTEITLANGEIRKRPLIETNGETGEIVWDKGRDFATVRKVLSMPQVNIVKKTEVQTGGFSKESILPKRNSDKLIARKKDWDPKKYGGFDSPTVAYSVLVVAKVEKGKSKKLKSVKELLGITIMERSSFEKNPIDFLEAKGYKEVKKDLIIKLPKYSLFELENGRKRMLASAGELQKGNELALPSKYVNFLYLASHYEKLKGSPEDNEQKQLFVEQHKHYLDEIIEQISEFSKRVILADANLDKVLSAYNKHRDKPIREQAENIIHLFTLTNLGAPAAFKYFDTTIDRKRYTSTKEVLDATLIHQSITGLYETRIDLSQLGGDGGGGSEAAAKGGGGGTLNIEDEHRLHETSKEPDVSLGSTWLSDFPQAWAETGGMGLAVRQAPLIIPLKATSTPVSIKQYPMSQEARLGIKPHIQRLLDQGILVPCQSPWNTPLLPVKKPGTNDYRPVQDLREVNKRVEDIHPTVPNPYNLLSGLPPSHQWYTVLDLKDAFFCLRLHPTSQPLFAFEWRDPEMGISGQLTWTRLPQGFKNSPTLFNEALHRDLADFRIQHPDLILLQYVDDLLLAATSELDCQQGTRALLQTLGNLGYRASAKKAQICQKQVKYLGYLLKEGQRWLTEARKETVMGQPTPKTPRQLREFLGTAGFCRLWIPGFAEMAAPLYPLTKPGTLFNWGPDQQKAYQEIKQALLTAPALGLPDLTKPFELFVDEKQGYAKGVLTQKLGPWRRPVAYLSKKLDPVAAGWPPCLRMVAAIAVLTKDAGKLTMGQPLVILAPHAVEALVKQPPDRWLSNARMTHYQALLLDTDRVQFGPVVALNPATLLPLPEEGLQHNCLDILAEAHGTRPDLTDQPLPDADHTWYTDGSSLLQEGQRKAGAAVTTETEVIWAKALPAGTSAQRAELIALTQALKMAEGKKLNVYTDSRYAFATAHIHGEIYRRRGWLTSEGKEIKNKDEILALLKALFLPKRLSIIHCPGHQKGHSAEARGNRMADQAARKAAITETPDTSTLLAGKRTADGSEFEKRTADGSEFESPKKKAKVE

SEQ ID NO: 2714 - protein, 2096 aa, synthetic construct
  source 1..2096: note = Description of Artificial Sequence: Synthetic polypeptide
MPAAKRVKLDGGDKKYSIGLDIGTNSVGWAVITDEYKVPSKKFKVLGNTDRHSIKKNLIGALLFDSGETAEATRLKRTARRRYTRRKNRICYLQEIFSNEMAKVDDSFFHRLEESFLVEEDKKHERHPIFGNIVDEVAYHEKYPTIYHLRKKLVDSTDKADLRLIYLALAHMIKFRGHFLIEGDLNPDNSDVDKLFIQLVQTYNQLFEENPINASGVDAKAILSARLSKSRRLENLIAQLPGEKKNGLFGNLIALSLGLTPNFKSNFDLAEDAKLQLSKDTYDDDLDNLLAQIGDQYADLFLAAKNLSDAILLSDILRVNTEITKAPLSASMIKRYDEHHQDLTLLKALVRQQLPEKYKEIFFDQSKNGYAGYIDGGASQEEFYKFIKPILEKMDGTEELLVKLNREDLLRKQRTFDNGSIPHQIHLGELHAILRRQEDFYPFLKDNREKIEKILTFRIPYYVGPLARGNSRFAWMTRKSEETITPWNFEEVVDKGASAQSFIERMTNFDKNLPNEKVLPKHSLLYEYFTVYNELTKVKYVTEGMRKPAFLSGEQKKAIVDLLFKTNRKVTVKQLKEDYFKKIECFDSVEISGVEDRFNASLGTYHDLLKIIKDKDFLDNEENEDILEDIVLTLTLFEDREMIEERLKTYAHLFDDKVMKQLKRRRYTGWGRLSRKLINGIRDKQSGKTILDFLKSDGFANRNFMQLIHDDSLTFKEDIQKAQVSGQGDSLHEHIANLAGSPAIKKGILQTVKVVDELVKVMGRHKPENIVIEMARENQTTQKGQKNSRERMKRIEEGIKELGSQILKEHPVENTQLQNEKLYLYYLQNGRDMYVDQELDINRLSDYDVDHIVPQSFLKDDSIDNKVLTRSDKARGKSDNVPSEEVVKKMKNYWRQLLNAKLITQRKFDNLTKAERGGLSELDKAGFIKRQLVETRQITKHVAQILDSRMNTKYDENDKLIREVKVITLKSKLVSDFRKDFQFYKVREINNYHHAHDAYLNAVVGTALIKKYPKLESEFVYGDYKVYDVRKMIAKSEQEIGKATAKYFFYSNIMNFFKTEITLANGEIRKRPLIETNGETGEIVWDKGRDFATVRKVLSMPQVNIVKKTEVQTGGFSKESILPKRNSDKLIARKKDWDPKKYGGFDSPTVAYSVLVVAKVEKGKSKKLKSVKELLGITIMERSSFEKNPIDFLEAKGYKEVKKDLIIKLPKYSLFELENGRKRMLASAGELQKGNELALPSKYVNFLYLASHYEKLKGSPEDNEQKQLFVEQHKHYLDEIIEQISEFSKRVILADANLDKVLSAYNKHRDKPIREQAENIIHLFTLTNLGAPAAFKYFDTTIDRKRYTSTKEVLDATLIHQSITGLYETRIDLSQLGGDGGEAAAKPAPGGSGGTLNIEDEHRLHETSKEPDVSLGSTWLSDFPQAWAETGGMGLAVRQAPLIIPLKATSTPVSIKQYPMSQEARLGIKPHIQRLLDQGILVPCQSPWNTPLLPVKKPGTNDYRPVQDLREVNKRVEDIHPTVPNPYNLLSGLPPSHQWYTVLDLKDAFFCLRLHPTSQPLFAFEWRDPEMGISGQLTWTRLPQGFKNSPTLFNEALHRDLADFRIQHPDLILLQYVDDLLLAATSELDCQQGTRALLQTLGNLGYRASAKKAQICQKQVKYLGYLLKEGQRWLTEARKETVMGQPTPKTPRQLREFLGTAGFCRLWIPGFAEMAAPLYPLTKPGTLFNWGPDQQKAYQEIKQALLTAPALGLPDLTKPFELFVDEKQGYAKGVLTQKLGPWRRPVAYLSKKLDPVAAGWPPCLRMVAAIAVLTKDAGKLTMGQPLVILAPHAVEALVKQPPDRWLSNARMTHYQALLLDTDRVQFGPVVALNPATLLPLPEEGLQHNCLDILAEAHGTRPDLTDQPLPDADHTWYTDGSSLLQEGQRKAGAAVTTETEVIWAKALPAGTSAQRAELIALTQALKMAEGKKLNVYTDSRYAFATAHIHGEIYRRRGWLTSEGKEIKNKDEILALLKALFLPKRLSIIHCPGHQKGHSAEARGNRMADQAARKAAITETPDTSTLLAGKRTADGSEFEKRTADGSEFESPKKKAKVE

SEQ ID NO: 2715 - protein, 2094 aa, synthetic construct
  source 1..2094: note = Description of Artificial Sequence: Synthetic polypeptide
MPAAKRVKLDGGDKKYSIGLDIGTNSVGWAVITDEYKVPSKKFKVLGNTDRHSIKKNLIGALLFDSGETAEATRLKRTARRRYTRRKNRICYLQEIFSNEMAKVDDSFFHRLEESFLVEEDKKHERHPIFGNIVDEVAYHEKYPTIYHLRKKLVDSTDKADLRLIYLALAHMIKFRGHFLIEGDLNPDNSDVDKLFIQLVQTYNQLFEENPINASGVDAKAILSARLSKSRRLENLIAQLPGEKKNGLFGNLIALSLGLTPNFKSNFDLAEDAKLQLSKDTYDDDLDNLLAQIGDQYADLFLAAKNLSDAILLSDILRVNTEITKAPLSASMIKRYDEHHQDLTLLKALVRQQLPEKYKEIFFDQSKNGYAGYIDGGASQEEFYKFIKPILEKMDGTEELLVKLNREDLLRKQRTFDNGSIPHQIHLGELHAILRRQEDFYPFLKDNREKIEKILTFRIPYYVGPLARGNSRFAWMTRKSEETITPWNFEEVVDKGASAQSFIERMTNFDKNLPNEKVLPKHSLLYEYFTVYNELTKVKYVTEGMRKPAFLSGEQKKAIVDLLFKTNRKVTVKQLKEDYFKKIECFDSVEISGVEDRFNASLGTYHDLLKIIKDKDFLDNEENEDILEDIVLTLTLFEDREMIEERLKTYAHLFDDKVMKQLKRRRYTGWGRLSRKLINGIRDKQSGKTILDFLKSDGFANRNFMQLIHDDSLTFKEDIQKAQVSGQGDSLHEHIANLAGSPAIKKGILQTVKVVDELVKVMGRHKPENIVIEMARENQTTQKGQKNSRERMKRIEEGIKELGSQILKEHPVENTQLQNEKLYLYYLQNGRDMYVDQELDINRLSDYDVDHIVPQSFLKDDSIDNKVLTRSDKARGKSDNVPSEEVVKKMKNYWRQLLNAKLITQRKFDNLTKAERGGLSELDKAGFIKRQLVETRQITKHVAQILDSRMNTKYDENDKLIREVKVITLKSKLVSDFRKDFQFYKVREINNYHHAHDAYLNAVVGTALIKKYPKLESEFVYGDYKVYDVRKMIAKSEQEIGKATAKYFFYSNIMNFFKTEITLANGEIRKRPLIETNGETGEIVWDKGRDFATVRKVLSMPQVNIVKKTEVQTGGFSKESILPKRNSDKLIARKKDWDPKKYGGFDSPTVAYSVLVVAKVEKGKSKKLKSVKELLGITIMERSSFEKNPIDFLEAKGYKEVKKDLIIKLPKYSLFELENGRKRMLASAGELQKGNELALPSKYVNFLYLASHYEKLKGSPEDNEQKQLFVEQHKHYLDEIIEQISEFSKRVILADANLDKVLSAYNKHRDKPIREQAENIIHLFTLTNLGAPAAFKYFDTTIDRKRYTSTKEVLDATLIHQSITGLYETRIDLSQLGGDGGGSSGGGGGSGGTLNIEDEHRLHETSKEPDVSLGSTWLSDFPQAWAETGGMGLAVRQAPLIIPLKATSTPVSIKQYPMSQEARLGIKPHIQRLLDQGILVPCQSPWNTPLLPVKKPGTNDYRPVQDLREVNKRVEDIHPTVPNPYNLLSGLPPSHQWYTVLDLKDAFFCLRLHPTSQPLFAFEWRDPEMGISGQLTWTRLPQGFKNSPTLFNEALHRDLADFRIQHPDLILLQYVDDLLLAATSELDCQQGTRALLQTLGNLGYRASAKKAQICQKQVKYLGYLLKEGQRWLTEARKETVMGQPTPKTPRQLREFLGTAGFCRLWIPGFAEMAAPLYPLTKPGTLFNWGPDQQKAYQEIKQALLTAPALGLPDLTKPFELFVDEKQGYAKGVLTQKLGPWRRPVAYLSKKLDPVAAGWPPCLRMVAAIAVLTKDAGKLTMGQPLVILAPHAVEALVKQPPDRWLSNARMTHYQALLLDTDRVQFGPVVALNPATLLPLPEEGLQHNCLDILAEAHGTRPDLTDQPLPDADHTWYTDGSSLLQEGQRKAGAAVTTETEVIWAKALPAGTSAQRAELIALTQALKMAEGKKLNVYTDSRYAFATAHIHGEIYRRRGWLTSEGKEIKNKDEILALLKALFLPKRLSIIHCPGHQKGHSAEARGNRMADQAARKAAITETPDTSTLLAGKRTADGSEFEKRTADGSEFESPKKKAKVE

SEQ ID NO: 2716 - protein, 2110 aa, synthetic construct
  source 1..2110: note = Description of Artificial Sequence: Synthetic polypeptide
MPAAKRVKLDGGDKKYSIGLDIGTNSVGWAVITDEYKVPSKKFKVLGNTDRHSIKKNLIGALLFDSGETAEATRLKRTARRRYTRRKNRICYLQEIFSNEMAKVDDSFFHRLEESFLVEEDKKHERHPIFGNIVDEVAYHEKYPTIYHLRKKLVDSTDKADLRLIYLALAHMIKFRGHFLIEGDLNPDNSDVDKLFIQLVQTYNQLFEENPINASGVDAKAILSARLSKSRRLENLIAQLPGEKKNGLFGNLIALSLGLTPNFKSNFDLAEDAKLQLSKDTYDDDLDNLLAQIGDQYADLFLAAKNLSDAILLSDILRVNTEITKAPLSASMIKRYDEHHQDLTLLKALVRQQLPEKYKEIFFDQSKNGYAGYIDGGASQEEFYKFIKPILEKMDGTEELLVKLNREDLLRKQRTFDNGSIPHQIHLGELHAILRRQEDFYPFLKDNREKIEKILTFRIPYYVGPLARGNSRFAWMTRKSEETITPWNFEEVVDKGASAQSFIERMTNFDKNLPNEKVLPKHSLLYEYFTVYNELTKVKYVTEGMRKPAFLSGEQKKAIVDLLFKTNRKVTVKQLKEDYFKKIECFDSVEISGVEDRFNASLGTYHDLLKIIKDKDFLDNEENEDILEDIVLTLTLFEDREMIEERLKTYAHLFDDKVMKQLKRRRYTGWGRLSRKLINGIRDKQSGKTILDFLKSDGFANRNFMQLIHDDSLTFKEDIQKAQVSGQGDSLHEHIANLAGSPAIKKGILQTVKVVDELVKVMGRHKPENIVIEMARENQTTQKGQKNSRERMKRIEEGIKELGSQILKEHPVENTQLQNEKLYLYYLQNGRDMYVDQELDINRLSDYDVDHIVPQSFLKDDSIDNKVLTRSDKARGKSDNVPSEEVVKKMKNYWRQLLNAKLITQRKFDNLTKAERGGLSELDKAGFIKRQLVETRQITKHVAQILDSRMNTKYDENDKLIREVKVITLKSKLVSDFRKDFQFYKVREINNYHHAHDAYLNAVVGTALIKKYPKLESEFVYGDYKVYDVRKMIAKSEQEIGKATAKYFFYSNIMNFFKTEITLANGEIRKRPLIETNGETGEIVWDKGRDFATVRKVLSMPQVNIVKKTEVQTGGFSKESILPKRNSDKLIARKKDWDPKKYGGFDSPTVAYSVLVVAKVEKGKSKKLKSVKELLGITIMERSSFEKNPIDFLEAKGYKEVKKDLIIKLPKYSLFELENGRKRMLASAGELQKGNELALPSKYVNFLYLASHYEKLKGSPEDNEQKQLFVEQHKHYLDEIIEQISEFSKRVILADANLDKVLSAYNKHRDKPIREQAENIIHLFTLTNLGAPAAFKYFDTTIDRKRYTSTKEVLDATLIHQSITGLYETRIDLSQLGGDGGEAAAKEAAAKEAAAKEAAAKEAAAKGGTLNIEDEHRLHETSKEPDVSLGSTWLSDFPQAWAETGGMGLAVRQAPLIIPLKATSTPVSIKQYPMSQEARLGIKPHIQRLLDQGILVPCQSPWNTPLLPVKKPGTNDYRPVQDLREVNKRVEDIHPTVPNPYNLLSGLPPSHQWYTVLDLKDAFFCLRLHPTSQPLFAFEWRDPEMGISGQLTWTRLPQGFKNSPTLFNEALHRDLADFRIQHPDLILLQYVDDLLLAATSELDCQQGTRALLQTLGNLGYRASAKKAQICQKQVKYLGYLLKEGQRWLTEARKETVMGQPTPKTPRQLREFLGTAGFCRLWIPGFAEMAAPLYPLTKPGTLFNWGPDQQKAYQEIKQALLTAPALGLPDLTKPFELFVDEKQGYAKGVLTQKLGPWRRPVAYLSKKLDPVAAGWPPCLRMVAAIAVLTKDAGKLTMGQPLVILAPHAVEALVKQPPDRWLSNARMTHYQALLLDTDRVQFGPVVALNPATLLPLPEEGLQHNCLDILAEAHGTRPDLTDQPLPDADHTWYTDGSSLLQEGQRKAGAAVTTETEVIWAKALPAGTSAQRAELIALTQALKMAEGKKLNVYTDSRYAFATAHIHGEIYRRRGWLTSEGKEIKNKDEILALLKALFLPKRLSIIHCPGHQKGHSAEARGNRMADQAARKAAITETPDTSTLLAGKRTADGSEFEKRTADGSEFESPKKKAKVE

SEQ ID NO: 2717 - protein, 2091 aa, synthetic construct
  source 1..2091: note = Description of Artificial Sequence: Synthetic polypeptide
MPAAKRVKLDGGDKKYSIGLDIGTNSVGWAVITDEYKVPSKKFKVLGNTDRHSIKKNLIGALLFDSGETAEATRLKRTARRRYTRRKNRICYLQEIFSNEMAKVDDSFFHRLEESFLVEEDKKHERHPIFGNIVDEVAYHEKYPTIYHLRKKLVDSTDKADLRLIYLALAHMIKFRGHFLIEGDLNPDNSDVDKLFIQLVQTYNQLFEENPINASGVDAKAILSARLSKSRRLENLIAQLPGEKKNGLFGNLIALSLGLTPNFKSNFDLAEDAKLQLSKDTYDDDLDNLLAQIGDQYADLFLAAKNLSDAILLSDILRVNTEITKAPLSASMIKRYDEHHQDLTLLKALVRQQLPEKYKEIFFDQSKNGYAGYIDGGASQEEFYKFIKPILEKMDGTEELLVKLNREDLLRKQRTFDNGSIPHQIHLGELHAILRRQEDFYPFLKDNREKIEKILTFRIPYYVGPLARGNSRFAWMTRKSEETITPWNFEEVVDKGASAQSFIERMTNFDKNLPNEKVLPKHSLLYEYFTVYNELTKVKYVTEGMRKPAFLSGEQKKAIVDLLFKTNRKVTVKQLKEDYFKKIECFDSVEISGVEDRFNASLGTYHDLLKIIKDKDFLDNEENEDILEDIVLTLTLFEDREMIEERLKTYAHLFDDKVMKQLKRRRYTGWGRLSRKLINGIRDKQSGKTILDFLKSDGFANRNFMQLIHDDSLTFKEDIQKAQVSGQGDSLHEHIANLAGSPAIKKGILQTVKVVDELVKVMGRHKPENIVIEMARENQTTQKGQKNSRERMKRIEEGIKELGSQILKEHPVENTQLQNEKLYLYYLQNGRDMYVDQELDINRLSDYDVDHIVPQSFLKDDSIDNKVLTRSDKARGKSDNVPSEEVVKKMKNYWRQLLNAKLITQRKFDNLTKAERGGLSELDKAGFIKRQLVETRQITKHVAQILDSRMNTKYDENDKLIREVKVITLKSKLVSDFRKDFQFYKVREINNYHHAHDAYLNAVVGTALIKKYPKLESEFVYGDYKVYDVRKMIAKSEQEIGKATAKYFFYSNIMNFFKTEITLANGEIRKRPLIETNGETGEIVWDKGRDFATVRKVLSMPQVNIVKKTEVQTGGFSKESILPKRNSDKLIARKKDWDPKKYGGFDSPTVAYSVLVVAKVEKGKSKKLKSVKELLGITIMERSSFEKNPIDFLEAKGYKEVKKDLIIKLPKYSLFELENGRKRMLASAGELQKGNELALPSKYVNFLYLASHYEKLKGSPEDNEQKQLFVEQHKHYLDEIIEQISEFSKRVILADANLDKVLSAYNKHRDKPIREQAENIIHLFTLTNLGAPAAFKYFDTTIDRKRYTSTKEVLDATLIHQSITGLYETRIDLSQLGGDGGGGGGGSGGTLNIEDEHRLHETSKEPDVSLGSTWLSDFPQAWAETGGMGLAVRQAPLIIPLKATSTPVSIKQYPMSQEARLGIKPHIQRLLDQGILVPCQSPWNTPLLPVKKPGTNDYRPVQDLREVNKRVEDIHPTVPNPYNLLSGLPPSHQWYTVLDLKDAFFCLRLHPTSQPLFAFEWRDPEMGISGQLTWTRLPQGFKNSPTLFNEALHRDLADFRIQHPDLILLQYVDDLLLAATSELDCQQGTRALLQTLGNLGYRASAKKAQICQKQVKYLGYLLKEGQRWLTEARKETVMGQPTPKTPRQLREFLGTAGFCRLWIPGFAEMAAPLYPLTKPGTLFNWGPDQQKAYQEIKQALLTAPALGLPDLTKPFELFVDEKQGYAKGVLTQKLGPWRRPVAYLSKKLDPVAAGWPPCLRMVAAIAVLTKDAGKLTMGQPLVILAPHAVEALVKQPPDRWLSNARMTHYQALLLDTDRVQFGPVVALNPATLLPLPEEGLQHNCLDILAEAHGTRPDLTDQPLPDADHTWYTDGSSLLQEGQRKAGAAVTTETEVIWAKALPAGTSAQRAELIALTQALKMAEGKKLNVYTDSRYAFATAHIHGEIYRRRGWLTSEGKEIKNKDEILALLKALFLPKRLSIIHCPGHQKGHSAEARGNRMADQAARKAAITETPDTSTLLAGKRTADGSEFEKRTADGSEFESPKKKAKVE

SEQ ID NO: 2718 - protein, 2093 aa, synthetic construct
  source 1..2093: note = Description of Artificial Sequence: Synthetic polypeptide
MPAAKRVKLDGGDKKYSIGLDIGTNSVGWAVITDEYKVPSKKFKVLGNTDRHSIKKNLIGALLFDSGETAEATRLKRTARRRYTRRKNRICYLQEIFSNEMAKVDDSFFHRLEESFLVEEDKKHERHPIFGNIVDEVAYHEKYPTIYHLRKKLVDSTDKADLRLIYLALAHMIKFRGHFLIEGDLNPDNSDVDKLFIQLVQTYNQLFEENPINASGVDAKAILSARLSKSRRLENLIAQLPGEKKNGLFGNLIALSLGLTPNFKSNFDLAEDAKLQLSKDTYDDDLDNLLAQIGDQYADLFLAAKNLSDAILLSDILRVNTEITKAPLSASMIKRYDEHHQDLTLLKALVRQQLPEKYKEIFFDQSKNGYAGYIDGGASQEEFYKFIKPILEKMDGTEELLVKLNREDLLRKQRTFDNGSIPHQIHLGELHAILRRQEDFYPFLKDNREKIEKILTFRIPYYVGPLARGNSRFAWMTRKSEETITPWNFEEVVDKGASAQSFIERMTNFDKNLPNEKVLPKHSLLYEYFTVYNELTKVKYVTEGMRKPAFLSGEQKKAIVDLLFKTNRKVTVKQLKEDYFKKIECFDSVEISGVEDRFNASLGTYHDLLKIIKDKDFLDNEENEDILEDIVLTLTLFEDREMIEERLKTYAHLFDDKVMKQLKRRRYTGWGRLSRKLINGIRDKQSGKTILDFLKSDGFANRNFMQLIHDDSLTFKEDIQKAQVSGQGDSLHEHIANLAGSPAIKKGILQTVKVVDELVKVMGRHKPENIVIEMARENQTTQKGQKNSRERMKRIEEGIKELGSQILKEHPVENTQLQNEKLYLYYLQNGRDMYVDQELDINRLSDYDVDHIVPQSFLKDDSIDNKVLTRSDKARGKSDNVPSEEVVKKMKNYWRQLLNAKLITQRKFDNLTKAERGGLSELDKAGFIKRQLVETRQITKHVAQILDSRMNTKYDENDKLIREVKVITLKSKLVSDFRKDFQFYKVREINNYHHAHDAYLNAVVGTALIKKYPKLESEFVYGDYKVYDVRKMIAKSEQEIGKATAKYFFYSNIMNFFKTEITLANGEIRKRPLIETNGETGEIVWDKGRDFATVRKVLSMPQVNIVKKTEVQTGGFSKESILPKRNSDKLIARKKDWDPKKYGGFDSPTVAYSVLVVAKVEKGKSKKLKSVKELLGITIMERSSFEKNPIDFLEAKGYKEVKKDLIIKLPKYSLFELENGRKRMLASAGELQKGNELALPSKYVNFLYLASHYEKLKGSPEDNEQKQLFVEQHKHYLDEIIEQISEFSKRVILADANLDKVLSAYNKHRDKPIREQAENIIHLFTLTNLGAPAAFKYFDTTIDRKRYTSTKEVLDATLIHQSITGLYETRIDLSQLGGDGGGSSEAAAKGGTLNIEDEHRLHETSKEPDVSLGSTWLSDFPQAWAETGGMGLAVRQAPLIIPLKATSTPVSIKQYPMSQEARLGIKPHIQRLLDQGILVPCQSPWNTPLLPVKKPGTNDYRPVQDLREVNKRVEDIHPTVPNPYNLLSGLPPSHQWYTVLDLKDAFFCLRLHPTSQPLFAFEWRDPEMGISGQLTWTRLPQGFKNSPTLFNEALHRDLADFRIQHPDLILLQYVDDLLLAATSELDCQQGTRALLQTLGNLGYRASAKKAQICQKQVKYLGYLLKEGQRWLTEARKETVMGQPTPKTPRQLREFLGTAGFCRLWIPGFAEMAAPLYPLTKPGTLFNWGPDQQKAYQEIKQALLTAPALGLPDLTKPFELFVDEKQGYAKGVLTQKLGPWRRPVAYLSKKLDPVAAGWPPCLRMVAAIAVLTKDAGKLTMGQPLVILAPHAVEALVKQPPDRWLSNARMTHYQALLLDTDRVQFGPVVALNPATLLPLPEEGLQHNCLDILAEAHGTRPDLTDQPLPDADHTWYTDGSSLLQEGQRKAGAAVTTETEVIWAKALPAGTSAQRAELIALTQALKMAEGKKLNVYTDSRYAFATAHIHGEIYRRRGWLTSEGKEIKNKDEILALLKALFLPKRLSIIHCPGHQKGHSAEARGNRMADQAARKAAITETPDTSTLLAGKRTADGSEFEKRTADGSEFESPKKKAKVE

SEQ ID NO: 2719 - protein, 2096 aa, synthetic construct
  source 1..2096: note = Description of Artificial Sequence: Synthetic polypeptide
MPAAKRVKLDGGDKKYSIGLDIGTNSVGWAVITDEYKVPSKKFKVLGNTDRHSIKKNLIGALLFDSGETAEATRLKRTARRRYTRRKNRICYLQEIFSNEMAKVDDSFFHRLEESFLVEEDKKHERHPIFGNIVDEVAYHEKYPTIYHLRKKLVDSTDKADLRLIYLALAHMIKFRGHFLIEGDLNPDNSDVDKLFIQLVQTYNQLFEENPINASGVDAKAILSARLSKSRRLENLIAQLPGEKKNGLFGNLIALSLGLTPNFKSNFDLAEDAKLQLSKDTYDDDLDNLLAQIGDQYADLFLAAKNLSDAILLSDILRVNTEITKAPLSASMIKRYDEHHQDLTLLKALVRQQLPEKYKEIFFDQSKNGYAGYIDGGASQEEFYKFIKPILEKMDGTEELLVKLNREDLLRKQRTFDNGSIPHQIHLGELHAILRRQEDFYPFLKDNREKIEKILTFRIPYYVGPLARGNSRFAWMTRKSEETITPWNFEEVVDKGASAQSFIERMTNFDKNLPNEKVLPKHSLLYEYFTVYNELTKVKYVTEGMRKPAFLSGEQKKAIVDLLFKTNRKVTVKQLKEDYFKKIECFDSVEISGVEDRFNASLGTYHDLLKIIKDKDFLDNEENEDILEDIVLTLTLFEDREMIEERLKTYAHLFDDKVMKQLKRRRYTGWGRLSRKLINGIRDKQSGKTILDFLKSDGFANRNFMQLIHDDSLTFKEDIQKAQVSGQGDSLHEHIANLAGSPAIKKGILQTVKVVDELVKVMGRHKPENIVIEMARENQTTQKGQKNSRERMKRIEEGIKELGSQILKEHPVENTQLQNEKLYLYYLQNGRDMYVDQELDINRLSDYDVDHIVPQSFLKDDSIDNKVLTRSDKARGKSDNVPSEEVVKKMKNYWRQLLNAKLITQRKFDNLTKAERGGLSELDKAGFIKRQLVETRQITKHVAQILDSRMNTKYDENDKLIREVKVITLKSKLVSDFRKDFQFYKVREINNYHHAHDAYLNAVVGTALIKKYPKLESEFVYGDYKVYDVRKMIAKSEQEIGKATAKYFFYSNIMNFFKTEITLANGEIRKRPLIETNGETGEIVWDKGRDFATVRKVLSMPQVNIVKKTEVQTGGFSKESILPKRNSDKLIARKKDWDPKKYGGFDSPTVAYSVLVVAKVEKGKSKKLKSVKELLGITIMERSSFEKNPIDFLEAKGYKEVKKDLIIKLPKYSLFELENGRKRMLASAGELQKGNELALPSKYVNFLYLASHYEKLKGSPEDNEQKQLFVEQHKHYLDEIIEQISEFSKRVILADANLDKVLSAYNKHRDKPIREQAENIIHLFTLTNLGAPAAFKYFDTTIDRKRYTSTKEVLDATLIHQSITGLYETRIDLSQLGGDGGGGGEAAAKPAPGGTLNIEDEHRLHETSKEPDVSLGSTWLSDFPQAWAETGGMGLAVRQAPLIIPLKATSTPVSIKQYPMSQEARLGIKPHIQRLLDQGILVPCQSPWNTPLLPVKKPGTNDYRPVQDLREVNKRVEDIHPTVPNPYNLLSGLPPSHQWYTVLDLKDAFFCLRLHPTSQPLFAFEWRDPEMGISGQLTWTRLPQGFKNSPTLFNEALHRDLADFRIQHPDLILLQYVDDLLLAATSELDCQQGTRALLQTLGNLGYRASAKKAQICQKQVKYLGYLLKEGQRWLTEARKETVMGQPTPKTPRQLREFLGTAGFCRLWIPGFAEMAAPLYPLTKPGTLFNWGPDQQKAYQEIKQALLTAPALGLPDLTKPFELFVDEKQGYAKGVLTQKLGPWRRPVAYLSKKLDPVAAGWPPCLRMVAAIAVLTKDAGKLTMGQPLVILAPHAVEALVKQPPDRWLSNARMTHYQALLLDTDRVQFGPVVALNPATLLPLPEEGLQHNCLDILAEAHGTRPDLTDQPLPDADHTWYTDGSSLLQEGQRKAGAAVTTETEVIWAKALPAGTSAQRAELIALTQALKMAEGKKLNVYTDSRYAFATAHIHGEIYRRRGWLTSEGKEIKNKDEILALLKALFLPKRLSIIHCPGHQKGHSAEARGNRMADQAARKAAITETPDTSTLLAGKRTADGSEFEKRTADGSEFESPKKKAKVE

SEQ ID NO: 2720 - protein, 2105 aa, synthetic construct
  source 1..2105: note = Description of Artificial Sequence: Synthetic polypeptide
MPAAKRVKLDGGDKKYSIGLDIGTNSVGWAVITDEYKVPSKKFKVLGNTDRHSIKKNLIGALLFDSGETAEATRLKRTARRRYTRRKNRICYLQEIFSNEMAKVDDSFFHRLEESFLVEEDKKHERHPIFGNIVDEVAYHEKYPTIYHLRKKLVDSTDKADLRLIYLALAHMIKFRGHFLIEGDLNPDNSDVDKLFIQLVQTYNQLFEENPINASGVDAKAILSARLSKSRRLENLIAQLPGEKKNGLFGNLIALSLGLTPNFKSNFDLAEDAKLQLSKDTYDDDLDNLLAQIGDQYADLFLAAKNLSDAILLSDILRVNTEITKAPLSASMIKRYDEHHQDLTLLKALVRQQLPEKYKEIFFDQSKNGYAGYIDGGASQEEFYKFIKPILEKMDGTEELLVKLNREDLLRKQRTFDNGSIPHQIHLGELHAILRRQEDFYPFLKDNREKIEKILTFRIPYYVGPLARGNSRFAWMTRKSEETITPWNFEEVVDKGASAQSFIERMTNFDKNLPNEKVLPKHSLLYEYFTVYNELTKVKYVTEGMRKPAFLSGEQKKAIVDLLFKTNRKVTVKQLKEDYFKKIECFDSVEISGVEDRFNASLGTYHDLLKIIKDKDFLDNEENEDILEDIVLTLTLFEDREMIEERLKTYAHLFDDKVMKQLKRRRYTGWGRLSRKLINGIRDKQSGKTILDFLKSDGFANRNFMQLIHDDSLTFKEDIQKAQVSGQGDSLHEHIANLAGSPAIKKGILQTVKVVDELVKVMGRHKPENIVIEMARENQTTQKGQKNSRERMKRIEEGIKELGSQILKEHPVENTQLQNEKLYLYYLQNGRDMYVDQELDINRLSDYDVDHIVPQSFLKDDSIDNKVLTRSDKARGKSDNVPSEEVVKKMKNYWRQLLNAKLITQRKFDNLTKAERGGLSELDKAGFIKRQLVETRQITKHVAQILDSRMNTKYDENDKLIREVKVITLKSKLVSDFRKDFQFYKVREINNYHHAHDAYLNAVVGTALIKKYPKLESEFVYGDYKVYDVRKMIAKSEQEIGKATAKYFFYSNIMNFFKTEITLANGEIRKRPLIETNGETGEIVWDKGRDFATVRKVLSMPQVNIVKKTEVQTGGFSKESILPKRNSDKLIARKKDWDPKKYGGFDSPTVAYSVLVVAKVEKGKSKKLKSVKELLGITIMERSSFEKNPIDFLEAKGYKEVKKDLIIKLPKYSLFELENGRKRMLASAGELQKGNELALPSKYVNFLYLASHYEKLKGSPEDNEQKQLFVEQHKHYLDEIIEQISEFSKRVILADANLDKVLSAYNKHRDKPIREQAENIIHLFTLTNLGAPAAFKYFDTTIDRKRYTSTKEVLDATLIHQSITGLYETRIDLSQLGGDGGEAAAKEAAAKEAAAKEAAAKGGTLNIEDEHRLHETSKEPDVSLGSTWLSDFPQAWAETGGMGLAVRQAPLIIPLKATSTPVSIKQYPMSQEARLGIKPHIQRLLDQGILVPCQSPWNTPLLPVKKPGTNDYRPVQDLREVNKRVEDIHPTVPNPYNLLSGLPPSHQWYTVLDLKDAFFCLRLHPTSQPLFAFEWRDPEMGISGQLTWTRLPQGFKNSPTLFNEALHRDLADFRIQHPDLILLQYVDDLLLAATSELDCQQGTRALLQTLGNLGYRASAKKAQICQKQVKYLGYLLKEGQRWLTEARKETVMGQPTPKTPRQLREFLGTAGFCRLWIPGFAEMAAPLYPLTKPGTLFNWGPDQQKAYQEIKQALLTAPALGLPDLTKPFELFVDEKQGYAKGVLTQKLGPWRRPVAYLSKKLDPVAAGWPPCLRMVAAIAVLTKDAGKLTMGQPLVILAPHAVEALVKQPPDRWLSNARMTHYQALLLDTDRVQFGPVVALNPATLLPLPEEGLQHNCLDILAEAHGTRPDLTDQPLPDADHTWYTDGSSLLQEGQRKAGAAVTTETEVIWAKALPAGTSAQRAELIALTQALKMAEGKKLNVYTDSRYAFATAHIHGEIYRRRGWLTSEGKEIKNKDEILALLKALFLPKRLSIIHCPGHQKGHSAEARGNRMADQAARKAAITETPDTSTLLAGKRTADGSEFEKRTADGSEFESPKKKAKVE

SEQ ID NO: 2721 - protein, 2096 aa, synthetic construct
  source 1..2096: note = Description of Artificial Sequence: Synthetic polypeptide
MPAAKRVKLDGGDKKYSIGLDIGTNSVGWAVITDEYKVPSKKFKVLGNTDRHSIKKNLIGALLFDSGETAEATRLKRTARRRYTRRKNRICYLQEIFSNEMAKVDDSFFHRLEESFLVEEDKKHERHPIFGNIVDEVAYHEKYPTIYHLRKKLVDSTDKADLRLIYLALAHMIKFRGHFLIEGDLNPDNSDVDKLFIQLVQTYNQLFEENPINASGVDAKAILSARLSKSRRLENLIAQLPGEKKNGLFGNLIALSLGLTPNFKSNFDLAEDAKLQLSKDTYDDDLDNLLAQIGDQYADLFLAAKNLSDAILLSDILRVNTEITKAPLSASMIKRYDEHHQDLTLLKALVRQQLPEKYKEIFFDQSKNGYAGYIDGGASQEEFYKFIKPILEKMDGTEELLVKLNREDLLRKQRTFDNGSIPHQIHLGELHAILRRQEDFYPFLKDNREKIEKILTFRIPYYVGPLARGNSRFAWMTRKSEETITPWNFEEVVDKGASAQSFIERMTNFDKNLPNEKVLPKHSLLYEYFTVYNELTKVKYVTEGMRKPAFLSGEQKKAIVDLLFKTNRKVTVKQLKEDYFKKIECFDSVEISGVEDRFNASLGTYHDLLKIIKDKDFLDNEENEDILEDIVLTLTLFEDREMIEERLKTYAHLFDDKVMKQLKRRRYTGWGRLSRKLINGIRDKQSGKTILDFLKSDGFANRNFMQLIHDDSLTFKEDIQKAQVSGQGDSLHEHIANLAGSPAIKKGILQTVKVVDELVKVMGRHKPENIVIEMARENQTTQKGQKNSRERMKRIEEGIKELGSQILKEHPVENTQLQNEKLYLYYLQNGRDMYVDQELDINRLSDYDVDHIVPQSFLKDDSIDNKVLTRSDKARGKSDNVPSEEVVKKMKNYWRQLLNAKLITQRKFDNLTKAERGGLSELDKAGFIKRQLVETRQITKHVAQILDSRMNTKYDENDKLIREVKVITLKSKLVSDFRKDFQFYKVREINNYHHAHDAYLNAVVGTALIKKYPKLESEFVYGDYKVYDVRKMIAKSEQEIGKATAKYFFYSNIMNFFKTEITLANGEIRKRPLIETNGETGEIVWDKGRDFATVRKVLSMPQVNIVKKTEVQTGGFSKESILPKRNSDKLIARKKDWDPKKYGGFDSPTVAYSVLVVAKVEKGKSKKLKSVKELLGITIMERSSFEKNPIDFLEAKGYKEVKKDLIIKLPKYSLFELENGRKRMLASAGELQKGNELALPSKYVNFLYLASHYEKLKGSPEDNEQKQLFVEQHKHYLDEIIEQISEFSKRVILADANLDKVLSAYNKHRDKPIREQAENIIHLFTLTNLGAPAAFKYFDTTIDRKRYTSTKEVLDATLIHQSITGLYETRIDLSQLGGDGGGGGEAAAKGGSGGTLNIEDEHRLHETSKEPDVSLGSTWLSDFPQAWAETGGMGLAVRQAPLIIPLKATSTPVSIKQYPMSQEARLGIKPHIQRLLDQGILVPCQSPWNTPLLPVKKPGTNDYRPVQDLREVNKRVEDIHPTVPNPYNLLSGLPPSHQWYTVLDLKDAFFCLRLHPTSQPLFAFEWRDPEMGISGQLTWTRLPQGFKNSPTLFNEALHRDLADFRIQHPDLILLQYVDDLLLAATSELDCQQGTRALLQTLGNLGYRASAKKAQICQKQVKYLGYLLKEGQRWLTEARKETVMGQPTPKTPRQLREFLGTAGFCRLWIPGFAEMAAPLYPLTKPGTLFNWGPDQQKAYQEIKQALLTAPALGLPDLTKPFELFVDEKQGYAKGVLTQKLGPWRRPVAYLSKKLDPVAAGWPPCLRMVAAIAVLTKDAGKLTMGQPLVILAPHAVEALVKQPPDRWLSNARMTHYQALLLDTDRVQFGPVVALNPATLLPLPEEGLQHNCLDILAEAHGTRPDLTDQPLPDADHTWYTDGSSLLQEGQRKAGAAVTTETEVIWAKALPAGTSAQRAELIALTQALKMAEGKKLNVYTDSRYAFATAHIHGEIYRRRGWLTSEGKEIKNKDEILALLKALFLPKRLSIIHCPGHQKGHSAEARGNRMADQAARKAAITETPDTSTLLAGKRTADGSEFEKRTADGSEFESPKKKAKVE

SEQ ID NO: 2722 - protein, 2096 aa, synthetic construct
  source 1..2096: note = Description of Artificial Sequence: Synthetic polypeptide
MPAAKRVKLDGGDKKYSIGLDIGTNSVGWAVITDEYKVPSKKFKVLGNTDRHSIKKNLIGALLFDSGETAEATRLKRTARRRYTRRKNRICYLQEIFSNEMAKVDDSFFHRLEESFLVEEDKKHERHPIFGNIVDEVAYHEKYPTIYHLRKKLVDSTDKADLRLIYLALAHMIKFRGHFLIEGDLNPDNSDVDKLFIQLVQTYNQLFEENPINASGVDAKAILSARLSKSRRLENLIAQLPGEKKNGLFGNLIALSLGLTPNFKSNFDLAEDAKLQLSKDTYDDDLDNLLAQIGDQYADLFLAAKNLSDAILLSDILRVNTEITKAPLSASMIKRYDEHHQDLTLLKALVRQQLPEKYKEIFFDQSKNGYAGYIDGGASQEEFYKFIKPILEKMDGTEELLVKLNREDLLRKQRTFDNGSIPHQIHLGELHAILRRQEDFYPFLKDNREKIEKILTFRIPYYVGPLARGNSRFAWMTRKSEETITPWNFEEVVDKGASAQSFIERMTNFDKNLPNEKVLPKHSLLYEYFTVYNELTKVKYVTEGMRKPAFLSGEQKKAIVDLLFKTNRKVTVKQLKEDYFKKIECFDSVEISGVEDRFNASLGTYHDLLKIIKDKDFLDNEENEDILEDIVLTLTLFEDREMIEERLKTYAHLFDDKVMKQLKRRRYTGWGRLSRKLINGIRDKQSGKTILDFLKSDGFANRNFMQLIHDDSLTFKEDIQKAQVSGQGDSLHEHIANLAGSPAIKKGILQTVKVVDELVKVMGRHKPENIVIEMARENQTTQKGQKNSRERMKRIEEGIKELGSQILKEHPVENTQLQNEKLYLYYLQNGRDMYVDQELDINRLSDYDVDHIVPQSFLKDDSIDNKVLTRSDKARGKSDNVPSEEVVKKMKNYWRQLLNAKLITQRKFDNLTKAERGGLSELDKAGFIKRQLVETRQITKHVAQILDSRMNTKYDENDKLIREVKVITLKSKLVSDFRKDFQFYKVREINNYHHAHDAYLNAVVGTALIKKYPKLESEFVYGDYKVYDVRKMIAKSEQEIGKATAKYFFYSNIMNFFKTEITLANGEIRKRPLIETNGETGEIVWDKGRDFATVRKVLSMPQVNIVKKTEVQTGGFSKESILPKRNSDKLIARKKDWDPKKYGGFDSPTVAYSVLVVAKVEKGKSKKLKSVKELLGITIMERSSFEKNPIDFLEAKGYKEVKKDLIIKLPKYSLFELENGRKRMLASAGELQKGNELALPSKYVNFLYLASHYEKLKGSPEDNEQKQLFVEQHKHYLDEIIEQISEFSKRVILADANLDKVLSAYNKHRDKPIREQAENIIHLFTLTNLGAPAAFKYFDTTIDRKRYTSTKEVLDATLIHQSITGLYETRIDLSQLGGDGGGGGGGSEAAAKGGTLNIEDEHRLHETSKEPDVSLGSTWLSDFPQAWAETGGMGLAVRQAPLIIPLKATSTPVSIKQYPMSQEARLGIKPHIQRLLDQGILVPCQSPWNTPLLPVKKPGTNDYRPVQDLREVNKRVEDIHPTVPNPYNLLSGLPPSHQWYTVLDLKDAFFCLRLHPTSQPLFAFEWRDPEMGISGQLTWTRLPQGFKNSPTLFNEALHRDLADFRIQHPDLILLQYVDDLLLAATSELDCQQGTRALLQTLGNLGYRASAKKAQICQKQVKYLGYLLKEGQRWLTEARKETVMGQPTPKTPRQLREFLGTAGFCRLWIPGFAEMAAPLYPLTKPGTLFNWGPDQQKAYQEIKQALLTAPALGLPDLTKPFELFVDEKQGYAKGVLTQKLGPWRRPVAYLSKKLDPVAAGWPPCLRMVAAIAVLTKDAGKLTMGQPLVILAPHAVEALVKQPPDRWLSNARMTHYQALLLDTDRVQFGPVVALNPATLLPLPEEGLQHNCLDILAEAHGTRPDLTDQPLPDADHTWYTDGSSLLQEGQRKAGAAVTTETEVIWAKALPAGTSAQRAELIALTQALKMAEGKKLNVYTDSRYAFATAHIHGEIYRRRGWLTSEGKEIKNKDEILALLKALFLPKRLSIIHCPGHQKGHSAEARGNRMADQAARKAAITETPDTSTLLAGKRTADGSEFEKRTADGSEFESPKKKAKVE

SEQ ID NO: 2723 - protein, 2096 aa, synthetic construct
  source 1..2096: note = Description of Artificial Sequence: Synthetic polypeptide
MPAAKRVKLDGGDKKYSIGLDIGTNSVGWAVITDEYKVPSKKFKVLGNTDRHSIKKNLIGALLFDSGETAEATRLKRTARRRYTRRKNRICYLQEIFSNEMAKVDDSFFHRLEESFLVEEDKKHERHPIFGNIVDEVAYHEKYPTIYHLRKKLVDSTDKADLRLIYLALAHMIKFRGHFLIEGDLNPDNSDVDKLFIQLVQTYNQLFEENPINASGVDAKAILSARLSKSRRLENLIAQLPGEKKNGLFGNLIALSLGLTPNFKSNFDLAEDAKLQLSKDTYDDDLDNLLAQIGDQYADLFLAAKNLSDAILLSDILRVNTEITKAPLSASMIKRYDEHHQDLTLLKALVRQQLPEKYKEIFFDQSKNGYAGYIDGGASQEEFYKFIKPILEKMDGTEELLVKLNREDLLRKQRTFDNGSIPHQIHLGELHAILRRQEDFYPFLKDNREKIEKILTFRIPYYVGPLARGNSRFAWMTRKSEETITPWNFEEVVDKGASAQSFIERMTNFDKNLPNEKVLPKHSLLYEYFTVYNELTKVKYVTEGMRKPAFLSGEQKKAIVDLLFKTNRKVTVKQLKEDYFKKIECFDSVEISGVEDRFNASLGTYHDLLKIIKDKDFLDNEENEDILEDIVLTLTLFEDREMIEERLKTYAHLFDDKVMKQLKRRRYTGWGRLSRKLINGIRDKQSGKTILDFLKSDGFANRNFMQLIHDDSLTFKEDIQKAQVSGQGDSLHEHIANLAGSPAIKKGILQTVKVVDELVKVMGRHKPENIVIEMARENQTTQKGQKNSRERMKRIEEGIKELGSQILKEHPVENTQLQNEKLYLYYLQNGRDMYVDQELDINRLSDYDVDHIVPQSFLKDDSIDNKVLTRSDKARGKSDNVPSEEVVKKMKNYWRQLLNAKLITQRKFDNLTKAERGGLSELDKAGFIKRQLVETRQITKHVAQILDSRMNTKYDENDKLIREVKVITLKSKLVSDFRKDFQFYKVREINNYHHAHDAYLNAVVGTALIKKYPKLESEFVYGDYKVYDVRKMIAKSEQEIGKATAKYFFYSNIMNFFKTEITLANGEIRKRPLIETNGETGEIVWDKGRDFATVRKVLSMPQVNIVKKTEVQTGGFSKESILPKRNSDKLIARKKDWDPKKYGGFDSPTVAYSVLVVAKVEKGKSKKLKSVKELLGITIMERSSFEKNPIDFLEAKGYKEVKKDLIIKLPKYSLFELENGRKRMLASAGELQKGNELALPSKYVNFLYLASHYEKLKGSPEDNEQKQLFVEQHKHYLDEIIEQISEFSKRVILADANLDKVLSAYNKHRDKPIREQAENIIHLFTLTNLGAPAAFKYFDTTIDRKRYTSTKEVLDATLIHQSITGLYETRIDLSQLGGDGGEAAAKGSSPAPGGTLNIEDEHRLHETSKEPDVSLGSTWLSDFPQAWAETGGMGLAVRQAPLIIPLKATSTPVSIKQYPMSQEARLGIKPHIQRLLDQGILVPCQSPWNTPLLPVKKPGTNDYRPVQDLREVNKRVEDIHPTVPNPYNLLSGLPPSHQWYTVLDLKDAFFCLRLHPTSQPLFAFEWRDPEMGISGQLTWTRLPQGFKNSPTLFNEALHRDLADFRIQHPDLILLQYVDDLLLAATSELDCQQGTRALLQTLGNLGYRASAKKAQICQKQVKYLGYLLKEGQRWLTEARKETVMGQPTPKTPRQLREFLGTAGFCRLWIPGFAEMAAPLYPLTKPGTLFNWGPDQQKAYQEIKQALLTAPALGLPDLTKPFELFVDEKQGYAKGVLTQKLGPWRRPVAYLSKKLDPVAAGWPPCLRMVAAIAVLTKDAGKLTMGQPLVILAPHAVEALVKQPPDRWLSNARMTHYQALLLDTDRVQFGPVVALNPATLLPLPEEGLQHNCLDILAEAHGTRPDLTDQPLPDADHTWYTDGSSLLQEGQRKAGAAVTTETEVIWAKALPAGTSAQRAELIALTQALKMAEGKKLNVYTDSRYAFATAHIHGEIYRRRGWLTSEGKEIKNKDEILALLKALFLPKRLSIIHCPGHQKGHSAEARGNRMADQAARKAAITETPDTSTLLAGKRTADGSEFEKRTADGSEFESPKKKAKVE

SEQ ID NO: 2724 - protein, 2093 aa, synthetic construct
  source 1..2093: note = Description of Artificial Sequence: Synthetic polypeptide
MPAAKRVKLDGGDKKYSIGLDIGTNSVGWAVITDEYKVPSKKFKVLGNTDRHSIKKNLIGALLFDSGETAEATRLKRTARRRYTRRKNRICYLQEIFSNEMAKVDDSFFHRLEESFLVEEDKKHERHPIFGNIVDEVAYHEKYPTIYHLRKKLVDSTDKADLRLIYLALAHMIKFRGHFLIEGDLNPDNSDVDKLFIQLVQTYNQLFEENPINASGVDAKAILSARLSKSRRLENLIAQLPGEKKNGLFGNLIALSLGLTPNFKSNFDLAEDAKLQLSKDTYDDDLDNLLAQIGDQYADLFLAAKNLSDAILLSDILRVNTEITKAPLSASMIKRYDEHHQDLTLLKALVRQQLPEKYKEIFFDQSKNGYAGYIDGGASQEEFYKFIKPILEKMDGTEELLVKLNREDLLRKQRTFDNGSIPHQIHLGELHAILRRQEDFYPFLKDNREKIEKILTFRIPYYVGPLARGNSRFAWMTRKSEETITPWNFEEVVDKGASAQSFIERMTNFDKNLPNEKVLPKHSLLYEYFTVYNELTKVKYVTEGMRKPAFLSGEQKKAIVDLLFKTNRKVTVKQLKEDYFKKIECFDSVEISGVEDRFNASLGTYHDLLKIIKDKDFLDNEENEDILEDIVLTLTLFEDREMIEERLKTYAHLFDDKVMKQLKRRRYTGWGRLSRKLINGIRDKQSGKTILDFLKSDGFANRNFMQLIHDDSLTFKEDIQKAQVSGQGDSLHEHIANLAGSPAIKKGILQTVKVVDELVKVMGRHKPENIVIEMARENQTTQKGQKNSRERMKRIEEGIKELGSQILKEHPVENTQLQNEKLYLYYLQNGRDMYVDQELDINRLSDYDVDHIVPQSFLKDDSIDNKVLTRSDKARGKSDNVPSEEVVKKMKNYWRQLLNAKLITQRKFDNLTKAERGGLSELDKAGFIKRQLVETRQITKHVAQILDSRMNTKYDENDKLIREVKVITLKSKLVSDFRKDFQFYKVREINNYHHAHDAYLNAVVGTALIKKYPKLESEFVYGDYKVYDVRKMIAKSEQEIGKATAKYFFYSNIMNFFKTEITLANGEIRKRPLIETNGETGEIVWDKGRDFATVRKVLSMPQVNIVKKTEVQTGGFSKESILPKRNSDKLIARKKDWDPKKYGGFDSPTVAYSVLVVAKVEKGKSKKLKSVKELLGITIMERSSFEKNPIDFLEAKGYKEVKKDLIIKLPKYSLFELENGRKRMLASAGELQKGNELALPSKYVNFLYLASHYEKLKGSPEDNEQKQLFVEQHKHYLDEIIEQISEFSKRVILADANLDKVLSAYNKHRDKPIREQAENIIHLFTLTNLGAPAAFKYFDTTIDRKRYTSTKEVLDATLIHQSITGLYETRIDLSQLGGDGGEAAAKPAPGGTLNIEDEHRLHETSKEPDVSLGSTWLSDFPQAWAETGGMGLAVRQAPLIIPLKATSTPVSIKQYPMSQEARLGIKPHIQRLLDQGILVPCQSPWNTPLLPVKKPGTNDYRPVQDLREVNKRVEDIHPTVPNPYNLLSGLPPSHQWYTVLDLKDAFFCLRLHPTSQPLFAFEWRDPEMGISGQLTWTRLPQGFKNSPTLFNEALHRDLADFRIQHPDLILLQYVDDLLLAATSELDCQQGTRALLQTLGNLGYRASAKKAQICQKQVKYLGYLLKEGQRWLTEARKETVMGQPTPKTPRQLREFLGTAGFCRLWIPGFAEMAAPLYPLTKPGTLFNWGPDQQKAYQEIKQALLTAPALGLPDLTKPFELFVDEKQGYAKGVLTQKLGPWRRPVAYLSKKLDPVAAGWPPCLRMVAAIAVLTKDAGKLTMGQPLVILAPHAVEALVKQPPDRWLSNARMTHYQALLLDTDRVQFGPVVALNPATLLPLPEEGLQHNCLDILAEAHGTRPDLTDQPLPDADHTWYTDGSSLLQEGQRKAGAAVTTETEVIWAKALPAGTSAQRAELIALTQALKMAEGKKLNVYTDSRYAFATAHIHGEIYRRRGWLTSEGKEIKNKDEILALLKALFLPKRLSIIHCPGHQKGHSAEARGNRMADQAARKAAITETPDTSTLLAGKRTADGSEFEKRTADGSEFESPKKKAKVE

SEQ ID NO: 2725 - protein, 2100 aa, synthetic construct
  source 1..2100: note = Description of Artificial Sequence: Synthetic polypeptide
MPAAKRVKLDGGDKKYSIGLDIGTNSVGWAVITDEYKVPSKKFKVLGNTDRHSIKKNLIGALLFDSGETAEATRLKRTARRRYTRRKNRICYLQEIFSNEMAKVDDSFFHRLEESFLVEEDKKHERHPIFGNIVDEVAYHEKYPTIYHLRKKLVDSTDKADLRLIYLALAHMIKFRGHFLIEGDLNPDNSDVDKLFIQLVQTYNQLFEENPINASGVDAKAILSARLSKSRRLENLIAQLPGEKKNGLFGNLIALSLGLTPNFKSNFDLAEDAKLQLSKDTYDDDLDNLLAQIGDQYADLFLAAKNLSDAILLSDILRVNTEITKAPLSASMIKRYDEHHQDLTLLKALVRQQLPEKYKEIFFDQSKNGYAGYIDGGASQEEFYKFIKPILEKMDGTEELLVKLNREDLLRKQRTFDNGSIPHQIHLGELHAILRRQEDFYPFLKDNREKIEKILTFRIPYYVGPLARGNSRFAWMTRKSEETITPWNFEEVVDKGASAQSFIERMTNFDKNLPNEKVLPKHSLLYEYFTVYNELTKVKYVTEGMRKPAFLSGEQKKAIVDLLFKTNRKVTVKQLKEDYFKKIECFDSVEISGVEDRFNASLGTYHDLLKIIKDKDFLDNEENEDILEDIVLTLTLFEDREMIEERLKTYAHLFDDKVMKQLKRRRYTGWGRLSRKLINGIRDKQSGKTILDFLKSDGFANRNFMQLIHDDSLTFKEDIQKAQVSGQGDSLHEHIANLAGSPAIKKGILQTVKVVDELVKVMGRHKPENIVIEMARENQTTQKGQKNSRERMKRIEEGIKELGSQILKEHPVENTQLQNEKLYLYYLQNGRDMYVDQELDINRLSDYDVDHIVPQSFLKDDSIDNKVLTRSDKARGKSDNVPSEEVVKKMKNYWRQLLNAKLITQRKFDNLTKAERGGLSELDKAGFIKRQLVETRQITKHVAQILDSRMNTKYDENDKLIREVKVITLKSKLVSDFRKDFQFYKVREINNYHHAHDAYLNAVVGTALIKKYPKLESEFVYGDYKVYDVRKMIAKSEQEIGKATAKYFFYSNIMNFFKTEITLANGEIRKRPLIETNGETGEIVWDKGRDFATVRKVLSMPQVNIVKKTEVQTGGFSKESILPKRNSDKLIARKKDWDPKKYGGFDSPTVAYSVLVVAKVEKGKSKKLKSVKELLGITIMERSSFEKNPIDFLEAKGYKEVKKDLIIKLPKYSLFELENGRKRMLASAGELQKGNELALPSKYVNFLYLASHYEKLKGSPEDNEQKQLFVEQHKHYLDEIIEQISEFSKRVILADANLDKVLSAYNKHRDKPIREQAENIIHLFTLTNLGAPAAFKYFDTTIDRKRYTSTKEVLDATLIHQSITGLYETRIDLSQLGGDGGGGGGSEAAAKGGGGSGGTLNIEDEHRLHETSKEPDVSLGSTWLSDFPQAWAETGGMGLAVRQAPLIIPLKATSTPVSIKQYPMSQEARLGIKPHIQRLLDQGILVPCQSPWNTPLLPVKKPGTNDYRPVQDLREVNKRVEDIHPTVPNPYNLLSGLPPSHQWYTVLDLKDAFFCLRLHPTSQPLFAFEWRDPEMGISGQLTWTRLPQGFKNSPTLFNEALHRDLADFRIQHPDLILLQYVDDLLLAATSELDCQQGTRALLQTLGNLGYRASAKKAQICQKQVKYLGYLLKEGQRWLTEARKETVMGQPTPKTPRQLREFLGTAGFCRLWIPGFAEMAAPLYPLTKPGTLFNWGPDQQKAYQEIKQALLTAPALGLPDLTKPFELFVDEKQGYAKGVLTQKLGPWRRPVAYLSKKLDPVAAGWPPCLRMVAAIAVLTKDAGKLTMGQPLVILAPHAVEALVKQPPDRWLSNARMTHYQALLLDTDRVQFGPVVALNPATLLPLPEEGLQHNCLDILAEAHGTRPDLTDQPLPDADHTWYTDGSSLLQEGQRKAGAAVTTETEVIWAKALPAGTSAQRAELIALTQALKMAEGKKLNVYTDSRYAFATAHIHGEIYRRRGWLTSEGKEIKNKDEILALLKALFLPKRLSIIHCPGHQKGHSAEARGNRMADQAARKAAITETPDTSTLLAGKRTADGSEFEKRTADGSEFESPKKKAKVE

SEQ ID NO: 2726 - protein, 2093 aa, synthetic construct
  source 1..2093: note = Description of Artificial Sequence: Synthetic polypeptide
MPAAKRVKLDGGDKKYSIGLDIGTNSVGWAVITDEYKVPSKKFKVLGNTDRHSIKKNLIGALLFDSGETAEATRLKRTARRRYTRRKNRICYLQEIFSNEMAKVDDSFFHRLEESFLVEEDKKHERHPIFGNIVDEVAYHEKYPTIYHLRKKLVDSTDKADLRLIYLALAHMIKFRGHFLIEGDLNPDNSDVDKLFIQLVQTYNQLFEENPINASGVDAKAILSARLSKSRRLENLIAQLPGEKKNGLFGNLIALSLGLTPNFKSNFDLAEDAKLQLSKDTYDDDLDNLLAQIGDQYADLFLAAKNLSDAILLSDILRVNTEITKAPLSASMIKRYDEHHQDLTLLKALVRQQLPEKYKEIFFDQSKNGYAGYIDGGASQEEFYKFIKPILEKMDGTEELLVKLNREDLLRKQRTFDNGSIPHQIHLGELHAILRRQEDFYPFLKDNREKIEKILTFRIPYYVGPLARGNSRFAWMTRKSEETITPWNFEEVVDKGASAQSFIERMTNFDKNLPNEKVLPKHSLLYEYFTVYNELTKVKYVTEGMRKPAFLSGEQKKAIVDLLFKTNRKVTVKQLKEDYFKKIECFDSVEISGVEDRFNASLGTYHDLLKIIKDKDFLDNEENEDILEDIVLTLTLFEDREMIEERLKTYAHLFDDKVMKQLKRRRYTGWGRLSRKLINGIRDKQSGKTILDFLKSDGFANRNFMQLIHDDSLTFKEDIQKAQVSGQGDSLHEHIANLAGSPAIKKGILQTVKVVDELVKVMGRHKPENIVIEMARENQTTQKGQKNSRERMKRIEEGIKELGSQILKEHPVENTQLQNEKLYLYYLQNGRDMYVDQELDINRLSDYDVDHIVPQSFLKDDSIDNKVLTRSDKARGKSDNVPSEEVVKKMKNYWRQLLNAKLITQRKFDNLTKAERGGLSELDKAGFIKRQLVETRQITKHVAQILDSRMNTKYDENDKLIREVKVITLKSKLVSDFRKDFQFYKVREINNYHHAHDAYLNAVVGTALIKKYPKLESEFVYGDYKVYDVRKMIAKSEQEIGKATAKYFFYSNIMNFFKTEITLANGEIRKRPLIETNGETGEIVWDKGRDFATVRKVLSMPQVNIVKKTEVQTGGFSKESILPKRNSDKLIARKKDWDPKKYGGFDSPTVAYSVLVVAKVEKGKSKKLKSVKELLGITIMERSSFEKNPIDFLEAKGYKEVKKDLIIKLPKYSLFELENGRKRMLASAGELQKGNELALPSKYVNFLYLASHYEKLKGSPEDNEQKQLFVEQHKHYLDEIIEQISEFSKRVILADANLDKVLSAYNKHRDKPIREQAENIIHLFTLTNLGAPAAFKYFDTTIDRKRYTSTKEVLDATLIHQSITGLYETRIDLSQLGGDGGEAAAKGGSGGTLNIEDEHRLHETSKEPDVSLGSTWLSDFPQAWAETGGMGLAVRQAPLIIPLKATSTPVSIKQYPMSQEARLGIKPHIQRLLDQGILVPCQSPWNTPLLPVKKPGTNDYRPVQDLREVNKRVEDIHPTVPNPYNLLSGLPPSHQWYTVLDLKDAFFCLRLHPTSQPLFAFEWRDPEMGISGQLTWTRLPQGFKNSPTLFNEALHRDLADFRIQHPDLILLQYVDDLLLAATSELDCQQGTRALLQTLGNLGYRASAKKAQICQKQVKYLGYLLKEGQRWLTEARKETVMGQPTPKTPRQLREFLGTAGFCRLWIPGFAEMAAPLYPLTKPGTLFNWGPDQQKAYQEIKQALLTAPALGLPDLTKPFELFVDEKQGYAKGVLTQKLGPWRRPVAYLSKKLDPVAAGWPPCLRMVAAIAVLTKDAGKLTMGQPLVILAPHAVEALVKQPPDRWLSNARMTHYQALLLDTDRVQFGPVVALNPATLLPLPEEGLQHNCLDILAEAHGTRPDLTDQPLPDADHTWYTDGSSLLQEGQRKAGAAVTTETEVIWAKALPAGTSAQRAELIALTQALKMAEGKKLNVYTDSRYAFATAHIHGEIYRRRGWLTSEGKEIKNKDEILALLKALFLPKRLSIIHCPGHQKGHSAEARGNRMADQAARKAAITETPDTSTLLAGKRTADGSEFEKRTADGSEFESPKKKAKVE

SEQ ID NO: 2727 - protein, 2096 aa, synthetic construct
  source 1..2096: note = Description of Artificial Sequence: Synthetic polypeptide
MPAAKRVKLDGGDKKYSIGLDIGTNSVGWAVITDEYKVPSKKFKVLGNTDRHSIKKNLIGALLFDSGETAEATRLKRTARRRYTRRKNRICYLQEIFSNEMAKVDDSFFHRLEESFLVEEDKKHERHPIFGNIVDEVAYHEKYPTIYHLRKKLVDSTDKADLRLIYLALAHMIKFRGHFLIEGDLNPDNSDVDKLFIQLVQTYNQLFEENPINASGVDAKAILSARLSKSRRLENLIAQLPGEKKNGLFGNLIALSLGLTPNFKSNFDLAEDAKLQLSKDTYDDDLDNLLAQIGDQYADLFLAAKNLSDAILLSDILRVNTEITKAPLSASMIKRYDEHHQDLTLLKALVRQQLPEKYKEIFFDQSKNGYAGYIDGGASQEEFYKFIKPILEKMDGTEELLVKLNREDLLRKQRTFDNGSIPHQIHLGELHAILRRQEDFYPFLKDNREKIEKILTFRIPYYVGPLARGNSRFAWMTRKSEETITPWNFEEVVDKGASAQSFIERMTNFDKNLPNEKVLPKHSLLYEYFTVYNELTKVKYVTEGMRKPAFLSGEQKKAIVDLLFKTNRKVTVKQLKEDYFKKIECFDSVEISGVEDRFNASLGTYHDLLKIIKDKDFLDNEENEDILEDIVLTLTLFEDREMIEERLKTYAHLFDDKVMKQLKRRRYTGWGRLSRKLINGIRDKQSGKTILDFLKSDGFANRNFMQLIHDDSLTFKEDIQKAQVSGQGDSLHEHIANLAGSPAIKKGILQTVKVVDELVKVMGRHKPENIVIEMARENQTTQKGQKNSRERMKRIEEGIKELGSQILKEHPVENTQLQNEKLYLYYLQNGRDMYVDQELDINRLSDYDVDHIVPQSFLKDDSIDNKVLTRSDKARGKSDNVPSEEVVKKMKNYWRQLLNAKLITQRKFDNLTKAERGGLSELDKAGFIKRQLVETRQITKHVAQILDSRMNTKYDENDKLIREVKVITLKSKLVSDFRKDFQFYKVREINNYHHAHDAYLNAVVGTALIKKYPKLESEFVYGDYKVYDVRKMIAKSEQEIGKATAKYFFYSNIMNFFKTEITLANGEIRKRPLIETNGETGEIVWDKGRDFATVRKVLSMPQVNIVKKTEVQTGGFSKESILPKRNSDKLIARKKDWDPKKYGGFDSPTVAYSVLVVAKVEKGKSKKLKSVKELLGITIMERSSFEKNPIDFLEAKGYKEVKKDLIIKLPKYSLFELENGRKRMLASAGELQKGNELALPSKYVNFLYLASHYEKLKGSPEDNEQKQLFVEQHKHYLDEIIEQISEFSKRVILADANLDKVLSAYNKHRDKPIREQAENIIHLFTLTNLGAPAAFKYFDTTIDRKRYTSTKEVLDATLIHQSITGLYETRIDLSQLGGDGGEAAAKGGSGSSGGTLNIEDEHRLHETSKEPDVSLGSTWLSDFPQAWAETGGMGLAVRQAPLIIPLKATSTPVSIKQYPMSQEARLGIKPHIQRLLDQGILVPCQSPWNTPLLPVKKPGTNDYRPVQDLREVNKRVEDIHPTVPNPYNLLSGLPPSHQWYTVLDLKDAFFCLRLHPTSQPLFAFEWRDPEMGISGQLTWTRLPQGFKNSPTLFNEALHRDLADFRIQHPDLILLQYVDDLLLAATSELDCQQGTRALLQTLGNLGYRASAKKAQICQKQVKYLGYLLKEGQRWLTEARKETVMGQPTPKTPRQLREFLGTAGFCRLWIPGFAEMAAPLYPLTKPGTLFNWGPDQQKAYQEIKQALLTAPALGLPDLTKPFELFVDEKQGYAKGVLTQKLGPWRRPVAYLSKKLDPVAAGWPPCLRMVAAIAVLTKDAGKLTMGQPLVILAPHAVEALVKQPPDRWLSNARMTHYQALLLDTDRVQFGPVVALNPATLLPLPEEGLQHNCLDILAEAHGTRPDLTDQPLPDADHTWYTDGSSLLQEGQRKAGAAVTTETEVIWAKALPAGTSAQRAELIALTQALKMAEGKKLNVYTDSRYAFATAHIHGEIYRRRGWLTSEGKEIKNKDEILALLKALFLPKRLSIIHCPGHQKGHSAEARGNRMADQAARKAAITETPDTSTLLAGKRTADGSEFEKRTADGSEFESPKKKAKVE

SEQ ID NO: 2728 - protein, 2097 aa, synthetic construct
  source 1..2097: note = Description of Artificial Sequence: Synthetic polypeptide
MPAAKRVKLDGGDKKYSIGLDIGTNSVGWAVITDEYKVPSKKFKVLGNTDRHSIKKNLIGALLFDSGETAEATRLKRTARRRYTRRKNRICYLQEIFSNEMAKVDDSFFHRLEESFLVEEDKKHERHPIFGNIVDEVAYHEKYPTIYHLRKKLVDSTDKADLRLIYLALAHMIKFRGHFLIEGDLNPDNSDVDKLFIQLVQTYNQLFEENPINASGVDAKAILSARLSKSRRLENLIAQLPGEKKNGLFGNLIALSLGLTPNFKSNFDLAEDAKLQLSKDTYDDDLDNLLAQIGDQYADLFLAAKNLSDAILLSDILRVNTEITKAPLSASMIKRYDEHHQDLTLLKALVRQQLPEKYKEIFFDQSKNGYAGYIDGGASQEEFYKFIKPILEKMDGTEELLVKLNREDLLRKQRTFDNGSIPHQIHLGELHAILRRQEDFYPFLKDNREKIEKILTFRIPYYVGPLARGNSRFAWMTRKSEETITPWNFEEVVDKGASAQSFIERMTNFDKNLPNEKVLPKHSLLYEYFTVYNELTKVKYVTEGMRKPAFLSGEQKKAIVDLLFKTNRKVTVKQLKEDYFKKIECFDSVEISGVEDRFNASLGTYHDLLKIIKDKDFLDNEENEDILEDIVLTLTLFEDREMIEERLKTYAHLFDDKVMKQLKRRRYTGWGRLSRKLINGIRDKQSGKTILDFLKSDGFANRNFMQLIHDDSLTFKEDIQKAQVSGQGDSLHEHIANLAGSPAIKKGILQTVKVVDELVKVMGRHKPENIVIEMARENQTTQKGQKNSRERMKRIEEGIKELGSQILKEHPVENTQLQNEKLYLYYLQNGRDMYVDQELDINRLSDYDVDHIVPQSFLKDDSIDNKVLTRSDKARGKSDNVPSEEVVKKMKNYWRQLLNAKLITQRKFDNLTKAERGGLSELDKAGFIKRQLVETRQITKHVAQILDSRMNTKYDENDKLIREVKVITLKSKLVSDFRKDFQFYKVREINNYHHAHDAYLNAVVGTALIKKYPKLESEFVYGDYKVYDVRKMIAKSEQEIGKATAKYFFYSNIMNFFKTEITLANGEIRKRPLIETNGETGEIVWDKGRDFATVRKVLSMPQVNIVKKTEVQTGGFSKESILPKRNSDKLIARKKDWDPKKYGGFDSPTVAYSVLVVAKVEKGKSKKLKSVKELLGITIMERSSFEKNPIDFLEAKGYKEVKKDLIIKLPKYSLFELENGRKRMLASAGELQKGNELALPSKYVNFLYLASHYEKLKGSPEDNEQKQLFVEQHKHYLDEIIEQISEFSKRVILADANLDKVLSAYNKHRDKPIREQAENIIHLFTLTNLGAPAAFKYFDTTIDRKRYTSTKEVLDATLIHQSITGLYETRIDLSQLGGDGGGSSGSSGSSGSSGGTLNIEDEHRLHETSKEPDVSLGSTWLSDFPQAWAETGGMGLAVRQAPLIIPLKATSTPVSIKQYPMSQEARLGIKPHIQRLLDQGILVPCQSPWNTPLLPVKKPGTNDYRPVQDLREVNKRVEDIHPTVPNPYNLLSGLPPSHQWYTVLDLKDAFFCLRLHPTSQPLFAFEWRDPEMGISGQLTWTRLPQGFKNSPTLFNEALHRDLADFRIQHPDLILLQYVDDLLLAATSELDCQQGTRALLQTLGNLGYRASAKKAQICQKQVKYLGYLLKEGQRWLTEARKETVMGQPTPKTPRQLREFLGTAGFCRLWIPGFAEMAAPLYPLTKPGTLFNWGPDQQKAYQEIKQALLTAPALGLPDLTKPFELFVDEKQGYAKGVLTQKLGPWRRPVAYLSKKLDPVAAGWPPCLRMVAAIAVLTKDAGKLTMGQPLVILAPHAVEALVKQPPDRWLSNARMTHYQALLLDTDRVQFGPVVALNPATLLPLPEEGLQHNCLDILAEAHGTRPDLTDQPLPDADHTWYTDGSSLLQEGQRKAGAAVTTETEVIWAKALPAGTSAQRAELIALTQALKMAEGKKLNVYTDSRYAFATAHIHGEIYRRRGWLTSEGKEIKNKDEILALLKALFLPKRLSIIHCPGHQKGHSAEARGNRMADQAARKAAITETPDTSTLLAGKRTADGSEFEKRTADGSEFESPKKKAKVE

SEQ ID NO: 2729 - protein, 2095 aa, synthetic construct
  source 1..2095: note = Description of Artificial Sequence: Synthetic polypeptide
MPAAKRVKLDGGDKKYSIGLDIGTNSVGWAVITDEYKVPSKKFKVLGNTDRHSIKKNLIGALLFDSGETAEATRLKRTARRRYTRRKNRICYLQEIFSNEMAKVDDSFFHRLEESFLVEEDKKHERHPIFGNIVDEVAYHEKYPTIYHLRKKLVDSTDKADLRLIYLALAHMIKFRGHFLIEGDLNPDNSDVDKLFIQLVQTYNQLFEENPINASGVDAKAILSARLSKSRRLENLIAQLPGEKKNGLFGNLIALSLGLTPNFKSNFDLAEDAKLQLSKDTYDDDLDNLLAQIGDQYADLFLAAKNLSDAILLSDILRVNTEITKAPLSASMIKRYDEHHQDLTLLKALVRQQLPEKYKEIFFDQSKNGYAGYIDGGASQEEFYKFIKPILEKMDGTEELLVKLNREDLLRKQRTFDNGSIPHQIHLGELHAILRRQEDFYPFLKDNREKIEKILTFRIPYYVGPLARGNSRFAWMTRKSEETITPWNFEEVVDKGASAQSFIERMTNFDKNLPNEKVLPKHSLLYEYFTVYNELTKVKYVTEGMRKPAFLSGEQKKAIVDLLFKTNRKVTVKQLKEDYFKKIECFDSVEISGVEDRFNASLGTYHDLLKIIKDKDFLDNEENEDILEDIVLTLTLFEDREMIEERLKTYAHLFDDKVMKQLKRRRYTGWGRLSRKLINGIRDKQSGKTILDFLKSDGFANRNFMQLIHDDSLTFKEDIQKAQVSGQGDSLHEHIANLAGSPAIKKGILQTVKVVDELVKVMGRHKPENIVIEMARENQTTQKGQKNSRERMKRIEEGIKELGSQILKEHPVENTQLQNEKLYLYYLQNGRDMYVDQELDINRLSDYDVDHIVPQSFLKDDSIDNKVLTRSDKARGKSDNVPSEEVVKKMKNYWRQLLNAKLITQRKFDNLTKAERGGLSELDKAGFIKRQLVETRQITKHVAQILDSRMNTKYDENDKLIREVKVITLKSKLVSDFRKDFQFYKVREINNYHHAHDAYLNAVVGTALIKKYPKLESEFVYGDYKVYDVRKMIAKSEQEIGKATAKYFFYSNIMNFFKTEITLANGEIRKRPLIETNGETGEIVWDKGRDFATVRKVLSMPQVNIVKKTEVQTGGFSKESILPKRNSDKLIARKKDWDPKKYGGFDSPTVAYSVLVVAKVEKGKSKKLKSVKELLGITIMERSSFEKNPIDFLEAKGYKEVKKDLIIKLPKYSLFELENGRKRMLASAGELQKGNELALPSKYVNFLYLASHYEKLKGSPEDNEQKQLFVEQHKHYLDEIIEQISEFSKRVILADANLDKVLSAYNKHRDKPIREQAENIIHLFTLTNLGAPAAFKYFDTTIDRKRYTSTKEVLDATLIHQSITGLYETRIDLSQLGGDGGEAAAKEAAAKGGTLNIEDEHRLHETSKEPDVSLGSTWLSDFPQAWAETGGMGLAVRQAPLIIPLKATSTPVSIKQYPMSQEARLGIKPHIQRLLDQGILVPCQSPWNTPLLPVKKPGTNDYRPVQDLREVNKRVEDIHPTVPNPYNLLSGLPPSHQWYTVLDLKDAFFCLRLHPTSQPLFAFEWRDPEMGISGQLTWTRLPQGFKNSPTLFNEALHRDLADFRIQHPDLILLQYVDDLLLAATSELDCQQGTRALLQTLGNLGYRASAKKAQICQKQVKYLGYLLKEGQRWLTEARKETVMGQPTPKTPRQLREFLGTAGFCRLWIPGFAEMAAPLYPLTKPGTLFNWGPDQQKAYQEIKQALLTAPALGLPDLTKPFELFVDEKQGYAKGVLTQKLGPWRRPVAYLSKKLDPVAAGWPPCLRMVAAIAVLTKDAGKLTMGQPLVILAPHAVEALVKQPPDRWLSNARMTHYQALLLDTDRVQFGPVVALNPATLLPLPEEGLQHNCLDILAEAHGTRPDLTDQPLPDADHTWYTDGSSLLQEGQRKAGAAVTTETEVIWAKALPAGTSAQRAELIALTQALKMAEGKKLNVYTDSRYAFATAHIHGEIYRRRGWLTSEGKEIKNKDEILALLKALFLPKRLSIIHCPGHQKGHSAEARGNRMADQAARKAAITETPDTSTLLAGKRTADGSEFEKRTADGSEFESPKKKAKVE

SEQ ID NO: 2730 - protein, 2090 aa, synthetic construct
  source 1..2090: note = Description of Artificial Sequence: Synthetic polypeptide
MPAAKRVKLDGGDKKYSIGLDIGTNSVGWAVITDEYKVPSKKFKVLGNTDRHSIKKNLIGALLFDSGETAEATRLKRTARRRYTRRKNRICYLQEIFSNEMAKVDDSFFHRLEESFLVEEDKKHERHPIFGNIVDEVAYHEKYPTIYHLRKKLVDSTDKADLRLIYLALAHMIKFRGHFLIEGDLNPDNSDVDKLFIQLVQTYNQLFEENPINASGVDAKAILSARLSKSRRLENLIAQLPGEKKNGLFGNLIALSLGLTPNFKSNFDLAEDAKLQLSKDTYDDDLDNLLAQIGDQYADLFLAAKNLSDAILLSDILRVNTEITKAPLSASMIKRYDEHHQDLTLLKALVRQQLPEKYKEIFFDQSKNGYAGYIDGGASQEEFYKFIKPILEKMDGTEELLVKLNREDLLRKQRTFDNGSIPHQIHLGELHAILRRQEDFYPFLKDNREKIEKILTFRIPYYVGPLARGNSRFAWMTRKSEETITPWNFEEVVDKGASAQSFIERMTNFDKNLPNEKVLPKHSLLYEYFTVYNELTKVKYVTEGMRKPAFLSGEQKKAIVDLLFKTNRKVTVKQLKEDYFKKIECFDSVEISGVEDRFNASLGTYHDLLKIIKDKDFLDNEENEDILEDIVLTLTLFEDREMIEERLKTYAHLFDDKVMKQLKRRRYTGWGRLSRKLINGIRDKQSGKTILDFLKSDGFANRNFMQLIHDDSLTFKEDIQKAQVSGQGDSLHEHIANLAGSPAIKKGILQTVKVVDELVKVMGRHKPENIVIEMARENQTTQKGQKNSRERMKRIEEGIKELGSQILKEHPVENTQLQNEKLYLYYLQNGRDMYVDQELDINRLSDYDVDHIVPQSFLKDDSIDNKVLTRSDKARGKSDNVPSEEVVKKMKNYWRQLLNAKLITQRKFDNLTKAERGGLSELDKAGFIKRQLVETRQITKHVAQILDSRMNTKYDENDKLIREVKVITLKSKLVSDFRKDFQFYKVREINNYHHAHDAYLNAVVGTALIKKYPKLESEFVYGDYKVYDVRKMIAKSEQEIGKATAKYFFYSNIMNFFKTEITLANGEIRKRPLIETNGETGEIVWDKGRDFATVRKVLSMPQVNIVKKTEVQTGGFSKESILPKRNSDKLIARKKDWDPKKYGGFDSPTVAYSVLVVAKVEKGKSKKLKSVKELLGITIMERSSFEKNPIDFLEAKGYKEVKKDLIIKLPKYSLFELENGRKRMLASAGELQKGNELALPSKYVNFLYLASHYEKLKGSPEDNEQKQLFVEQHKHYLDEIIEQISEFSKRVILADANLDKVLSAYNKHRDKPIREQAENIIHLFTLTNLGAPAAFKYFDTTIDRKRYTSTKEVLDATLIHQSITGLYETRIDLSQLGGDGGEAAAKGGTLNIEDEHRLHETSKEPDVSLGSTWLSDFPQAWAETGGMGLAVRQAPLIIPLKATSTPVSIKQYPMSQEARLGIKPHIQRLLDQGILVPCQSPWNTPLLPVKKPGTNDYRPVQDLREVNKRVEDIHPTVPNPYNLLSGLPPSHQWYTVLDLKDAFFCLRLHPTSQPLFAFEWRDPEMGISGQLTWTRLPQGFKNSPTLFNEALHRDLADFRIQHPDLILLQYVDDLLLAATSELDCQQGTRALLQTLGNLGYRASAKKAQICQKQVKYLGYLLKEGQRWLTEARKETVMGQPTPKTPRQLREFLGTAGFCRLWIPGFAEMAAPLYPLTKPGTLFNWGPDQQKAYQEIKQALLTAPALGLPDLTKPFELFVDEKQGYAKGVLTQKLGPWRRPVAYLSKKLDPVAAGWPPCLRMVAAIAVLTKDAGKLTMGQPLVILAPHAVEALVKQPPDRWLSNARMTHYQALLLDTDRVQFGPVVALNPATLLPLPEEGLQHNCLDILAEAHGTRPDLTDQPLPDADHTWYTDGSSLLQEGQRKAGAAVTTETEVIWAKALPAGTSAQRAELIALTQALKMAEGKKLNVYTDSRYAFATAHIHGEIYRRRGWLTSEGKEIKNKDEILALLKALFLPKRLSIIHCPGHQKGHSAEARGNRMADQAARKAAITETPDTSTLLAGKRTADGSEFEKRTADGSEFESPKKKAKVE

SEQ ID NO: 2731 - protein, 2094 aa, synthetic construct
  source 1..2094: note = Description of Artificial Sequence: Synthetic polypeptide
MPAAKRVKLDGGDKKYSIGLDIGTNSVGWAVITDEYKVPSKKFKVLGNTDRHSIKKNLIGALLFDSGETAEATRLKRTARRRYTRRKNRICYLQEIFSNEMAKVDDSFFHRLEESFLVEEDKKHERHPIFGNIVDEVAYHEKYPTIYHLRKKLVDSTDKADLRLIYLALAHMIKFRGHFLIEGDLNPDNSDVDKLFIQLVQTYNQLFEENPINASGVDAKAILSARLSKSRRLENLIAQLPGEKKNGLFGNLIALSLGLTPNFKSNFDLAEDAKLQLSKDTYDDDLDNLLAQIGDQYADLFLAAKNLSDAILLSDILRVNTEITKAPLSASMIKRYDEHHQDLTLLKALVRQQLPEKYKEIFFDQSKNGYAGYIDGGASQEEFYKFIKPILEKMDGTEELLVKLNREDLLRKQRTFDNGSIPHQIHLGELHAILRRQEDFYPFLKDNREKIEKILTFRIPYYVGPLARGNSRFAWMTRKSEETITPWNFEEVVDKGASAQSFIERMTNFDKNLPNEKVLPKHSLLYEYFTVYNELTKVKYVTEGMRKPAFLSGEQKKAIVDLLFKTNRKVTVKQLKEDYFKKIECFDSVEISGVEDRFNASLGTYHDLLKIIKDKDFLDNEENEDILEDIVLTLTLFEDREMIEERLKTYAHLFDDKVMKQLKRRRYTGWGRLSRKLINGIRDKQSGKTILDFLKSDGFANRNFMQLIHDDSLTFKEDIQKAQVSGQGDSLHEHIANLAGSPAIKKGILQTVKVVDELVKVMGRHKPENIVIEMARENQTTQKGQKNSRERMKRIEEGIKELGSQILKEHPVENTQLQNEKLYLYYLQNGRDMYVDQELDINRLSDYDVDHIVPQSFLKDDSIDNKVLTRSDKARGKSDNVPSEEVVKKMKNYWRQLLNAKLITQRKFDNLTKAERGGLSELDKAGFIKRQLVETRQITKHVAQILDSRMNTKYDENDKLIREVKVITLKSKLVSDFRKDFQFYKVREINNYHHAHDAYLNAVVGTALIKKYPKLESEFVYGDYKVYDVRKMIAKSEQEIGKATAKYFFYSNIMNFFKTEITLANGEIRKRPLIETNGETGEIVWDKGRDFATVRKVLSMPQVNIVKKTEVQTGGFSKESILPKRNSDKLIARKKDWDPKKYGGFDSPTVAYSVLVVAKVEKGKSKKLKSVKELLGITIMERSSFEKNPIDFLEAKGYKEVKKDLIIKLPKYSLFELENGRKRMLASAGELQKGNELALPSKYVNFLYLASHYEKLKGSPEDNEQKQLFVEQHKHYLDEIIEQISEFSKRVILADANLDKVLSAYNKHRDKPIREQAENIIHLFTLTNLGAPAAFKYFDTTIDRKRYTSTKEVLDATLIHQSITGLYETRIDLSQLGGDGGPAPAPAPAPGGTLNIEDEHRLHETSKEPDVSLGSTWLSDFPQAWAETGGMGLAVRQAPLIIPLKATSTPVSIKQYPMSQEARLGIKPHIQRLLDQGILVPCQSPWNTPLLPVKKPGTNDYRPVQDLREVNKRVEDIHPTVPNPYNLLSGLPPSHQWYTVLDLKDAFFCLRLHPTSQPLFAFEWRDPEMGISGQLTWTRLPQGFKNSPTLFNEALHRDLADFRIQHPDLILLQYVDDLLLAATSELDCQQGTRALLQTLGNLGYRASAKKAQICQKQVKYLGYLLKEGQRWLTEARKETVMGQPTPKTPRQLREFLGTAGFCRLWIPGFAEMAAPLYPLTKPGTLFNWGPDQQKAYQEIKQALLTAPALGLPDLTKPFELFVDEKQGYAKGVLTQKLGPWRRPVAYLSKKLDPVAAGWPPCLRMVAAIAVLTKDAGKLTMGQPLVILAPHAVEALVKQPPDRWLSNARMTHYQALLLDTDRVQFGPVVALNPATLLPLPEEGLQHNCLDILAEAHGTRPDLTDQPLPDADHTWYTDGSSLLQEGQRKAGAAVTTETEVIWAKALPAGTSAQRAELIALTQALKMAEGKKLNVYTDSRYAFATAHIHGEIYRRRGWLTSEGKEIKNKDEILALLKALFLPKRLSIIHCPGHQKGHSAEARGNRMADQAARKAAITETPDTSTLLAGKRTADGSEFEKRTADGSEFESPKKKAKVE

SEQ ID NO: 2732 - protein, 2096 aa, synthetic construct
  source 1..2096: note = Description of Artificial Sequence: Synthetic polypeptide
MPAAKRVKLDGGDKKYSIGLDIGTNSVGWAVITDEYKVPSKKFKVLGNTDRHSIKKNLIGALLFDSGETAEATRLKRTARRRYTRRKNRICYLQEIFSNEMAKVDDSFFHRLEESFLVEEDKKHERHPIFGNIVDEVAYHEKYPTIYHLRKKLVDSTDKADLRLIYLALAHMIKFRGHFLIEGDLNPDNSDVDKLFIQLVQTYNQLFEENPINASGVDAKAILSARLSKSRRLENLIAQLPGEKKNGLFGNLIALSLGLTPNFKSNFDLAEDAKLQLSKDTYDDDLDNLLAQIGDQYADLFLAAKNLSDAILLSDILRVNTEITKAPLSASMIKRYDEHHQDLTLLKALVRQQLPEKYKEIFFDQSKNGYAGYIDGGASQEEFYKFIKPILEKMDGTEELLVKLNREDLLRKQRTFDNGSIPHQIHLGELHAILRRQEDFYPFLKDNREKIEKILTFRIPYYVGPLARGNSRFAWMTRKSEETITPWNFEEVVDKGASAQSFIERMTNFDKNLPNEKVLPKHSLLYEYFTVYNELTKVKYVTEGMRKPAFLSGEQKKAIVDLLFKTNRKVTVKQLKEDYFKKIECFDSVEISGVEDRFNASLGTYHDLLKIIKDKDFLDNEENEDILEDIVLTLTLFEDREMIEERLKTYAHLFDDKVMKQLKRRRYTGWGRLSRKLINGIRDKQSGKTILDFLKSDGFANRNFMQLIHDDSLTFKEDIQKAQVSGQGDSLHEHIANLAGSPAIKKGILQTVKVVDELVKVMGRHKPENIVIEMARENQTTQKGQKNSRERMKRIEEGIKELGSQILKEHPVENTQLQNEKLYLYYLQNGRDMYVDQELDINRLSDYDVDHIVPQSFLKDDSIDNKVLTRSDKARGKSDNVPSEEVVKKMKNYWRQLLNAKLITQRKFDNLTKAERGGLSELDKAGFIKRQLVETRQITKHVAQILDSRMNTKYDENDKLIREVKVITLKSKLVSDFRKDFQFYKVREINNYHHAHDAYLNAVVGTALIKKYPKLESEFVYGDYKVYDVRKMIAKSEQEIGKATAKYFFYSNIMNFFKTEITLANGEIRKRPLIETNGETGEIVWDKGRDFATVRKVLSMPQVNIVKKTEVQTGGFSKESILPKRNSDKLIARKKDWDPKKYGGFDSPTVAYSVLVVAKVEKGKSKKLKSVKELLGITIMERSSFEKNPIDFLEAKGYKEVKKDLIIKLPKYSLFELENGRKRMLASAGELQKGNELALPSKYVNFLYLASHYEKLKGSPEDNEQKQLFVEQHKHYLDEIIEQISEFSKRVILADANLDKVLSAYNKHRDKPIREQAENIIHLFTLTNLGAPAAFKYFDTTIDRKRYTSTKEVLDATLIHQSITGLYETRIDLSQLGGDGGGSSEAAAKGGGGGTLNIEDEHRLHETSKEPDVSLGSTWLSDFPQAWAETGGMGLAVRQAPLIIPLKATSTPVSIKQYPMSQEARLGIKPHIQRLLDQGILVPCQSPWNTPLLPVKKPGTNDYRPVQDLREVNKRVEDIHPTVPNPYNLLSGLPPSHQWYTVLDLKDAFFCLRLHPTSQPLFAFEWRDPEMGISGQLTWTRLPQGFKNSPTLFNEALHRDLADFRIQHPDLILLQYVDDLLLAATSELDCQQGTRALLQTLGNLGYRASAKKAQICQKQVKYLGYLLKEGQRWLTEARKETVMGQPTPKTPRQLREFLGTAGFCRLWIPGFAEMAAPLYPLTKPGTLFNWGPDQQKAYQEIKQALLTAPALGLPDLTKPFELFVDEKQGYAKGVLTQKLGPWRRPVAYLSKKLDPVAAGWPPCLRMVAAIAVLTKDAGKLTMGQPLVILAPHAVEALVKQPPDRWLSNARMTHYQALLLDTDRVQFGPVVALNPATLLPLPEEGLQHNCLDILAEAHGTRPDLTDQPLPDADHTWYTDGSSLLQEGQRKAGAAVTTETEVIWAKALPAGTSAQRAELIALTQALKMAEGKKLNVYTDSRYAFATAHIHGEIYRRRGWLTSEGKEIKNKDEILALLKALFLPKRLSIIHCPGHQKGHSAEARGNRMADQAARKAAITETPDTSTLLAGKRTADGSEFEKRTADGSEFESPKKKAKVE

SEQ ID NO: 2733 - protein, 2091 aa, synthetic construct
  source 1..2091: note = Description of Artificial Sequence: Synthetic polypeptide
MPAAKRVKLDGGDKKYSIGLDIGTNSVGWAVITDEYKVPSKKFKVLGNTDRHSIKKNLIGALLFDSGETAEATRLKRTARRRYTRRKNRICYLQEIFSNEMAKVDDSFFHRLEESFLVEEDKKHERHPIFGNIVDEVAYHEKYPTIYHLRKKLVDSTDKADLRLIYLALAHMIKFRGHFLIEGDLNPDNSDVDKLFIQLVQTYNQLFEENPINASGVDAKAILSARLSKSRRLENLIAQLPGEKKNGLFGNLIALSLGLTPNFKSNFDLAEDAKLQLSKDTYDDDLDNLLAQIGDQYADLFLAAKNLSDAILLSDILRVNTEITKAPLSASMIKRYDEHHQDLTLLKALVRQQLPEKYKEIFFDQSKNGYAGYIDGGASQEEFYKFIKPILEKMDGTEELLVKLNREDLLRKQRTFDNGSIPHQIHLGELHAILRRQEDFYPFLKDNREKIEKILTFRIPYYVGPLARGNSRFAWMTRKSEETITPWNFEEVVDKGASAQSFIERMTNFDKNLPNEKVLPKHSLLYEYFTVYNELTKVKYVTEGMRKPAFLSGEQKKAIVDLLFKTNRKVTVKQLKEDYFKKIECFDSVEISGVEDRFNASLGTYHDLLKIIKDKDFLDNEENEDILEDIVLTLTLFEDREMIEERLKTYAHLFDDKVMKQLKRRRYTGWGRLSRKLINGIRDKQSGKTILDFLKSDGFANRNFMQLIHDDSLTFKEDIQKAQVSGQGDSLHEHIANLAGSPAIKKGILQTVKVVDELVKVMGRHKPENIVIEMARENQTTQKGQKNSRERMKRIEEGIKELGSQILKEHPVENTQLQNEKLYLYYLQNGRDMYVDQELDINRLSDYDVDHIVPQSFLKDDSIDNKVLTRSDKARGKSDNVPSEEVVKKMKNYWRQLLNAKLITQRKFDNLTKAERGGLSELDKAGFIKRQLVETRQITKHVAQILDSRMNTKYDENDKLIREVKVITLKSKLVSDFRKDFQFYKVREINNYHHAHDAYLNAVVGTALIKKYPKLESEFVYGDYKVYDVRKMIAKSEQEIGKATAKYFFYSNIMNFFKTEITLANGEIRKRPLIETNGETGEIVWDKGRDFATVRKVLSMPQVNIVKKTEVQTGGFSKESILPKRNSDKLIARKKDWDPKKYGGFDSPTVAYSVLVVAKVEKGKSKKLKSVKELLGITIMERSSFEKNPIDFLEAKGYKEVKKDLIIKLPKYSLFELENGRKRMLASAGELQKGNELALPSKYVNFLYLASHYEKLKGSPEDNEQKQLFVEQHKHYLDEIIEQISEFSKRVILADANLDKVLSAYNKHRDKPIREQAENIIHLFTLTNLGAPAAFKYFDTTIDRKRYTSTKEVLDATLIHQSITGLYETRIDLSQLGGDGGPAPGGSGGTLNIEDEHRLHETSKEPDVSLGSTWLSDFPQAWAETGGMGLAVRQAPLIIPLKATSTPVSIKQYPMSQEARLGIKPHIQRLLDQGILVPCQSPWNTPLLPVKKPGTNDYRPVQDLREVNKRVEDIHPTVPNPYNLLSGLPPSHQWYTVLDLKDAFFCLRLHPTSQPLFAFEWRDPEMGISGQLTWTRLPQGFKNSPTLFNEALHRDLADFRIQHPDLILLQYVDDLLLAATSELDCQQGTRALLQTLGNLGYRASAKKAQICQKQVKYLGYLLKEGQRWLTEARKETVMGQPTPKTPRQLREFLGTAGFCRLWIPGFAEMAAPLYPLTKPGTLFNWGPDQQKAYQEIKQALLTAPALGLPDLTKPFELFVDEKQGYAKGVLTQKLGPWRRPVAYLSKKLDPVAAGWPPCLRMVAAIAVLTKDAGKLTMGQPLVILAPHAVEALVKQPPDRWLSNARMTHYQALLLDTDRVQFGPVVALNPATLLPLPEEGLQHNCLDILAEAHGTRPDLTDQPLPDADHTWYTDGSSLLQEGQRKAGAAVTTETEVIWAKALPAGTSAQRAELIALTQALKMAEGKKLNVYTDSRYAFATAHIHGEIYRRRGWLTSEGKEIKNKDEILALLKALFLPKRLSIIHCPGHQKGHSAEARGNRMADQAARKAAITETPDTSTLLAGKRTADGSEFEKRTADGSEFESPKKKAKVE

SEQ ID NO: 2734 - protein, 2118 aa, synthetic construct
  source 1..2118: note = Description of Artificial Sequence: Synthetic polypeptide
MPAAKRVKLDGGDKKYSIGLDIGTNSVGWAVITDEYKVPSKKFKVLGNTDRHSIKKNLIGALLFDSGETAEATRLKRTARRRYTRRKNRICYLQEIFSNEMAKVDDSFFHRLEESFLVEEDKKHERHPIFGNIVDEVAYHEKYPTIYHLRKKLVDSTDKADLRLIYLALAHMIKFRGHFLIEGDLNPDNSDVDKLFIQLVQTYNQLFEENPINASGVDAKAILSARLSKSRRLENLIAQLPGEKKNGLFGNLIALSLGLTPNFKSNFDLAEDAKLQLSKDTYDDDLDNLLAQIGDQYADLFLAAKNLSDAILLSDILRVNTEITKAPLSASMIKRYDEHHQDLTLLKALVRQQLPEKYKEIFFDQSKNGYAGYIDGGASQEEFYKFIKPILEKMDGTEELLVKLNREDLLRKQRTFDNGSIPHQIHLGELHAILRRQEDFYPFLKDNREKIEKILTFRIPYYVGPLARGNSRFAWMTRKSEETITPWNFEEVVDKGASAQSFIERMTNFDKNLPNEKVLPKHSLLYEYFTVYNELTKVKYVTEGMRKPAFLSGEQKKAIVDLLFKTNRKVTVKQLKEDYFKKIECFDSVEISGVEDRFNASLGTYHDLLKIIKDKDFLDNEENEDILEDIVLTLTLFEDREMIEERLKTYAHLFDDKVMKQLKRRRYTGWGRLSRKLINGIRDKQSGKTILDFLKSDGFANRNFMQLIHDDSLTFKEDIQKAQVSGQGDSLHEHIANLAGSPAIKKGILQTVKVVDELVKVMGRHKPENIVIEMARENQTTQKGQKNSRERMKRIEEGIKELGSQILKEHPVENTQLQNEKLYLYYLQNGRDMYVDQELDINRLSDYDVDHIVPQSFLKDDSIDNKVLTRSDKARGKSDNVPSEEVVKKMKNYWRQLLNAKLITQRKFDNLTKAERGGLSELDKAGFIKRQLVETRQITKHVAQILDSRMNTKYDENDKLIREVKVITLKSKLVSDFRKDFQFYKVREINNYHHAHDAYLNAVVGTALIKKYPKLESEFVYGDYKVYDVRKMIAKSEQEIGKATAKYFFYSNIMNFFKTEITLANGEIRKRPLIETNGETGEIVWDKGRDFATVRKVLSMPQVNIVKKTEVQTGGFSKESILPKRNSDKLIARKKDWDPKKYGGFDSPTVAYSVLVVAKVEKGKSKKLKSVKELLGITIMERSSFEKNPIDFLEAKGYKEVKKDLIIKLPKYSLFELENGRKRMLASAGELQKGNELALPSKYVNFLYLASHYEKLKGSPEDNEQKQLFVEQHKHYLDEIIEQISEFSKRVILADANLDKVLSAYNKHRDKPIREQAENIIHLFTLTNLGAPAAFKYFDTTIDRKRYTSTKEVLDATLIHQSITGLYETRIDLSQLGGDGGSGGSSGGSSGSETPGTSESATPESSGGSSGGSSGGTLNIEDEHRLHETSKEPDVSLGSTWLSDFPQAWAETGGMGLAVRQAPLIIPLKATSTPVSIKQYPMSQEARLGIKPHIQRLLDQGILVPCQSPWNTPLLPVKKPGTNDYRPVQDLREVNKRVEDIHPTVPNPYNLLSGLPPSHQWYTVLDLKDAFFCLRLHPTSQPLFAFEWRDPEMGISGQLTWTRLPQGFKNSPTLFNEALHRDLADFRIQHPDLILLQYVDDLLLAATSELDCQQGTRALLQTLGNLGYRASAKKAQICQKQVKYLGYLLKEGQRWLTEARKETVMGQPTPKTPRQLREFLGTAGFCRLWIPGFAEMAAPLYPLTKPGTLFNWGPDQQKAYQEIKQALLTAPALGLPDLTKPFELFVDEKQGYAKGVLTQKLGPWRRPVAYLSKKLDPVAAGWPPCLRMVAAIAVLTKDAGKLTMGQPLVILAPHAVEALVKQPPDRWLSNARMTHYQALLLDTDRVQFGPVVALNPATLLPLPEEGLQHNCLDILAEAHGTRPDLTDQPLPDADHTWYTDGSSLLQEGQRKAGAAVTTETEVIWAKALPAGTSAQRAELIALTQALKMAEGKKLNVYTDSRYAFATAHIHGEIYRRRGWLTSEGKEIKNKDEILALLKALFLPKRLSIIHCPGHQKGHSAEARGNRMADQAARKAAITETPDTSTLLAGKRTADGSEFEKRTADGSEFESPKKKAKVE

SEQ ID NO: 2735 - protein, 2091 aa, synthetic construct
  source 1..2091: note = Description of Artificial Sequence: Synthetic polypeptide
MPAAKRVKLDGGDKKYSIGLDIGTNSVGWAVITDEYKVPSKKFKVLGNTDRHSIKKNLIGALLFDSGETAEATRLKRTARRRYTRRKNRICYLQEIFSNEMAKVDDSFFHRLEESFLVEEDKKHERHPIFGNIVDEVAYHEKYPTIYHLRKKLVDSTDKADLRLIYLALAHMIKFRGHFLIEGDLNPDNSDVDKLFIQLVQTYNQLFEENPINASGVDAKAILSARLSKSRRLENLIAQLPGEKKNGLFGNLIALSLGLTPNFKSNFDLAEDAKLQLSKDTYDDDLDNLLAQIGDQYADLFLAAKNLSDAILLSDILRVNTEITKAPLSASMIKRYDEHHQDLTLLKALVRQQLPEKYKEIFFDQSKNGYAGYIDGGASQEEFYKFIKPILEKMDGTEELLVKLNREDLLRKQRTFDNGSIPHQIHLGELHAILRRQEDFYPFLKDNREKIEKILTFRIPYYVGPLARGNSRFAWMTRKSEETITPWNFEEVVDKGASAQSFIERMTNFDKNLPNEKVLPKHSLLYEYFTVYNELTKVKYVTEGMRKPAFLSGEQKKAIVDLLFKTNRKVTVKQLKEDYFKKIECFDSVEISGVEDRFNASLGTYHDLLKIIKDKDFLDNEENEDILEDIVLTLTLFEDREMIEERLKTYAHLFDDKVMKQLKRRRYTGWGRLSRKLINGIRDKQSGKTILDFLKSDGFANRNFMQLIHDDSLTFKEDIQKAQVSGQGDSLHEHIANLAGSPAIKKGILQTVKVVDELVKVMGRHKPENIVIEMARENQTTQKGQKNSRERMKRIEEGIKELGSQILKEHPVENTQLQNEKLYLYYLQNGRDMYVDQELDINRLSDYDVDHIVPQSFLKDDSIDNKVLTRSDKARGKSDNVPSEEVVKKMKNYWRQLLNAKLITQRKFDNLTKAERGGLSELDKAGFIKRQLVETRQITKHVAQILDSRMNTKYDENDKLIREVKVITLKSKLVSDFRKDFQFYKVREINNYHHAHDAYLNAVVGTALIKKYPKLESEFVYGDYKVYDVRKMIAKSEQEIGKATAKYFFYSNIMNFFKTEITLANGEIRKRPLIETNGETGEIVWDKGRDFATVRKVLSMPQVNIVKKTEVQTGGFSKESILPKRNSDKLIARKKDWDPKKYGGFDSPTVAYSVLVVAKVEKGKSKKLKSVKELLGITIMERSSFEKNPIDFLEAKGYKEVKKDLIIKLPKYSLFELENGRKRMLASAGELQKGNELALPSKYVNFLYLASHYEKLKGSPEDNEQKQLFVEQHKHYLDEIIEQISEFSKRVILADANLDKVLSAYNKHRDKPIREQAENIIHLFTLTNLGAPAAFKYFDTTIDRKRYTSTKEVLDATLIHQSITGLYETRIDLSQLGGDGGGGSPAPGGTLNIEDEHRLHETSKEPDVSLGSTWLSDFPQAWAETGGMGLAVRQAPLIIPLKATSTPVSIKQYPMSQEARLGIKPHIQRLLDQGILVPCQSPWNTPLLPVKKPGTNDYRPVQDLREVNKRVEDIHPTVPNPYNLLSGLPPSHQWYTVLDLKDAFFCLRLHPTSQPLFAFEWRDPEMGISGQLTWTRLPQGFKNSPTLFNEALHRDLADFRIQHPDLILLQYVDDLLLAATSELDCQQGTRALLQTLGNLGYRASAKKAQICQKQVKYLGYLLKEGQRWLTEARKETVMGQPTPKTPRQLREFLGTAGFCRLWIPGFAEMAAPLYPLTKPGTLFNWGPDQQKAYQEIKQALLTAPALGLPDLTKPFELFVDEKQGYAKGVLTQKLGPWRRPVAYLSKKLDPVAAGWPPCLRMVAAIAVLTKDAGKLTMGQPLVILAPHAVEALVKQPPDRWLSNARMTHYQALLLDTDRVQFGPVVALNPATLLPLPEEGLQHNCLDILAEAHGTRPDLTDQPLPDADHTWYTDGSSLLQEGQRKAGAAVTTETEVIWAKALPAGTSAQRAELIALTQALKMAEGKKLNVYTDSRYAFATAHIHGEIYRRRGWLTSEGKEIKNKDEILALLKALFLPKRLSIIHCPGHQKGHSAEARGNRMADQAARKAAITETPDTSTLLAGKRTADGSEFEKRTADGSEFESPKKKAKVE

SEQ ID NO: 2736 - protein, 2100 aa, synthetic construct
  source 1..2100: note = Description of Artificial Sequence: Synthetic polypeptide
MPAAKRVKLDGGDKKYSIGLDIGTNSVGWAVITDEYKVPSKKFKVLGNTDRHSIKKNLIGALLFDSGETAEATRLKRTARRRYTRRKNRICYLQEIFSNEMAKVDDSFFHRLEESFLVEEDKKHERHPIFGNIVDEVAYHEKYPTIYHLRKKLVDSTDKADLRLIYLALAHMIKFRGHFLIEGDLNPDNSDVDKLFIQLVQTYNQLFEENPINASGVDAKAILSARLSKSRRLENLIAQLPGEKKNGLFGNLIALSLGLTPNFKSNFDLAEDAKLQLSKDTYDDDLDNLLAQIGDQYADLFLAAKNLSDAILLSDILRVNTEITKAPLSASMIKRYDEHHQDLTLLKALVRQQLPEKYKEIFFDQSKNGYAGYIDGGASQEEFYKFIKPILEKMDGTEELLVKLNREDLLRKQRTFDNGSIPHQIHLGELHAILRRQEDFYPFLKDNREKIEKILTFRIPYYVGPLARGNSRFAWMTRKSEETITPWNFEEVVDKGASAQSFIERMTNFDKNLPNEKVLPKHSLLYEYFTVYNELTKVKYVTEGMRKPAFLSGEQKKAIVDLLFKTNRKVTVKQLKEDYFKKIECFDSVEISGVEDRFNASLGTYHDLLKIIKDKDFLDNEENEDILEDIVLTLTLFEDREMIEERLKTYAHLFDDKVMKQLKRRRYTGWGRLSRKLINGIRDKQSGKTILDFLKSDGFANRNFMQLIHDDSLTFKEDIQKAQVSGQGDSLHEHIANLAGSPAIKKGILQTVKVVDELVKVMGRHKPENIVIEMARENQTTQKGQKNSRERMKRIEEGIKELGSQILKEHPVENTQLQNEKLYLYYLQNGRDMYVDQELDINRLSDYDVDHIVPQSFLKDDSIDNKVLTRSDKARGKSDNVPSEEVVKKMKNYWRQLLNAKLITQRKFDNLTKAERGGLSELDKAGFIKRQLVETRQITKHVAQILDSRMNTKYDENDKLIREVKVITLKSKLVSDFRKDFQFYKVREINNYHHAHDAYLNAVVGTALIKKYPKLESEFVYGDYKVYDVRKMIAKSEQEIGKATAKYFFYSNIMNFFKTEITLANGEIRKRPLIETNGETGEIVWDKGRDFATVRKVLSMPQVNIVKKTEVQTGGFSKESILPKRNSDKLIARKKDWDPKKYGGFDSPTVAYSVLVVAKVEKGKSKKLKSVKELLGITIMERSSFEKNPIDFLEAKGYKEVKKDLIIKLPKYSLFELENGRKRMLASAGELQKGNELALPSKYVNFLYLASHYEKLKGSPEDNEQKQLFVEQHKHYLDEIIEQISEFSKRVILADANLDKVLSAYNKHRDKPIREQAENIIHLFTLTNLGAPAAFKYFDTTIDRKRYTSTKEVLDATLIHQSITGLYETRIDLSQLGGDGGGGGGSGGGGSGGGGSGGTLNIEDEHRLHETSKEPDVSLGSTWLSDFPQAWAETGGMGLAVRQAPLIIPLKATSTPVSIKQYPMSQEARLGIKPHIQRLLDQGILVPCQSPWNTPLLPVKKPGTNDYRPVQDLREVNKRVEDIHPTVPNPYNLLSGLPPSHQWYTVLDLKDAFFCLRLHPTSQPLFAFEWRDPEMGISGQLTWTRLPQGFKNSPTLFNEALHRDLADFRIQHPDLILLQYVDDLLLAATSELDCQQGTRALLQTLGNLGYRASAKKAQICQKQVKYLGYLLKEGQRWLTEARKETVMGQPTPKTPRQLREFLGTAGFCRLWIPGFAEMAAPLYPLTKPGTLFNWGPDQQKAYQEIKQALLTAPALGLPDLTKPFELFVDEKQGYAKGVLTQKLGPWRRPVAYLSKKLDPVAAGWPPCLRMVAAIAVLTKDAGKLTMGQPLVILAPHAVEALVKQPPDRWLSNARMTHYQALLLDTDRVQFGPVVALNPATLLPLPEEGLQHNCLDILAEAHGTRPDLTDQPLPDADHTWYTDGSSLLQEGQRKAGAAVTTETEVIWAKALPAGTSAQRAELIALTQALKMAEGKKLNVYTDSRYAFATAHIHGEIYRRRGWLTSEGKEIKNKDEILALLKALFLPKRLSIIHCPGHQKGHSAEARGNRMADQAARKAAITETPDTSTLLAGKRTADGSEFEKRTADGSEFESPKKKAKVE

SEQ ID NO: 2737 - protein, 2093 aa, synthetic construct
  source 1..2093: note = Description of Artificial Sequence: Synthetic polypeptide
MPAAKRVKLDGGDKKYSIGLDIGTNSVGWAVITDEYKVPSKKFKVLGNTDRHSIKKNLIGALLFDSGETAEATRLKRTARRRYTRRKNRICYLQEIFSNEMAKVDDSFFHRLEESFLVEEDKKHERHPIFGNIVDEVAYHEKYPTIYHLRKKLVDSTDKADLRLIYLALAHMIKFRGHFLIEGDLNPDNSDVDKLFIQLVQTYNQLFEENPINASGVDAKAILSARLSKSRRLENLIAQLPGEKKNGLFGNLIALSLGLTPNFKSNFDLAEDAKLQLSKDTYDDDLDNLLAQIGDQYADLFLAAKNLSDAILLSDILRVNTEITKAPLSASMIKRYDEHHQDLTLLKALVRQQLPEKYKEIFFDQSKNGYAGYIDGGASQEEFYKFIKPILEKMDGTEELLVKLNREDLLRKQRTFDNGSIPHQIHLGELHAILRRQEDFYPFLKDNREKIEKILTFRIPYYVGPLARGNSRFAWMTRKSEETITPWNFEEVVDKGASAQSFIERMTNFDKNLPNEKVLPKHSLLYEYFTVYNELTKVKYVTEGMRKPAFLSGEQKKAIVDLLFKTNRKVTVKQLKEDYFKKIECFDSVEISGVEDRFNASLGTYHDLLKIIKDKDFLDNEENEDILEDIVLTLTLFEDREMIEERLKTYAHLFDDKVMKQLKRRRYTGWGRLSRKLINGIRDKQSGKTILDFLKSDGFANRNFMQLIHDDSLTFKEDIQKAQVSGQGDSLHEHIANLAGSPAIKKGILQTVKVVDELVKVMGRHKPENIVIEMARENQTTQKGQKNSRERMKRIEEGIKELGSQILKEHPVENTQLQNEKLYLYYLQNGRDMYVDQELDINRLSDYDVDHIVPQSFLKDDSIDNKVLTRSDKARGKSDNVPSEEVVKKMKNYWRQLLNAKLITQRKFDNLTKAERGGLSELDKAGFIKRQLVETRQITKHVAQILDSRMNTKYDENDKLIREVKVITLKSKLVSDFRKDFQFYKVREINNYHHAHDAYLNAVVGTALIKKYPKLESEFVYGDYKVYDVRKMIAKSEQEIGKATAKYFFYSNIMNFFKTEITLANGEIRKRPLIETNGETGEIVWDKGRDFATVRKVLSMPQVNIVKKTEVQTGGFSKESILPKRNSDKLIARKKDWDPKKYGGFDSPTVAYSVLVVAKVEKGKSKKLKSVKELLGITIMERSSFEKNPIDFLEAKGYKEVKKDLIIKLPKYSLFELENGRKRMLASAGELQKGNELALPSKYVNFLYLASHYEKLKGSPEDNEQKQLFVEQHKHYLDEIIEQISEFSKRVILADANLDKVLSAYNKHRDKPIREQAENIIHLFTLTNLGAPAAFKYFDTTIDRKRYTSTKEVLDATLIHQSITGLYETRIDLSQLGGDGGEAAAKGSSGGTLNIEDEHRLHETSKEPDVSLGSTWLSDFPQAWAETGGMGLAVRQAPLIIPLKATSTPVSIKQYPMSQEARLGIKPHIQRLLDQGILVPCQSPWNTPLLPVKKPGTNDYRPVQDLREVNKRVEDIHPTVPNPYNLLSGLPPSHQWYTVLDLKDAFFCLRLHPTSQPLFAFEWRDPEMGISGQLTWTRLPQGFKNSPTLFNEALHRDLADFRIQHPDLILLQYVDDLLLAATSELDCQQGTRALLQTLGNLGYRASAKKAQICQKQVKYLGYLLKEGQRWLTEARKETVMGQPTPKTPRQLREFLGTAGFCRLWIPGFAEMAAPLYPLTKPGTLFNWGPDQQKAYQEIKQALLTAPALGLPDLTKPFELFVDEKQGYAKGVLTQKLGPWRRPVAYLSKKLDPVAAGWPPCLRMVAAIAVLTKDAGKLTMGQPLVILAPHAVEALVKQPPDRWLSNARMTHYQALLLDTDRVQFGPVVALNPATLLPLPEEGLQHNCLDILAEAHGTRPDLTDQPLPDADHTWYTDGSSLLQEGQRKAGAAVTTETEVIWAKALPAGTSAQRAELIALTQALKMAEGKKLNVYTDSRYAFATAHIHGEIYRRRGWLTSEGKEIKNKDEILALLKALFLPKRLSIIHCPGHQKGHSAEARGNRMADQAARKAAITETPDTSTLLAGKRTADGSEFEKRTADGSEFESPKKKAKVE

SEQ ID NO: 2738 - protein, 2094 aa, synthetic construct
  source 1..2094: note = Description of Artificial Sequence: Synthetic polypeptide
MPAAKRVKLDGGDKKYSIGLDIGTNSVGWAVITDEYKVPSKKFKVLGNTDRHSIKKNLIGALLFDSGETAEATRLKRTARRRYTRRKNRICYLQEIFSNEMAKVDDSFFHRLEESFLVEEDKKHERHPIFGNIVDEVAYHEKYPTIYHLRKKLVDSTDKADLRLIYLALAHMIKFRGHFLIEGDLNPDNSDVDKLFIQLVQTYNQLFEENPINASGVDAKAILSARLSKSRRLENLIAQLPGEKKNGLFGNLIALSLGLTPNFKSNFDLAEDAKLQLSKDTYDDDLDNLLAQIGDQYADLFLAAKNLSDAILLSDILRVNTEITKAPLSASMIKRYDEHHQDLTLLKALVRQQLPEKYKEIFFDQSKNGYAGYIDGGASQEEFYKFIKPILEKMDGTEELLVKLNREDLLRKQRTFDNGSIPHQIHLGELHAILRRQEDFYPFLKDNREKIEKILTFRIPYYVGPLARGNSRFAWMTRKSEETITPWNFEEVVDKGASAQSFIERMTNFDKNLPNEKVLPKHSLLYEYFTVYNELTKVKYVTEGMRKPAFLSGEQKKAIVDLLFKTNRKVTVKQLKEDYFKKIECFDSVEISGVEDRFNASLGTYHDLLKIIKDKDFLDNEENEDILEDIVLTLTLFEDREMIEERLKTYAHLFDDKVMKQLKRRRYTGWGRLSRKLINGIRDKQSGKTILDFLKSDGFANRNFMQLIHDDSLTFKEDIQKAQVSGQGDSLHEHIANLAGSPAIKKGILQTVKVVDELVKVMGRHKPENIVIEMARENQTTQKGQKNSRERMKRIEEGIKELGSQILKEHPVENTQLQNEKLYLYYLQNGRDMYVDQELDINRLSDYDVDHIVPQSFLKDDSIDNKVLTRSDKARGKSDNVPSEEVVKKMKNYWRQLLNAKLITQRKFDNLTKAERGGLSELDKAGFIKRQLVETRQITKHVAQILDSRMNTKYDENDKLIREVKVITLKSKLVSDFRKDFQFYKVREINNYHHAHDAYLNAVVGTALIKKYPKLESEFVYGDYKVYDVRKMIAKSEQEIGKATAKYFFYSNIMNFFKTEITLANGEIRKRPLIETNGETGEIVWDKGRDFATVRKVLSMPQVNIVKKTEVQTGGFSKESILPKRNSDKLIARKKDWDPKKYGGFDSPTVAYSVLVVAKVEKGKSKKLKSVKELLGITIMERSSFEKNPIDFLEAKGYKEVKKDLIIKLPKYSLFELENGRKRMLASAGELQKGNELALPSKYVNFLYLASHYEKLKGSPEDNEQKQLFVEQHKHYLDEIIEQISEFSKRVILADANLDKVLSAYNKHRDKPIREQAENIIHLFTLTNLGAPAAFKYFDTTIDRKRYTSTKEVLDATLIHQSITGLYETRIDLSQLGGDGGPAPGGGGGSGGTLNIEDEHRLHETSKEPDVSLGSTWLSDFPQAWAETGGMGLAVRQAPLIIPLKATSTPVSIKQYPMSQEARLGIKPHIQRLLDQGILVPCQSPWNTPLLPVKKPGTNDYRPVQDLREVNKRVEDIHPTVPNPYNLLSGLPPSHQWYTVLDLKDAFFCLRLHPTSQPLFAFEWRDPEMGISGQLTWTRLPQGFKNSPTLFNEALHRDLADFRIQHPDLILLQYVDDLLLAATSELDCQQGTRALLQTLGNLGYRASAKKAQICQKQVKYLGYLLKEGQRWLTEARKETVMGQPTPKTPRQLREFLGTAGFCRLWIPGFAEMAAPLYPLTKPGTLFNWGPDQQKAYQEIKQALLTAPALGLPDLTKPFELFVDEKQGYAKGVLTQKLGPWRRPVAYLSKKLDPVAAGWPPCLRMVAAIAVLTKDAGKLTMGQPLVILAPHAVEALVKQPPDRWLSNARMTHYQALLLDTDRVQFGPVVALNPATLLPLPEEGLQHNCLDILAEAHGTRPDLTDQPLPDADHTWYTDGSSLLQEGQRKAGAAVTTETEVIWAKALPAGTSAQRAELIALTQALKMAEGKKLNVYTDSRYAFATAHIHGEIYRRRGWLTSEGKEIKNKDEILALLKALFLPKRLSIIHCPGHQKGHSAEARGNRMADQAARKAAITETPDTSTLLAGKRTADGSEFEKRTADGSEFESPKKKAKVE

SEQ ID NO: 2739 - protein, 2093 aa, synthetic construct
  source 1..2093: note = Description of Artificial Sequence: Synthetic polypeptide
MPAAKRVKLDGGDKKYSIGLDIGTNSVGWAVITDEYKVPSKKFKVLGNTDRHSIKKNLIGALLFDSGETAEATRLKRTARRRYTRRKNRICYLQEIFSNEMAKVDDSFFHRLEESFLVEEDKKHERHPIFGNIVDEVAYHEKYPTIYHLRKKLVDSTDKADLRLIYLALAHMIKFRGHFLIEGDLNPDNSDVDKLFIQLVQTYNQLFEENPINASGVDAKAILSARLSKSRRLENLIAQLPGEKKNGLFGNLIALSLGLTPNFKSNFDLAEDAKLQLSKDTYDDDLDNLLAQIGDQYADLFLAAKNLSDAILLSDILRVNTEITKAPLSASMIKRYDEHHQDLTLLKALVRQQLPEKYKEIFFDQSKNGYAGYIDGGASQEEFYKFIKPILEKMDGTEELLVKLNREDLLRKQRTFDNGSIPHQIHLGELHAILRRQEDFYPFLKDNREKIEKILTFRIPYYVGPLARGNSRFAWMTRKSEETITPWNFEEVVDKGASAQSFIERMTNFDKNLPNEKVLPKHSLLYEYFTVYNELTKVKYVTEGMRKPAFLSGEQKKAIVDLLFKTNRKVTVKQLKEDYFKKIECFDSVEISGVEDRFNASLGTYHDLLKIIKDKDFLDNEENEDILEDIVLTLTLFEDREMIEERLKTYAHLFDDKVMKQLKRRRYTGWGRLSRKLINGIRDKQSGKTILDFLKSDGFANRNFMQLIHDDSLTFKEDIQKAQVSGQGDSLHEHIANLAGSPAIKKGILQTVKVVDELVKVMGRHKPENIVIEMARENQTTQKGQKNSRERMKRIEEGIKELGSQILKEHPVENTQLQNEKLYLYYLQNGRDMYVDQELDINRLSDYDVDHIVPQSFLKDDSIDNKVLTRSDKARGKSDNVPSEEVVKKMKNYWRQLLNAKLITQRKFDNLTKAERGGLSELDKAGFIKRQLVETRQITKHVAQILDSRMNTKYDENDKLIREVKVITLKSKLVSDFRKDFQFYKVREINNYHHAHDAYLNAVVGTALIKKYPKLESEFVYGDYKVYDVRKMIAKSEQEIGKATAKYFFYSNIMNFFKTEITLANGEIRKRPLIETNGETGEIVWDKGRDFATVRKVLSMPQVNIVKKTEVQTGGFSKESILPKRNSDKLIARKKDWDPKKYGGFDSPTVAYSVLVVAKVEKGKSKKLKSVKELLGITIMERSSFEKNPIDFLEAKGYKEVKKDLIIKLPKYSLFELENGRKRMLASAGELQKGNELALPSKYVNFLYLASHYEKLKGSPEDNEQKQLFVEQHKHYLDEIIEQISEFSKRVILADANLDKVLSAYNKHRDKPIREQAENIIHLFTLTNLGAPAAFKYFDTTIDRKRYTSTKEVLDATLIHQSITGLYETRIDLSQLGGDGGGGGGGGGGGGTLNIEDEHRLHETSKEPDVSLGSTWLSDFPQAWAETGGMGLAVRQAPLIIPLKATSTPVSIKQYPMSQEARLGIKPHIQRLLDQGILVPCQSPWNTPLLPVKKPGTNDYRPVQDLREVNKRVEDIHPTVPNPYNLLSGLPPSHQWYTVLDLKDAFFCLRLHPTSQPLFAFEWRDPEMGISGQLTWTRLPQGFKNSPTLFNEALHRDLADFRIQHPDLILLQYVDDLLLAATSELDCQQGTRALLQTLGNLGYRASAKKAQICQKQVKYLGYLLKEGQRWLTEARKETVMGQPTPKTPRQLREFLGTAGFCRLWIPGFAEMAAPLYPLTKPGTLFNWGPDQQKAYQEIKQALLTAPALGLPDLTKPFELFVDEKQGYAKGVLTQKLGPWRRPVAYLSKKLDPVAAGWPPCLRMVAAIAVLTKDAGKLTMGQPLVILAPHAVEALVKQPPDRWLSNARMTHYQALLLDTDRVQFGPVVALNPATLLPLPEEGLQHNCLDILAEAHGTRPDLTDQPLPDADHTWYTDGSSLLQEGQRKAGAAVTTETEVIWAKALPAGTSAQRAELIALTQALKMAEGKKLNVYTDSRYAFATAHIHGEIYRRRGWLTSEGKEIKNKDEILALLKALFLPKRLSIIHCPGHQKGHSAEARGNRMADQAARKAAITETPDTSTLLAGKRTADGSEFEKRTADGSEFESPKKKAKVE

SEQ ID NO: 2740 - protein, 2093 aa, synthetic construct
  source 1..2093: note = Description of Artificial Sequence: Synthetic polypeptide
MPAAKRVKLDGGDKKYSIGLDIGTNSVGWAVITDEYKVPSKKFKVLGNTDRHSIKKNLIGALLFDSGETAEATRLKRTARRRYTRRKNRICYLQEIFSNEMAKVDDSFFHRLEESFLVEEDKKHERHPIFGNIVDEVAYHEKYPTIYHLRKKLVDSTDKADLRLIYLALAHMIKFRGHFLIEGDLNPDNSDVDKLFIQLVQTYNQLFEENPINASGVDAKAILSARLSKSRRLENLIAQLPGEKKNGLFGNLIALSLGLTPNFKSNFDLAEDAKLQLSKDTYDDDLDNLLAQIGDQYADLFLAAKNLSDAILLSDILRVNTEITKAPLSASMIKRYDEHHQDLTLLKALVRQQLPEKYKEIFFDQSKNGYAGYIDGGASQEEFYKFIKPILEKMDGTEELLVKLNREDLLRKQRTFDNGSIPHQIHLGELHAILRRQEDFYPFLKDNREKIEKILTFRIPYYVGPLARGNSRFAWMTRKSEETITPWNFEEVVDKGASAQSFIERMTNFDKNLPNEKVLPKHSLLYEYFTVYNELTKVKYVTEGMRKPAFLSGEQKKAIVDLLFKTNRKVTVKQLKEDYFKKIECFDSVEISGVEDRFNASLGTYHDLLKIIKDKDFLDNEENEDILEDIVLTLTLFEDREMIEERLKTYAHLFDDKVMKQLKRRRYTGWGRLSRKLINGIRDKQSGKTILDFLKSDGFANRNFMQLIHDDSLTFKEDIQKAQVSGQGDSLHEHIANLAGSPAIKKGILQTVKVVDELVKVMGRHKPENIVIEMARENQTTQKGQKNSRERMKRIEEGIKELGSQILKEHPVENTQLQNEKLYLYYLQNGRDMYVDQELDINRLSDYDVDHIVPQSFLKDDSIDNKVLTRSDKARGKSDNVPSEEVVKKMKNYWRQLLNAKLITQRKFDNLTKAERGGLSELDKAGFIKRQLVETRQITKHVAQILDSRMNTKYDENDKLIREVKVITLKSKLVSDFRKDFQFYKVREINNYHHAHDAYLNAVVGTALIKKYPKLESEFVYGDYKVYDVRKMIAKSEQEIGKATAKYFFYSNIMNFFKTEITLANGEIRKRPLIETNGETGEIVWDKGRDFATVRKVLSMPQVNIVKKTEVQTGGFSKESILPKRNSDKLIARKKDWDPKKYGGFDSPTVAYSVLVVAKVEKGKSKKLKSVKELLGITIMERSSFEKNPIDFLEAKGYKEVKKDLIIKLPKYSLFELENGRKRMLASAGELQKGNELALPSKYVNFLYLASHYEKLKGSPEDNEQKQLFVEQHKHYLDEIIEQISEFSKRVILADANLDKVLSAYNKHRDKPIREQAENIIHLFTLTNLGAPAAFKYFDTTIDRKRYTSTKEVLDATLIHQSITGLYETRIDLSQLGGDGGPAPEAAAKGGTLNIEDEHRLHETSKEPDVSLGSTWLSDFPQAWAETGGMGLAVRQAPLIIPLKATSTPVSIKQYPMSQEARLGIKPHIQRLLDQGILVPCQSPWNTPLLPVKKPGTNDYRPVQDLREVNKRVEDIHPTVPNPYNLLSGLPPSHQWYTVLDLKDAFFCLRLHPTSQPLFAFEWRDPEMGISGQLTWTRLPQGFKNSPTLFNEALHRDLADFRIQHPDLILLQYVDDLLLAATSELDCQQGTRALLQTLGNLGYRASAKKAQICQKQVKYLGYLLKEGQRWLTEARKETVMGQPTPKTPRQLREFLGTAGFCRLWIPGFAEMAAPLYPLTKPGTLFNWGPDQQKAYQEIKQALLTAPALGLPDLTKPFELFVDEKQGYAKGVLTQKLGPWRRPVAYLSKKLDPVAAGWPPCLRMVAAIAVLTKDAGKLTMGQPLVILAPHAVEALVKQPPDRWLSNARMTHYQALLLDTDRVQFGPVVALNPATLLPLPEEGLQHNCLDILAEAHGTRPDLTDQPLPDADHTWYTDGSSLLQEGQRKAGAAVTTETEVIWAKALPAGTSAQRAELIALTQALKMAEGKKLNVYTDSRYAFATAHIHGEIYRRRGWLTSEGKEIKNKDEILALLKALFLPKRLSIIHCPGHQKGHSAEARGNRMADQAARKAAITETPDTSTLLAGKRTADGSEFEKRTADGSEFESPKKKAKVE

SEQ ID NO: 2741 - protein, 2115 aa, synthetic construct
  source 1..2115: note = Description of Artificial Sequence: Synthetic polypeptide
MPAAKRVKLDGGDKKYSIGLDIGTNSVGWAVITDEYKVPSKKFKVLGNTDRHSIKKNLIGALLFDSGETAEATRLKRTARRRYTRRKNRICYLQEIFSNEMAKVDDSFFHRLEESFLVEEDKKHERHPIFGNIVDEVAYHEKYPTIYHLRKKLVDSTDKADLRLIYLALAHMIKFRGHFLIEGDLNPDNSDVDKLFIQLVQTYNQLFEENPINASGVDAKAILSARLSKSRRLENLIAQLPGEKKNGLFGNLIALSLGLTPNFKSNFDLAEDAKLQLSKDTYDDDLDNLLAQIGDQYADLFLAAKNLSDAILLSDILRVNTEITKAPLSASMIKRYDEHHQDLTLLKALVRQQLPEKYKEIFFDQSKNGYAGYIDGGASQEEFYKFIKPILEKMDGTEELLVKLNREDLLRKQRTFDNGSIPHQIHLGELHAILRRQEDFYPFLKDNREKIEKILTFRIPYYVGPLARGNSRFAWMTRKSEETITPWNFEEVVDKGASAQSFIERMTNFDKNLPNEKVLPKHSLLYEYFTVYNELTKVKYVTEGMRKPAFLSGEQKKAIVDLLFKTNRKVTVKQLKEDYFKKIECFDSVEISGVEDRFNASLGTYHDLLKIIKDKDFLDNEENEDILEDIVLTLTLFEDREMIEERLKTYAHLFDDKVMKQLKRRRYTGWGRLSRKLINGIRDKQSGKTILDFLKSDGFANRNFMQLIHDDSLTFKEDIQKAQVSGQGDSLHEHIANLAGSPAIKKGILQTVKVVDELVKVMGRHKPENIVIEMARENQTTQKGQKNSRERMKRIEEGIKELGSQILKEHPVENTQLQNEKLYLYYLQNGRDMYVDQELDINRLSDYDVDHIVPQSFLKDDSIDNKVLTRSDKARGKSDNVPSEEVVKKMKNYWRQLLNAKLITQRKFDNLTKAERGGLSELDKAGFIKRQLVETRQITKHVAQILDSRMNTKYDENDKLIREVKVITLKSKLVSDFRKDFQFYKVREINNYHHAHDAYLNAVVGTALIKKYPKLESEFVYGDYKVYDVRKMIAKSEQEIGKATAKYFFYSNIMNFFKTEITLANGEIRKRPLIETNGETGEIVWDKGRDFATVRKVLSMPQVNIVKKTEVQTGGFSKESILPKRNSDKLIARKKDWDPKKYGGFDSPTVAYSVLVVAKVEKGKSKKLKSVKELLGITIMERSSFEKNPIDFLEAKGYKEVKKDLIIKLPKYSLFELENGRKRMLASAGELQKGNELALPSKYVNFLYLASHYEKLKGSPEDNEQKQLFVEQHKHYLDEIIEQISEFSKRVILADANLDKVLSAYNKHRDKPIREQAENIIHLFTLTNLGAPAAFKYFDTTIDRKRYTSTKEVLDATLIHQSITGLYETRIDLSQLGGDGGGGGGSGGGGSGGGGSGGGGSGGGGSGGGGSGGTLNIEDEHRLHETSKEPDVSLGSTWLSDFPQAWAETGGMGLAVRQAPLIIPLKATSTPVSIKQYPMSQEARLGIKPHIQRLLDQGILVPCQSPWNTPLLPVKKPGTNDYRPVQDLREVNKRVEDIHPTVPNPYNLLSGLPPSHQWYTVLDLKDAFFCLRLHPTSQPLFAFEWRDPEMGISGQLTWTRLPQGFKNSPTLFNEALHRDLADFRIQHPDLILLQYVDDLLLAATSELDCQQGTRALLQTLGNLGYRASAKKAQICQKQVKYLGYLLKEGQRWLTEARKETVMGQPTPKTPRQLREFLGTAGFCRLWIPGFAEMAAPLYPLTKPGTLFNWGPDQQKAYQEIKQALLTAPALGLPDLTKPFELFVDEKQGYAKGVLTQKLGPWRRPVAYLSKKLDPVAAGWPPCLRMVAAIAVLTKDAGKLTMGQPLVILAPHAVEALVKQPPDRWLSNARMTHYQALLLDTDRVQFGPVVALNPATLLPLPEEGLQHNCLDILAEAHGTRPDLTDQPLPDADHTWYTDGSSLLQEGQRKAGAAVTTETEVIWAKALPAGTSAQRAELIALTQALKMAEGKKLNVYTDSRYAFATAHIHGEIYRRRGWLTSEGKEIKNKDEILALLKALFLPKRLSIIHCPGHQKGHSAEARGNRMADQAARKAAITETPDTSTLLAGKRTADGSEFEKRTADGSEFESPKKKAKVE

SEQ ID NO: 2742 - protein, 2094 aa, synthetic construct
  source 1..2094: note = Description of Artificial Sequence: Synthetic polypeptide
MPAAKRVKLDGGDKKYSIGLDIGTNSVGWAVITDEYKVPSKKFKVLGNTDRHSIKKNLIGALLFDSGETAEATRLKRTARRRYTRRKNRICYLQEIFSNEMAKVDDSFFHRLEESFLVEEDKKHERHPIFGNIVDEVAYHEKYPTIYHLRKKLVDSTDKADLRLIYLALAHMIKFRGHFLIEGDLNPDNSDVDKLFIQLVQTYNQLFEENPINASGVDAKAILSARLSKSRRLENLIAQLPGEKKNGLFGNLIALSLGLTPNFKSNFDLAEDAKLQLSKDTYDDDLDNLLAQIGDQYADLFLAAKNLSDAILLSDILRVNTEITKAPLSASMIKRYDEHHQDLTLLKALVRQQLPEKYKEIFFDQSKNGYAGYIDGGASQEEFYKFIKPILEKMDGTEELLVKLNREDLLRKQRTFDNGSIPHQIHLGELHAILRRQEDFYPFLKDNREKIEKILTFRIPYYVGPLARGNSRFAWMTRKSEETITPWNFEEVVDKGASAQSFIERMTNFDKNLPNEKVLPKHSLLYEYFTVYNELTKVKYVTEGMRKPAFLSGEQKKAIVDLLFKTNRKVTVKQLKEDYFKKIECFDSVEISGVEDRFNASLGTYHDLLKIIKDKDFLDNEENEDILEDIVLTLTLFEDREMIEERLKTYAHLFDDKVMKQLKRRRYTGWGRLSRKLINGIRDKQSGKTILDFLKSDGFANRNFMQLIHDDSLTFKEDIQKAQVSGQGDSLHEHIANLAGSPAIKKGILQTVKVVDELVKVMGRHKPENIVIEMARENQTTQKGQKNSRERMKRIEEGIKELGSQILKEHPVENTQLQNEKLYLYYLQNGRDMYVDQELDINRLSDYDVDHIVPQSFLKDDSIDNKVLTRSDKARGKSDNVPSEEVVKKMKNYWRQLLNAKLITQRKFDNLTKAERGGLSELDKAGFIKRQLVETRQITKHVAQILDSRMNTKYDENDKLIREVKVITLKSKLVSDFRKDFQFYKVREINNYHHAHDAYLNAVVGTALIKKYPKLESEFVYGDYKVYDVRKMIAKSEQEIGKATAKYFFYSNIMNFFKTEITLANGEIRKRPLIETNGETGEIVWDKGRDFATVRKVLSMPQVNIVKKTEVQTGGFSKESILPKRNSDKLIARKKDWDPKKYGGFDSPTVAYSVLVVAKVEKGKSKKLKSVKELLGITIMERSSFEKNPIDFLEAKGYKEVKKDLIIKLPKYSLFELENGRKRMLASAGELQKGNELALPSKYVNFLYLASHYEKLKGSPEDNEQKQLFVEQHKHYLDEIIEQISEFSKRVILADANLDKVLSAYNKHRDKPIREQAENIIHLFTLTNLGAPAAFKYFDTTIDRKRYTSTKEVLDATLIHQSITGLYETRIDLSQLGGDGGGGGPAPGGSGGTLNIEDEHRLHETSKEPDVSLGSTWLSDFPQAWAETGGMGLAVRQAPLIIPLKATSTPVSIKQYPMSQEARLGIKPHIQRLLDQGILVPCQSPWNTPLLPVKKPGTNDYRPVQDLREVNKRVEDIHPTVPNPYNLLSGLPPSHQWYTVLDLKDAFFCLRLHPTSQPLFAFEWRDPEMGISGQLTWTRLPQGFKNSPTLFNEALHRDLADFRIQHPDLILLQYVDDLLLAATSELDCQQGTRALLQTLGNLGYRASAKKAQICQKQVKYLGYLLKEGQRWLTEARKETVMGQPTPKTPRQLREFLGTAGFCRLWIPGFAEMAAPLYPLTKPGTLFNWGPDQQKAYQEIKQALLTAPALGLPDLTKPFELFVDEKQGYAKGVLTQKLGPWRRPVAYLSKKLDPVAAGWPPCLRMVAAIAVLTKDAGKLTMGQPLVILAPHAVEALVKQPPDRWLSNARMTHYQALLLDTDRVQFGPVVALNPATLLPLPEEGLQHNCLDILAEAHGTRPDLTDQPLPDADHTWYTDGSSLLQEGQRKAGAAVTTETEVIWAKALPAGTSAQRAELIALTQALKMAEGKKLNVYTDSRYAFATAHIHGEIYRRRGWLTSEGKEIKNKDEILALLKALFLPKRLSIIHCPGHQKGHSAEARGNRMADQAARKAAITETPDTSTLLAGKRTADGSEFEKRTADGSEFESPKKKAKVE
